United States Patent Application Publication US 2020/0377945 A1 - sequence listing, part 44

SEQ ID NO: 9304 - DNA, 536 bp, Unknown
  gut microbiota DNA sequence
ctcaacgacgcggggttcaaggatgtgtgcgcaacggcgaggcgccctttcgccgcctcgcactcgaacgcgcgcgccgtgtgcgggcatccgcgcaacctggccgactggcagctgcgcgagctggccgattgcggcggcatcgcggggctcaacttctgcacgcagttcctgaccgatcgcctggccgatccgacgcgcgacgacgtgttgcgtcacgtcgaccatgtgttggagacggcgggcgaggacgtgctggcgttgggcagcgactacgatggctgcgacgtgcccagctggctggaaccgtgcgaccgcatcggcgcgctgcacgagctgctggcttgcgagttcggccgcgacatcgccgacaaggtgttcttccggaacgcgcgcgatttcttcgagcgggtcgagtccgtatagcggcccctgtcatcctgagcgtaggcgcgcagcgccgaagtcgaaggatcccgtgcggcgatagctggaagtctcacggttggcgccgcgcgcgatccttcgactgcgct

SEQ ID NO: 9305 - DNA, 970 bp, Unknown
  gut microbiota DNA sequence
accgtgcgaatcggaaatacaacaacctgttcaggctcgagaacgagctgtaccacgacatagccgtgaagatgggactgtccgacagcgctttcggtatcctgtactggctcgacgatttgggcgacggctgtctgcagcgggacgtgtgcgtggcgtcgggcctgactaagcagacggtgaactcgtcggtgcataagctcgagcgcacgggcttcgtggagcttcgggtggagcaggggcgcggcacgcacctgcaccttaccgaggctggtcgcgcgttggtggaggagcgcgtccggccggtggcggaagccgagacggccgcgttcgttgcgatgggctcgcgagacagcgaagagctgctgcggctgacccatctgcatcttgagctcctgcgcgagcaggtggaagctctgccgtacccggacggacggtgatcgtcgtggccatcaagctatccgaccatttcacctacgggcgcctcgtgcgcttcgcactgccctccatcgccatgatgatattcacgtccatctacagcgtggtggacggcctgttcgtgtcgaatttcgccggcaaggaggcgctggcggccgtgaacctcgtgttcccgctggccatggcgctgggctccatcggattcatgctgggcacgggcggcgccgccctggtggcgaagacgatgggcgaaggcgatgccgagcgggcgaaccgcctgttctcgttcataacgatcgcggcggcggtggcgggcgccgtcttgatcgcggtaggcgccgcagcgctcgaaccggtgctgctccttctgggcgcccaaggcggccttttggagcagggccttctgtacgggcgcatcctgctggtggcattgcccctgttcatcgtgcagaacgtgtttctgagcttcttcatcgcggcggagaagccgcaggtgggcttcgcggtgacggtcgcagcgggtgtgacgaac

SEQ ID NO: 9306 - DNA, 1267 bp, Unknown
  gut microbiota DNA sequence
gccggtgctgctccttttgggcgctcaaggcagtcttttagagcaaggccttctgtacgggcgcatcctgctggtggcgttgcccctgttcatcgtgcagaacgtgttcctgagcttcttcatcgcggcggagaagccgcaggtgggcttcgcggtgacggtcgcagcgggtgtgacgaacatcgtgctggactatctgttcatcgccgttttgggctgggggatagcgggcgccgcagttgcgaccgcggcgggccaggcgcttgccgccgcggtatcggttgcgttcttcgcgcgcagcaagacgagccgccttcgcttcatgcgcccggcggtggacttccgcgcgctgggggcggcctgcgtcaacggttcgtcggagctgatgaccgaggtggccgcgtcggtggtgagcatgctgtacaactaccagctcatgatgctggccggcgccgacggcgtggcggcgtacggcgtgatcatgtacgtgaacttcatcttcacggcggtgttcttcggcttctccatgggaacagggccggtggtgagctatcactacggcgcgcagaaccggaccgagctcaaagggctgttccgcaagagcttcatactggtgggaaccacaggcgctgtaatgttcgccgcctcgcagctgctggcggcgccgctggtgagcgtgttcgtgggctacgatccggagctcgccgccatgacgctgcacgggttccgcatctacgcggtggcgttcctcgtgtgtgggttcaacatatacggctcggcgttcttcacggcgctcaacaacggcaaggtatcggcgctcatcagcttcatgcgcacgctcgtgttcgaaacgtccacggtcatgctgctgcccatcgtgtggggcatcgacggggtgtggagcgccatcatcgtggcggaggcgtgcgcgctcgtgctgacgacgttcttcctggtgtacctgcgcaaaccctacggctacgcgtagggttcgcctgtccgtccccctatctcgcggaagcgcgaggagccgcggttagcgatagcaggtggcggtcatcttcgcgatctgcttgccgaggtcgtcctcgaccgtgacggtgtagaatcccagatggcggcccggcttgtcgcagacggccgtggcggtgagcgccgcgccctgcgtggagcggaagaagctgatggaagagtccaccgacacggtgggctcttcgccgatgttgcagcatatcgccagcgcgaagtcggccagcgtgaagatggc

SEQ ID NO: 9307 - DNA, 861 bp, Unknown
  gut microbiota DNA sequence
gcgaaaatgctcttcgtgtgggtccgcacggtgttcttcgatatgaccagctcttcggccacatacggcacatcgcggccacgggcaaggaggtcgagaacctcggcctcgcgacgcgacagaccgtaacgctcgacagcaactgcgcagcctgcagtcacggaatcgcctacagctccgactacaggagccagcttctctcccgaagcggctttcacgctacccgccttcctcccatgcggcgccaccatcgctaccgacagcgcgtacaccgccaccaatgccaccacggacagctccgccagcccaacgcctcgacccgcgcccacgaacaagcccacgacggaacccgccagcgagcttgcatacacgatgctggcgaaggtgccgtacacgagcacgggagtgagcgattggttgcgcgccgtccgagcgcacgacactaccatgagcgaagacgtgaccgaaaacaccaggaacacgagggagtacaccacctggcgaaacgttccctcaagaagcggtaacagcagaaacgccgtcgccgtaagcggaaacagaatctgatacaaacgcatgagcgtaacgcgctcgtacaagaacctccaagttgccagcagcgcgaccgaagcggcaagcagcccgatcatgttgctttcattcgtttgccctatcgacccgccacccgaagccgaaccgacgcgcacgatacccacaatgaacgcggagaacgcgacgcagagcaaagggcgccacaactcggaaaccgcttcgcggcaccgatcgcgtcgctgatcgggaaccgtgtcgaacatgggatgcaccttcggagcgcatttccatgcagcacaggttagcgcc

SEQ ID NO: 9308 - DNA, 5359 bp, Unknown
  gut microbiota DNA sequence
agcgacgcagagcaaagggcgccacaactcggaaaccgcttcgcggcaccgatcgcgccgctgatcgggaaccgtgtcgaacatgggatgcaccttcggagcgcatttccatgcagcacaggttagcgccaccgccgcgctgacgaacacgaacagcgacatccacggtactgcatcggcgggcaaaacctcaacagcgaaaaacagcaacgccgaaatcccagcggcggcaaacacgacgataccggccgtgaacaccttttgcgcagccacgatttcctgcaaggcgccgaacatgatcccgcttccccatccgaagcacgcgcccaccacgacaagcgaccactcggacgaaaccacgccgccatgctgcaaggcaaccagcagcgaacccgcaagaaaaagccccagcgccagtatcggagaacgccacagccgagccttcggccaatagaaggcggccaagccggaaaccgcaagcgagagaggcagggtcgcgcttcgcacgaaatactcgagcatgaaagagcccggatccacctgcccggtcagaaaccgcacataccctccccacagcgtcaccgaggtgcacgccaggaagaacccgtaggcgagcgcggccagcacctgctctcgcttcatgtttttcagaatgaatctcatggatccgcacctcccctccgcgcgcgaacagcatgcgctcgaacttccgcgccagctgtccgcgcgcccattgtaccgcacccctcgacctccttagcggacgctcgcgatgtccgaccttctggacgaaaaaccacctaggctgggtgaggccttgttttccctgatcgattaggctgcgatcagtccaaggcgcaaacagcgcccgcaaggcaagcagcgccttggtgagataagctaggaaagggagttcatcatggagggaaatctgaaccgtcgcagcttcgtcaaaggggcggcattgagcgctgcaggcctcattgcgggaggcgcgctggccgcatgctcgcccgcagcaggaacatccgaaagcaagtccgactccgcccaaacgacgggcgcgaacaacgccgaacagcggtggagcttcgagatcgcgcccgatcctatcggcgacgacctcgtcaccgaaacggttgaaaccgatgtcgtggtggtgggaggcggcatgagcggtctggtcgcagctgcatcatgcgctgaaaacggattgaaggtgacgctcatcagcgcgtcgaaggctcctgtgagccgcggcggatccaacaacggcgtgtattcgaaggtcatggaagagatgggcatcccccgcatggatcccacgtggttctaccgcaaggagtacctcgccaacggcggcaacttcaaaccggctctgtggtacaagttctacaacaactccgaggaggccatcaactggatcatcgacatcgcggccaaggccggcatcaagaccaccatcgagtcgggtccggaatacaaagaaggcgacccgatgttcaccccgcccgcagctcacgcgttctacgttgacgacagcgagctgaaaggctccatcggaaacggcgaagggcatatcgctgcggagatggggaggtacgtgaccaaagacctgggagtagacgtgcgctggaacgtcaaaggcgagcagctggttcgcggcggcgttgccaacggcaaggaaggtcgcgtggacgcgatcatcgcgtccgatgccgacggcgcctacaccaaatacgtcggcaccaaagccgtcatcatggcaaccggcgacttctcccatgacaaggacatgatggagcgctattgcccccaggccgtcgagctgtgcgatttcacaaccgatatcaactacgatcagggcatttggatgggcgggctcatgcccggagacggccacaaaatggagctttgggtgggcggcgcctggcaaaaggagcccaacaacatcatgctcggccgccccaaccttcccggcgaccaaccttacacgagccacaccggcctcatggtggacaacatgggacagcgcttcatgaacgaggacgcgttgggaggcctcgcctgcgcgaccatcatgcatttgcccgagaagaccgcctattgcatctggggcgctaatcgcgccgaagcaggtgggccctggggcgccatcaactaccctcacggcgaatacttcacgacggaagaggttatcgaacgctgggatacggatgccgacggcttcggcatcgtcaaggcagacacgcgcgaagaggtcatctcgaagctcggcttgccggcggcgactatcgacaccgtcgagcgctacaacaagatgtgcgaagcaggcgtggacactgatttctacaagaccgccgacaagctcatctccattggagcagacgacggtcccttctacggcgcatccttctctcccggcttcctgacttctttgggcggcctgcgcaccgacagcgatcttcgggtgctcgacgagaacgaccagccgatcgaaggcctgttcaacgccggatgcatgatcggcaacttctactccggcacctacacgttcgcgatggaaggcatgaactacggagccacctgcattacgctgccctacgttttgggcaaggatctaggttctggcaagctcaactaacctgtacgcacccctcctccccaagcgcgtcgtccgggtcccgctggatcgggtcgacgcgctttgctgcgtgcgttcgacggcgcccgtgcgaaaaggcttgccgtttctggcaggtttcggccgaaagcgaggcaacgctgcgcacgcgaaaaaaatgcgggtgcaacgcgcttgcgctgcacccgcatcagggaggggatgaaggaggaaagggtctaggctttcaggtacgccgccgcgctctgggcgccgatgcgaccccacgtgaagcagttggaaagcgtgaatcccatgtaggcggagttgcagctagcctcgccgcccacgaacaggcccggcatcacttcgccatcagcacggatgacctcgccctgctcggtgcgagccacgccgccgtacgtgatgatctcgcacggcacgacgggcacggccaggaaaggagcctccagcttggccgtggggaagccgccgatctcgcggtccacgcccgagtccaccgcagcgttgtaggcctcgatggtctcggcaagcgctgcggcatccacgcccatgttggccgcgagctcagtcgcatcggcacccttgatgtattcgagtccttcgccgcgcttcactttgccgccggctgccgccaccgtggcctcgtcggagatctcccatacgtagcccatgccgtcgcgatggatcttgtcgaaaatggggccgttcagatcttggctcatgaacccctttttaccctcgtcgacgaagcgcttgccgtcggcgcccaccagtatcatgttgggaagattggtaaagccgttgaggttcgcgctggccgaagtgccgtcatgctcgctcatgatggtgtagtccttcaccacgcacatcatgtcgttggtgtgcgacaggagcgcgcctgcgttcgaagcggccaccaggccctcgccctcgcaattcgggtgcccgatgccgaacgtacccgccttctcgggatcgaagcgcgccgccagctcggcgttgtgggcgtagccgccggtggcgatcatgacagcgcgcgccttgatacgctgcgtctttcccttcgcctcgaccaccgcgccttccgtcttgccctcggcgtccagcaggacctccaccagcttcgtgcccttctggatctccacgcccagctggtccaggcaggcggtgaaagccgtgacgaaaccgccgcccgcgccgtcgacgttatgcatcatttgcagggggccgtagtagatgtcgatctgatccgtgaacttgacgcccacgcggtcgatcagccagtcgatggtcttgccgctgttctccaccgtgatcttagtgagcgccgggtcaagatgatacgacgcgttgttcatcaggttcgcatacatcgcgtcgtaggtgagctcgacgccctgcgacttctgcagctgggtatcccaaccggcaatcatgccctgggacatagccgtagtgccgccgatctggtcacccttttcgatgatcagcacgttctccacgccattgtccttggcttcgaccgcgcacgccatgccggcgccgccgcagccgcacaccagcaggtcgacctcggcatcccaggtgccctcggaacccgtgggcttgtcgccttgcggagcgcagcccgcaagcgcgcccaatgcgagcgctgcgccgcccagcgccgcaccgccgatgaagttgcgccgtgaaattccttcgttcatgacatccctcctgttgctcgggccgaaccgccgctcctgcgggcacaatgccctcccctggcgaccgttcagtttcgattgctatccttgtcgtcggaactcttcccgccctacttgacgacccgctcagcataggccggagaacaggcgcgacgcatctcccattctgggtcgaatcggcgactcgacccctccctcattttgggttgaattgcctccagcagggcttttttgcacgaacaggggttggcagagagacgatactatcggacaatgagcgcagattcggcgacgtatcgaggggaggggtcggccgatggatgtttcgcgcttcgacaagcgccgtctgctcgtcgcgcgctgcgcgcttggattcgcctcgttcaaagtcgcccagtcgtccctatactccacggccatgctgacgtcggaaacgaccaccgtcctcatagcgggattggacttcagcatcgcgtcggctgctttcgtcgtcctcacggaggcggtcatcgtcgcgctggccctgcttggtcggctgcccaggctatccatgccagtggtcgcgccctcgttggtgctggcggccaccgcggtgttgtcgtacagcggcgctctctcgtccgtcgatccagcagtctcgctgatggcgcttgctttcgcgcagggaaccgccacggtcatgctcacgttggcttgggtagaaatcatgacgcaaatggagctcaccaccagcatgaagacgctggcctcgtcgatgctgctggccgccgcggtcaccttggccttgcagaacagcccttcgctggtcatgcttccctgcgtcgtggcgacgcttgtggcgagcgcactgctctatcgacgcgcgaaaggaattgcaggcaacgcgcttgccagcggcaagacgaagggaggcgacgaggtgacggcgggcgcggagcagaagagggatcgaacctccctgcgaccgtaccttcggggattcgtgtccatcggggaaggcctg

SEQ ID NO: 9309 - DNA, 3085 bp, Unknown
  gut microbiota DNA sequence
ggctttcgtcgtcctcacggaagcggtcatcgtcgcgctggccctgcttggtcggctgcccaggctatccatgccagtgatcgcgccctcgttggtgctggcggccaccgcggtgttgtcgtacagcggcgctctctcgtccgtcgatccagtagtctcgctgatggcgcttgctttcgcgcagggaaccgccacggtcatgctcacgttggcttgggtagaaatcatgacggaaatggagcccaccatcagcatgaagacgctggcctcgtcgatgctgctggccgccgcggtcactttggccttgcagaacagcccttcgctggtcatgcttccctgcgtcgttgcgacgctagtggcgagcgcactgctctatcgacgcgcgaaaggcatagcgggcaacgcgcttgccagcggcaagacgatgggaggcgacgaggcggcggcgggtgcggagcagaagagggatcgaacctccctgcgaccgtaccttcggggattcgtgtccatcggggaaggcctgctgtcgctgctggtgctcggatgcgtcgtgggcatcatcaacggattcatggtggtgcagcactacgacttcgacggctcgtctttggcatcggcgatgggcatcgccgcagcctcgatggcgttcttcgtcatggcatacggctttccgaagacgttcagcgcttcccgcgcttatcgcgcgcttttccccctgctcaccggcgtgctgatcatttggccgttcgcgaacttccagtacagctacttcgtgggcgcggcgttcgtcgccggccacagcctgatctccaccagcgtgatgtacctcatcattcgcgaagcgcacgaaagcgatttgaacccgtatgcgttcatgggtgcgtcggtgctgctgatcaggcttgcatcggtgtcggggatcgtaggcggcacggttatcgcggggctcgatctcaacccgtcgttcaagacgatgctggtgttctgcatcgcgttgtacctgctttccatcgtcctgctattcatgctgcgcatcaggaagcgctcggaacgcgagcaacggccggccgcgtccggcgagcccgtccgaggcgaagacgcattcgacgccaaaggcaccgaagtgacggttcggcatggcctgacggaccgcgaatcggaaatcctcctgctgctggctcgcggcaggagctccacctatatcggcgaggctctgtacctgtctcccaacaccgtgcgaggacatatcaagaacatctacgcgaagctgggcgtacactccaagcaggagataatcgacctgttcaccgcttgacctccacgaaaatgtcctaaaaggggcctgttcccttttaggacatccgtagcgtcgaacagccggtagaaccgcctgcctcgctccatccctaacatccaaaggccgcctttcgctatagagccctagccgatgcccacgaaaacgccccagatgggaattgccccttttaggacgttagatcttgtacatcatctggaagacgtcttcgcgctggacgatgatttggacacccagggattcgcccacagcttccagcttctcctgcaccgtgttgaagtcggccacctcgggattgagcgtggtcagcatggtcatcgagaagatgtcgtccaggatggtctggctgatgtcgtcgatgttcgcgccgcactcggcaagcgcggtggcaacctccgcgacgatgccgctgcggtccttgcccagaacggagactacacacttcattggctggttcctttccttgcctgctgcgctacctgattgcgaacgaatgtttcatgtgaaacattcgcgatggccctttcggggcgcgccctagttccgtcgcgcgaagatgagcgacagcgcctcggcgcgcgtcgcctggcttttctcgaaggctccgcgcacggcgctggtggtggtggtcgtgccgggcttcttcacaccgcgcatgctcatgcacatgtgctcggcctccaaaaccacgatcacgccctgcgggtgcagctgttcgatcagcgtgtcggcgatttgcgaggtcagacgttcctgcacttgcggtcgtttcgcgaaagcatccaccaggcgcgcgagcttcgacaatccgcagatgcgtccatcggatgccggaatgtacgccacatgcgccacgccgaaaaacggcgcgagatgatgctcgcacatggaatagaaggggatgtcgcgcacgagaaccatttcctcgtggtgctcgtcgaacgtggtttcgaaatgctgcgccggatcctcagtgaggcccgcgaacacctcttcgtacatcttcgccacgcgctcgggagttttgaccaggccctcgcggccgggatcctcgcccacgccttcgaggatcagccgcacgccctcttcgattttcgctctatccataaccgtctttctgccgtcatacaacgagaagcatcataccatgagcgctctttccgctgcggcacacgccacagggactctagatgacgcggtgtctgcgaacgccgttgcagaaccgcttgccgcgcgccccgtcattcgcgacgtcaagatcggcaagctccccgccgcctcgagagacaaggatccttcggacagtcagcttcttggaaagtggaaaacggggagcggggggcggggggagcgggggcggggcggaggatgacggagaaatcgaagctcggcggcagaaacgggacggtttggtaatctcccgcctgccttccgacccgaatttccaaggctcgaacgcagcatcctgcatatccccaggtgaagaagagccgagagatatcccacggttttcataggattaccaaactcccccgcttttaccatacggaagcattttcggcgtcaccggccgcagctcgaacgccccagacggagcattcgagctgcaagcgatcctacagctccagctctatccccacggggcagtggtcgctgccgtagacttcgtcgtagatgcaggcgctttggatcttcggagccaactcgtcgctgaccaggaagtagtcgatgcgccaccccgcgttcgtctggcgcgctttgaagcggtag

SEQ ID NO: 9310 - DNA, 1553 bp, Unknown
  gut microbiota DNA sequence
cctacagctccagctctatccccacggggcagtggtcgctgccgtagacttcgtcgtagatgcaggcactttcgatcttcggggccaactcgtcgctgaccaggaagtagtcgatgcgccaccccgcgttcgtctggcgcgctttgaagcggtagctccaccacgagtacgcacccgtcacgtcaggatgcaggtggcggaacgagtcaacgaacccgacctccagcaagtcggtgaacttgccgcgctcctcgtccgagaaaccggccttgccgcggttcggacccgggttcttgaggtcgatctcctggtgagccacgttgaagtcgccgcacatgacgacgggcttcgggtcggccgtctcgcccggctgcgtcagcggcagctcggaaatggccacgtgcccctcgcccaacgccggccgctccaccggcacgccggcgggcagcacgccttcttcgagccccttgcagaagtcgcggaacgcgtcgtcccactccatgcgatggtcgatgcgcgccagctcgttctgcgcgttcggcgtgtacacgtccacgaaccagaatttcgggaactccagcgccacgatgcgcccctcggtatccaggtgcgggaagcccaggccgtgcagcgcctgcagcggctgctctttgcagaatatggccgtgccggagtaacccttcttctcggcatagctccagtactcgcggtactgcggcaggtcgagcgtggcctggccctcttgcagcttcgtttcctgcaaggcaacgatgtcggcgtccagctcgcacacgatgtcttcgaagccttttttcagcacggcgcgcaagccgttcacgttccacgagacgaagcgcatatagttcctttcccgattcgccaacgactcggtcattataccgcgcagatcaccaacacggatgacgggcggaatgaggcaaaggggaggggttggcgtctcgtcgtcgcgagagcgcccgtcccccatatccccaaacgagacgttaaccccgcccctttgcctcattctcaaaaagcacgtgtcgagcggggcggcagcgggtagtatggttccatcacaccggaagacgaagggaaccgcatgcaacgcttcgctcgctcaaaggccgcgcgttgggccgcgttttggctgaccgcgcttctggcagcagccttcgcaggtgcgctcgcgcccgcgtcggcccatgcgcaggacgcggcgcactcgccctgcatcgccaccgtcgagcaacgcgccgcctatgccgcagacggcacgctggacgaacgagaagccttccaggaaagcctcggcaacgacgagccctcccccggcctcgtccaacaggccatcgcgcgcgagcaggcgcaaaacggcatcgccccgaacgcggttcccggcgacgacggcggcatggccgctatcggcaacgcacacgtggtggcgctgcgcgtgtcgttccccgaccgccccttcgcggaaggagatacgctggaagcgcttcaggcgctcataggcccacgcgccgtcggcgaggccgcgctgccgagcg

SEQ ID NO: 9311 - DNA, 460 bp, Unknown
  gut microbiota DNA sequence
ctcaagctcctcaacagttgccataactccctcttcctaggtcaagctgaaaccgccttcgttgtagatggtttcgcccgtaatgaacgaagcgtcttccgaagccaggaacagcgcgacgtcgaccgtctcgcgaacttcgccgtagcgtccgaagggcatcttcgccaagaacgcagcgctccgctcaggatcgttgatcgtcccggcggctatgcgcgttttcgacgtgccgggagctatcgcgttcacatgaatgccgtacttcgccagctcgagcgccatcacctgcgtaagcattttgacggcggctttcgaggggcaatagggggtgatgccgccgatggtcttgcgggagctgttcgagctcgtgttcacgatgtagcctttcacgccaagctcgaccatcgtgcgcgcaacagcctggccgacgtagaattcgccgttcagattcgtggcc

SEQ ID NO: 9312 - DNA, 360 bp, Unknown
  gut microbiota DNA sequence
ttgacggagactcgtcagcaaaaatgcgccctggcgcccagagagtgaacgcacacgcgcaaccgtgcaactcgcgaagctgggaagcgacgaacacggcgttccccttctgctcgcgttcgaagcgatcgaatacgctctctttcgcggaatcgcccttcttgtgcagcctgttcaaaacgaagccgagctgcacgatgatgatgaccaacaacagctccgtcacgagatcgcctcctcgcacgttgccgcatgcggactatcatcctcgttcggccaagccagtatgctgtcgatgatatcgatgtcgataaggcgcactgcggtttccttcttcgaccagggcgcaccgccgcccag

SEQ ID NO: 9313 - DNA, 224 bp, Unknown
  gut microbiota DNA sequence
gatgcccgcagcgctttgcatggcgctggcgtatctcacctgcaatgtagcgctcgacttgaccacggccactaacgtgggcttcctggtggcgttgcccgtggtgttcgcgccgctgttgtcgtgcctggtgaaccgccgtcgttatccgctggccttcctgccgttccaggcggcggtcgtggtcgggctctacctcttgtgcagcaacgggggagctcctt

SEQ ID NO: 9314 - DNA, 196 bp, Unknown
  gut microbiota DNA sequence
cgcctcgatgcgcgcgagcgcgtcctgcgcgaacgcgcgggagtcgtccacggaatcgcccagcagcagatcaacggcttcggccagatgcttcttgtacaggcggcggtacgtcttgcgcactccctcggccagaccgtagtcgaagtcgcagatagcctggccgccgtgctggtcgttctggttgctctggatg

SEQ ID NO: 9315 - DNA, 2394 bp, Unknown
  gut microbiota DNA sequence
cgagctcggcgatggcgtcggggatgcaggcgacgacgtcttccgccgtcgcagcgatggtcgaccagcgcgccgcggcggccaacccggcgcgggcgtgcagctcggcgcccagcacggacgcctcgaaggggtcgagcccctgcgccagcagcgcggccgtcatgccggccagcacatctcccgtgcccgccttcgccaacgccggagtgccgtgcgccatgcgcaccgtctgctcgccgtcggagaggtacgtgacgggccctttcaccacggcgatcacgccataggcgagcgacagcgcctcggcgagcgcgcagggatcgtcgacaggcaggtcgaaggggcgtgcgaggcgcgccgcctctccggcgtgcggcgtgaccacggtggggttcccgttgaggaagcgccgcctcagcaagcgtcgcccttttgcggagacgagcgcgtccaggccggtgccgtccaccagcacgggcgcgtcggcgtgcttcagcacgaagtgaacgagcttctcggcttcgacgtcttctgcgtcgaagccgcagccgacgaggtaggcgcgcggtttgccgggcttcgcggccggaaggttcgccttgagagccgcgcgcgggcgcaccacgagcgagggccgaaagccttgcacgagcgggacggccgacggactggtgaacacctcggtgtagccggcgcccatgcgctggccggcgtaggccgccaggcacgctgcgcccggatagcgctcgctgcccacgatggcggccagcgtgccgcgcgagtacttgttcgcgtcgtcggccggcagcggcacgagggccaccagctcgtcgttgctgtattctcgaacgttctgcatggtcgcaccgccttgtcttccgaggaaccgcgtgctcgcattctaccgcgtatcgcgcctgagcgcgactgcgggccgaatcggcgacaacgcgtcgaattcgcccgtaaccgtacgtaaacggttgcgcgaactgggggttcggacgtgccgctgcgctagaatggcggtaaacaaccaaggcgccgcaccggttttcggacgtgttgcgcggcgcggtcgccgcgaccaaggagcaatctcatggatacgaccaacaagcacgactggggcctcgtcatcgcgggcgtcctgctcgtcatctgcagcatgttcttccttttcgcgccgggcttggcgctggtcaccatcacggtgatcgccggcgcggcgtttctggtgtcgggcatcttcgacatcgtcaactacttccgcttccgccgggccatggacctgtcggggtgggcgctggcctacggcgcgctggacatcgtgctgggcatcctgtttttggtgaacccgctggtgtcggccggcgcgctggcgtggttcatcggtgcgttcttcatcgtgttcggcgtgttcgaggtcgtcggcgcgttcaaagtgcgcaacatgggcgcgtcgatgtggggctggatgctgttctcgggcatcgtcggggcgctgtgcggcctgacgttcttcatcgctccggccatgctgggcgtgttcctgtcggtgttcatcctgatgcgcggcgcgtcgctcatcttctacggctggaacgccggcaaagccatggtggcgtagcgcaagcgcgctaccgtggagcgtttgctgaaaccccgaggcgagcgcgcagcgtttcgcggctcgtggtagaattccgaagaaaacaggcgaaggccccgatcgtttcggggccttcttcccgattgcacgaaacggtggcgaatatggcagacgaacagcagactttgctcgacgagcaggcgcttgcggaagcgaccaacgatccggcggcgcgcatcgacgcgcttcggcgcgagatcgagcatcacagctacctgtactacgccaacgacgcgcccgagatatccgacgccgcgttcgactcgctcatgcgcgagctgcgcgagctggaggccgcgcatcccgagctgatcgacccgtccagccccacgcagcgcgtgggcggctacgtgggcgagcagttcgctcccttgcgccatgcccggcgcatgtactcgctggacaacgccatggacctggacgagctggacgcgtggatcgagcgtgtgacggaggcgttcgggcgcatggtgcccgtggtgtgcgagctcaagatcgacggctcgtccatcgcgctcacgtacgaggacggccgcctgatgcgcgccgcaacgcgcggcgacggcaccacgggcgaggacgtcaccgccaacatgcgcacggtgaaggacgtgccgctgcgcctgcgccagggcgcgctgggcggcttgcgcgacgcggacgcgccggtggagctgcgcggcgaggtgtacatgccgaagtccagcttcgacgcgctg

SEQ ID NO: 9316 - DNA, 469 bp, Unknown
  gut microbiota DNA sequence
tgccgcgttcgactcgctcatgcgcgagctgcgcgagctggaggccgcgcatcccgagctgatcgacccatccagccccacgcagcgcgtgggcggctacgtgggcgagcagttcgctcccgtgcgccatgcccggcgcatgtactcgctggacaacgccatggacttggacgagctggacgcgtggatcgagcgcgtgacggaggcgttcgggcgcatggtgcccgtggtgtgcgagctcaagatcgacggctcgtccatcgcgctgacgtacgagggcggccgcctgatgcgcgccgccacgcgcggcgacggcaccacgggcgaggacgtcaccgcaaacatgcgcacggtgaaggacgtgccgctgcgcctgcgcgagggcgcgctgggcggattgcgcgacgcggacgcgccggtggagctgcgcggcgaggtgtacatgccgaagtccagcttcgacgcgctg

SEQ ID NO: 9317 - DNA, 2755 bp, Unknown
  gut microbiota DNA sequence
cgcgccctgaacgcagagggccagtgggagcttttggcgtggctgcgcgaggctggcttccacgtgaaccccgacgtcgagctgtgccagactcgcgaggaggtgcacgcgttctgcgagcgcgccgtggcgcggcgcgaggacctgccctacgagatcgacggcgtggtggtgaaggtgaactcgttcgctcagcaggagtcgatgggctacacggcccgggcgccgcgctgggccgtcgcgttcaagttcccgcccgaggagaagaccacgctgttgcgcgatatcaccgtgcaggtgggacgcaccggcaagctgacgcccgtggccgagctcgatcccgtggtggtcgccggctccaccgtggcgcgcgcgacgctgcacaacgaggacgaggtgcagcgcaaggacgtgcgcgtgggcgacaccgtcatcgtgcgcaaggccggcgatgtgatccccgaggtgctggggccggtgctggcgctgcgccccgccgatgccgtacagtgggagatgccgcgcacgtgcccgtcgtgcggttcgcccgttatccgcgaggagggcgaggtggacttccgctgcatctccatcgactgcccggcccaagcgctggagcgtttgctgcattgggccagccgcggcgccatggacatcgacggcatgggcgaggagatcgtgtcgcgcctggtggagagcggccgtttgagcgacgtggccgactactacacgctggacgaggtggagctgtcgcttctggacatgggccgtgtgaacaaggacggcgagcccatccgcctggggtccaccgtggcgaagaagctggtggcggccatcgacgagagccgcacgcgtccgttcgcccgcgcgctgttcgggctgggcatccgccacgtgggcaagaccatcgccgagctgctggcggcggcgtacccgtccatcgaggcgctgatggaggcctcggaagaggatcttgccgtcatcgacggcgtgggcccgaagatcgcgcgcagcgcgtatttgttcctgcgcacgcccgacaacgccgccgtcatcgagcgcttacgctcgcacggcgtggcgcttgcggacgaggccgcggacgcgggcgagcagctgccgcagacgctggcggggctcacgttcgtgctgacgggctcgctcgtggaaagcgggatgacccgcgacgaggcgggcgctgtgctcaaggcgcgcggcgcgaaggtgagcggcagcgtgtcgaagaagacgagcttcgtcgtggccggcgaggccgccggaagcaagtacgacaaggccgtcgccctcagcgtccccgtgctggacgaagctgccctgctgcgcatcctcgaaaccggcgaggctccggagtaggacgcccgggctccgtcgcgccccgatgtttcacggggagcattgctcggatgctccgcttgatacatgaggctcgacgaggatccgtctccgacggatccgatgtcctgcggatgacccccatgcatccttttgctttcgaaaaggcaaaaagtcatcgaattcggaagaaagaacgtttaccgcaaggtctcggatcgttctggcaggaggaggcgttgttgcgaccaggcattatgaggaaaatcgtttcgcgtcgtgatagcgggctgcgccccgtcttccgaattcgatgctttcttgccatcggctcccttgtcggatgtcggcagaaggaatccgtcgatgtttcacgtgaagcattcgtacgtttggcttgcgttcgcccttcttcgtctgccgttcgcccgggggagttacggaaatgaaattcgtaacattcgaaaggagccccctctggtatagtgtgttacgcaattcgaatacgtaacacctatggcggattcaaggcgccgaggcgttgagggaagggaacggaagcatggcaacactcacgcgacgcgatttcgcgaaactgacgggtgcgacggcggcgacgctgtcgttgggcgggctgctggcaagctgcgcgagcggcgaggccgagaagccggccgaaggcgcgacggaaggtgcggccgacaaggcctcttcgcaggttatcgtctcgatgaccaccggatccgagccggccgccggcttcgacccgatggtgtcgtggggctgcggcgagcacgttcacgagccgctgatccagtccacgctgatcaccaccgatgcggacctcaacttcaagaacgacctcgccacgtcctacgaagcgtccgaagacggcatgacctggacgttcaccgtccgcgacgacgtgaagttcaccgacggcaccccgctcacggcgcgcgacgtggccttcaccatcaacggcatcttgaactcggaagcatccgagtgcgacatgtccatggtgaaagaggccgtggccaccgacgacgccaccgtcgtcgtgcacatggagaagccgttcaacgcgctgctgtacacgctggccgtggtgggcatcgtgcccgagcacgcctacggcgacacgtacggcgacaaccccatcggctcggggcgctacatgctggagcagtgggacaaaggccagcaggtcatcctcaaggcgaaccccgactactacggcgaggcgccgaacatccagcgcgtcgtggtggtgttcatggaagaggacgcctcgcttgcggcggcgaagtccggacaggtcgacgtcgcatacacctcggcgacgttcgcggctcagcagccgagcggctacgacttgctgaactgcgcgtcggtcgac

SEQ ID NO: 9318 - DNA, 5219 bp, Unknown
  gut microbiota DNA sequence
agtgttcatggaagaggacgcctcgcttgcggcggcgaagtccggacaggtcgacgttgcatacacctcggcgacgttcgcggctcagcagccgagcggctacgacttgctgaactgcgcgtcggtcgactctcgcggcatctcgctgccggtgattccggcgggcgctacgaaaaccgacgagaagggcgaagcggcggccggcaacaacgtcacgtgcgacctggccattcgtcaagccatcaactacggcgtcgaccgcgacaagatgatcgacagcgtgctgaacggctacggcaccgtggcctacagcgtgggcgacggcatgccgtggtcctcgcctgatatgaagtgctccaccgatgtcgagaaggcgaagaagctgctcgacgacggcggctggacggccggtgcggacggcatccgcgagaaggacggcacgcgcgctgcgttcaacctgtactactcggccggcgacaccgtgcgccaaggtatcgccgaggagttcaccaaccagatgaaagagctgggcatcgaagtatccatcaagggcgccagctgggacgatctgtacccgcatcagtttaccgatccggtggtgtggggctggggcacgaacgcgcccaccgagatttacaacctgttctactccaagggcacgggcaactacgcctgctacacgagcgaaaccaccgacaagtacctcgacgaggcgctggcccagcctactgtggaagagtcgttcgatctgtggaagaaggctcagtgggacggccagtccggcatcgcgccgcagggggacgcgccgtgggtgtggttcgcgaacatcgaccacttgtactttgcgaaggacaacctcaagatcgcgaagcagaagcctcatccgcacggacacggctggtcgctggtgaataacgtcgaccagtggtcctgggcgtaagtttattgtgctcgacgcgggaggggcgccgcggtgcccagtcgctcaaacagtcctcgcttcgctgcggaactcgcttggtgggcaccgcggcgcccctcccgctgaccgtaacgagcttgcgcgttgggggactgggcgccgtttgcgcttgttggaggggtgttgctgtggggtttttctactagtgagggtatagtggtttcatggctcgatttttggctcggaacatagcgaagtttatcttgctcatgcttgcggtgagtttggttacgtttgtgctggtcagcgtttctcctatcgatccggtgcaggcgaacgtggggcagacggcctatatcaacatgagcgaggcgaagcgggcgcaactggccgaatactggggtgtgaacacgcctttgtgggagcgctacgccaactggttcgtcgaccttctgcacggcgatctggggacatcgctgcgcttcaatgcgccggtgatcgacgtcatcgccacgcgggcggtgaactcgctggcgctcatggccacggcttgggcggtcagcggcgtgctgggcttcgcgttgggcatcctcgcgggcgcgaaccgcggccgtctgatcgaccgcatcgtgaaggggtactgcttcctgttggcttcggtgcccacgttctggctggggctgctgtttctcatcgtgttctcggtgcagctggggtggttcccgttcggcttctcggtgcccatcggggtgtcggcggccgatgtgacctttgccgacgcgctgcatcatctggcgctgccagcgctcacgctgtcggtgatcggcgtggcgaacatcgcgctgcacacgcgcgagaagactatcgacgtgctggaaagcgattacgtgcggttcgcccgtgcgcgcgggttgagcacctggggcgccctgcgccaccacggcctgcgcaacctcgcgctgcccgcgctcacgttgcaattcgcgtccatatccgagatattcggcggatcggtgctggtggagcaggtattctcgtatccgggtctggggcaggcggccgtcacggccggcctcggcggcgacgcggcgctgttggtgggcatcgcgctattctccgccgccttcgtgttcaccggcaacctgatagccagcacgctgtacggcgtggtggatcctcgcatgcgcaagggggctgctcatggctgacgagcgcgttgaaacctgcttaacctgcgagtccgccgtcgggttcggcagttcccagtcgctcggcagtcctggctcgcacgaaacgcccacagggcgtttcggctcgatgggtgcggcgccgcggagcgaagcgcagcaagtccccgaaggggaaactcgcttggtgggaactgccgagcccaacggctccaaggatgccgcgccgccccttctgcatgctcctcgcgcggctcgggtggggaataggaggttgacgctggcggcgtttttgggtgctttggcggcgctggcggctgtggtggtcgcggggctcgtcgtcgcggatgcggctacggcaaccgacttctcgatgaagaacctcgctcccagcttcgcccatcctttcggcaccgactggatggggcgcgacatgctgctgcgcacgctggcggggctgtccaccagcgtgctggtgggtcttctggccgcgggcgtgtcgtccatcatcgcgctggtcatgggcgcggtggcggcgctgggcgggaagaaggccgatgccgcggtcacctggctcatcgacctcatgctgggcatcccccatatcgtgctgctcatcctcatctcgttcgcgttggggaagggcttctggggcgtcaccatcggcgtggccgtgacgcactggcccagcctcgcgcgcgtcgtgcgcgccgagatcctgcagtgcaagcagtcgacgttcgtggctgcggcgcggcggctggggcagactcctctgcgcatcgcggcgaagcacatggttccttacgtgctgccccagttcatcgtggggttgattctgctgttcccgcacgccatcctgcacgaggccgccgtgacgttcctcggcttcggtctgccgcccgagcaacccgccatcggcgtgatcctcagcgagtcgatggcgtacctgtcggccggcatgtggtggctcgccgtgttcccgggtctcgcgctcatcgcgaccgtgctgctgttcgacctggcgggatccagcctgcgcaagctcgtcgacccgcacagcgcgcaggaataggaggccgtcatggacgaagcgaaccgcaagaacccgcttgaaacggacggcaggaacccgctgccggagcatctggccgctcgcgagcgcgcgctgtacgaggccgctgccgagctggagcgcctgaccgaccagctgttcggtgcggaaggcgccggccgcgactgcgcgatagcgtccgaggatccgatcgacggcctcgcgcccgacgtcgtgccgcacgaggctctttcgcacaaagacgcgcaggtgcaccaccatcatacgcacgcgcccgtttcccgccacgagcacggccaccacctgctgcaggtggaggacctcagcgtggggttccgcatgtacgacgaggacgcccccttctttcgcgcgaagcagcgcgaggtcgaggtcatccattctttaagcatctccgtgcatgcaggcgagatcgtggccgtggtaggcgcgtcgggttccggcaagacgcttttggccgatgccgtgttggggctgttcgagccgaacgccacggtgcgcggccgcgtctggttcgacggcgcgcagcaggatgcggcgtcgctttccgcgctgcgcggccacggcatctcgctggtgccgcagagcgtgaacaacctcgacccgctcatgaaggtgggccgtcaggtggagggcttcgcgcgcgcacacgagtcgcgcgccgagcgtcgtcgtcggcgcgcgcaactgttcgagcgctacggactgcccgaggacacggcggggaagtatccgcacgagctgtcgggcggcatggcgcgccgcgttcttttgtgctgcgcgctcatggacgacccgcgcgtcatcgtggccgacgagcccacgcccggcctcgacctggatctggccgtgcgcgcgctcgacgacttccgcgccttcgccgacgcgggcggcggcgtgatgctcatcacgcacgacatcgagctggccctgcgcgtggccgaccgcgtggcggtgttccgcgacggcacggtggtggaggagacggcagttgcgaacttcgcgtctcccgacctgctgcagcacccgttcagccgcgagttgtggcatgcgcttcccgagcacggcttcgaggcgccgggcgggtcgacggaagggggctcccatgcttgaggcgcgcggcataacctatgcgtaccccggcgcgcgcacgccgctgtaccgcgacttcgacttggccgtcggccctgacgagcgcgtcgccctcagcgcgccgtccggtttcggcaagaccacgctgtgccgtatgctggccggatacgatcgtccgcagaaaggcgagatcctcgtggacggcgccccgctgccgaagcgcggcacgtgtcccgtgcagctgatcctgcagcatcccgaaaccgccgtcgacccgcgcatgcgcatgagtcaaacgctggccgaagcaggagaggtgcctcagcgcttgctggacgacctgggcatccagaaacggtggctcgcgcgtttcccgcacgagctgtcgggcggcgagctgcagcgcttctgcatcgcccgcgcgctggcggcgaacccgcgctaccttgtggctgacgaggtgtccaccatgctggacgctgtcactcaggcgcagatctggcgttttctcgtggaggaaacgcaggctcgcggcatcggcctcgtgttcgtgtcccattcgcacgcgctcaccgagcgcatcgccacccgcgtggtggatttggcgatgaggtaggccgcgagcgctctcggaaaaatacgcttccggtatatattcgtgtttgactataatctttgataggaatagtatggacgaagcccgggagcgatgcggccctcgcggggccggccttcgtcgccggttcgggctccatcgaaaagagagcgagggaaggtcattatgaggaaacgtatccgcgtcgtgttggcgtctgtgtgcgcgttcgccctggtgggcgcattcgcgctggcaggctgctcgtcgaataccgagcaacaagccggcgagacgcagaagcccgccgaagagcaggccaagtcggag

SEQ ID NO: 9319 - DNA, 1813 bp, Unknown
  gut microbiota DNA sequence
cgtcactcaggcgcagatctggcgttttctcgtggcggaaacgcaggctcgcggcatcggcctcgtgttcgtgtcccattcgcacgcgctcaccgagcgcatcgccacccgcgtggtggatttggtggctcgctaacgttctgttcggataaaaggttatttctatccgaaaacatacttgccgagatatattcgagtttgactataatcgttgaaaagaatagtatgggtgcagttcggatacgagggggctgtgcgtctcgtcatgggttcgaacgtcgaagatcgagagaacgagggaaggtactcaatgaagaagcacattcgcatcatgctcgcgtccgtgtgcgcgtttgccatggtaggggcgttcgccctgatcggctgctcgtcgaataccgagcaacaagccggcgagacgcagaagcccgccgaagagcaggccaagtcggagagccacgaggccgtggagctgcagctgttcgccgcgaactcgctgtcgaaggccatggacgccgtacaggagctgtacacgcaggatcatacctgggtgacgttcaaggacacgcagtatctgtcttcgggcgagctgaacgagcagcttgccggcggcgcgtacgccgacgtgctgatctccgcctccaagggcaagatggacgatgccgtggagaagggctatgtcgacgaggcgactcgcttcgacatgttcaagaacgacctcgtgatggttgccggcgaggattccgagcttgccgccaagtacgctgatcagagcttcacgctggacgaccttgccaccggcgattacacagtggctgtgggcgatgcctctgtgccggccggcaactacaccaatcaggcgctttccaccgtcggttgcttcatcgacgccgacggcaagaccggcaaggacagcgccggcaccgacggctcctacgatggaacgccgctcgagggcaaggtgaacttgcagagttccgtgggcaacgtgtgcaagcaggcgcagtccggagccgtggacgtggcgttcgtgtacagctccgacgtgtaccgcttcggcggcgtgaaggttatcggcgtcgtcccggacgacacgcacaagaacatcatctacccggctgccatctgcaaggactccacgcaggccgaggctgcaaacgagttcatcgagtgggctaccaccaacgccgatgccaagaagctttggcaggagtggggcttcgagctggtttcctagactaggcgcacatacggtatagtgacaaggaaaggatgggatcgtacacgcccatcctttccgtgcgacaaggacgatcttatggacaacactctaatcgaccgcatcgttggcgtcttctctcgcgctgcgatgccgatcgtctcatgcgctttggcaatggcgatcgctttcatccccggcaccgcccttgctggcgccgatgacgaaggcgatctcgacgcgccgaatgcggcagcgggtggcacatcggcgcaatcggcgcaggaggacacggcgatcgacgatgccgtgaacatcgccgccgatgggaaatcggcttcggtcgaaggcagccccttcgcgctcgaggatttctcgcgttcccaggtgggcagcaacagcgacgtgaacggcgtctatgcaggttaccgctatttcgtctcggacgagtcgggtagtctcgcggttgtcgccaccgacgagctcaccgtggtccacgtgccgtccgagactgcgcaggccgtgggattcgacgccgaatcgtccgagagccgaggtttcctcaagcagttgctcgtggctctcgacgcgcag

SEQ ID NO: 9320 - DNA, 1034 bp, Unknown
  gut microbiota DNA sequence
gccgatgagctcaccgtggtccacgtgccgcccgagactgcgcaggctgtgggattcgacgccgaatcgtccgagagccgaggtttcctcaagcagttgctcgtggctctcgacgcgcagaattcgaagggcggcgcgacgctgtccgccgagggagagtgggcgttcaccggagagcctgagttcgagcgggacggcgtggtctacaagttcgaccaggagctcaagcccggcgagttctacgtctgcgtcgtcggtgcagacggctccgacgtgacgcaagcgtcgtatccctcctatgtgcggctcacccatgccgacttcgccacgctcgcgtctgccgaccaggtgagcgtgatcggggcccccgagggcttcgaggcgttggcgtcgttcttgaagggcatcgactacagtcccttgtgggtgacgctgaagacgacgctcacggctatcgtgttcatcttcgtcctggggcttttggccgcgtacttcagcctgcgcatccccgcgcgggcgcaggatatcgccgattccatcttcaccatccccatggtactgccgcccacggtgtgcggctttctgctgctgctggcgttcggcaagaacaccgcggtggggcagtggttcatcgacatcggcttcccgctgatattcagctggcaggccaccgtgctggcggccgtggtggtggcgttcccgctgatgtaccgcagcgcgcgtggcgcgttcgagaacctcgatccgaacatgctggacgcggcccgcacgttgggctggagcaacgcgaagatattcttcaagctgatgctgccgctgtcgtggtcgtccatcgcggcgggcaccgtgctgtcgttcgcgcgcgccctcggcgagttcggtgcgacgctgtttctggccggcaactacctgggaatcacgcgtaccatccccatcgccatctacttcgagtggatgaacggcaacaccgacgtggccattttctggacggttgtcatcatggcgttcagcttcgtggtcatcctgttcatcaa

SEQ ID NO: 9321 - DNA, 3100 bp, Unknown
  gut microbiota DNA sequence
aagtcgttctcgtcgttcacgttggacgtggcgttcgaggcaggggacgagacgctggggtttttgggcgcatcgggatgcgggaagagccttaccatgcgatgcatcgccggcatcgagacgcctgacgagggacgcatcgtggtgaacgatcgggtgttcttcgattccgagcggaagatcaacctcacgccgcagcagcgcaagacggcgctgctgttccagagctacatgctgttcccgaatctgacggtggccgagaacgtggccgcgggcatcgggcgcgaggcgtcgaaggccgaccgcgacgcgctggtggccgcagagctcaagcgtttcgggctggaagggttcgaccggcgctatccggctcagctgtcgggcggccagcagcagcgcgtggcgctggcccgcatgctggcggcgcgtccgggcatcctcatgctggacgagccgttctcggctctcgacgcgcacttgaagagcgtgctggagcagaacctcgtcagcctgttcgacgcgttccacggcacggtgctgtacgtcagccacgacatcgacgaggcgctgcgcttctgcgaccgcatcgcggtggtggaggcggggcgtatcaccgagacgggcacgggcgacgacctggtgaaccgtccgcagtcgctggcgggcgtgaagctgtcgggctgcaagaacgccacggcggctgttcgcgcgggcgagcgtagcgtgcgtttgccgaagtggggcatcgaggccgcgacgagcgcggcggtgcccgaggacgtgaaggcgctcggcgtgcgcgcgttcttcctgcaacgcgtcgacggccccggcgagaactgctaccgcgtgcgcgtggaccgcgtcagcgactcgcgcttcgagcgcacggtgctgctgggctttctcgaccgcgacgagagcgaggctcccacggtgtcgcgcacggacgacgagatgaagtatctgcaccagcacctgttctggcgcgtcgacaagctggccgtgcccgtcgacgagctgccgcacgagggcgaggagctgtggatccgcattcctcccgacaaggtgtacctggtatcgcgctaaagacggtcccgggcgcagtgcgccctcgcgtgcaggtgcgtccgactcgcttgcccgcctcctgcatgatggggcggggcgtcatcctcgcgcgagagcctcgcctacgagcgagcgcaagaactgcgagcgcgtctcgtctgcgcgttttgcggtttcgtcgagggcggcgacctgggaattcagcagcttgaacgtgacggttgcgagatcctcggccgagacgcgcggccgcccgaccacgatttcgccggcagtgccggggtattcgccgcgctcgcatgcttcggctcattcgtcaagcagctcgtcggtgagcaacgtgcctttcgctgtgcggtatgcgaatccagcacgccgcatccgtgtattcagcgcgcgccgatcctttcgcgatattgcgccatgcggtgatccgaggatgccctatactgtatcctcagacgagaagggagtgcgtcctgtgaaagacagccatggtcgtaccatcgactatttacgcatatcgctcaccgaccgctgcaatttccgctgcatctactgcatgcccgaggaaggcgtgcaatcgctcgcgcacgaggatatcctgcgcatcgaggagatcgaggaggcggtgcgcgtggcggcgggcatgggcatccgcagcatccgcctgacgggcggcgagcctctcgtgcgcctcggcgtggtggatctcgtgcgcgctatcgcgcatacgcccggcatcgagaacgtgtcgatgaccacgaacggcgtgctgttgccgaagatggcggccgacctcaaggaagcgggcttgtcgcgcgtgaacatctcgctcgacacgctcgatcccgcgcagttcaggcagatcacgcgccgcggcgagctgcagcagacgctcgacggcatcgatgcggcgcttgcggccgggttcaaccccgtgaagatcaacgcggtggccgtgcgcagcctcgaccaggactacctcgcgttcgcgaagctgtccatcgatcgcccgctgcacgtgcggttcatcgagtacatgcccgtgggcgagagctccggcagccatggctgcggctggggcaaggacgacgtcgtgcccagcgaggagctgttcgagatcatcaacgagcgcgcccgcgccgcagggatggacgagctggtgccggccggcaacgaccgcccgctcgggtgggggcccgcgcgctacttcgagttcccgaacgcgcagggcacggtgggcttcatcagcccgctgtcgcgtcacttctgcagcgaatgcaaccgcctgcggctgacggccgacggcaagctgcgcccgtgcctgttctcggacgacgagtacgacgtgcgcactgcgttgcgcgccggagacgaccaggcggtgcgcgccgtgttcgccgaggctttgggggcgaagcccgacgagcaccacgacaaagtaggcaccgaacgcggcatgtcgcaaatcggcggctaagaggttccgcttgcctacggcaagcggaacctgccgacgctgcgccgaggagcaagtccccgaaggggggcgaagggacgaggcgtgccgccttcgcgcgatcccaagggctcgcgtaccgaagtacgcttcgcccttgcgatcccccgaattcgacgcacctcgtcccttctcgctggcttactacgccaacctgcgaccttccaacctgcaagataccgaaccaaggagacacccatgaccgagcaacagctgacccatatcgacgagcagggcgacgtgcgcatggtggacgtgtcgcagaaggccgacaccgagcgcgtcgccgtggccgagggcttcatcgccatgcatcccgaaacgctcgcgctcatcgtggagggcaaggcgtcgaagggcgacgtgctggcgtgcgcccgcgtggccggcgtcatggccgccaagcagacgagcacgctcattcccatgtgccacccgctcaacatcacgaaggcgaaggtggagtgcgcgcccgtggccgaaggcgagcgccccgacggcctcgtg

SEQ ID NO: 9322 - DNA, 145 bp, Unknown
  gut microbiota DNA sequence
aacagcccagaccgcccgctaaggtccccaagtttatgctgagtggcaaaggatgtgcgtttgcctagacaatcaggatgttggcttagaagcagccatgcatttaaagagtgcgtaacagctcactggtcaagtggacatgcgc

SEQ ID NO: 9323 - DNA, 213 bp, Unknown
  gut microbiota DNA sequence
agcagcagaagcggcacgatggacaccacgagcatgcccgcgacgtcgcgctcctcggccacgtcgtagccgtccccgcccgcgttcacgtcgaagcggttcgacagcgacgactcgtacgcgtccagcatccctgcgaacgtcgagcgcgcttggctggaatcggggtcggtggagttgaagtagatctccacctgcggcgccggcacgccc

SEQ ID NO: 9324 - DNA, 337 bp, Unknown
  gut microbiota DNA sequence
gccctggtgggtgaggaacgcgagcttatcttcggcgacggcaaataaccgtctgtccgcatccgctcgaacaccgaaacgcccgcgcatctgccgcgggcgtttttcgtgtgtgccgagccgcgtccggcaacgtgttccggctcgactgcaggttcgggtgtccgactgtttcacgtggaacgcgcttgtttccgtgttctgcggagtatccaacgtagacgttttcattggcgggcgcgcgtttcggcattcctcggcaatgtacgtgctatgatacaaaaccacaacgagggacgttctattgcctgataggaggaggaaacggcatagacat

SEQ ID NO: 9325 - DNA, 271 bp, Unknown
  gut microbiota DNA sequence
ttcgtatcgcgcctgcttccccgccgcgcgctcggcggatgtttcacgtgaaacattcgagggctcgtcccgctcacagggcgaaacggaacatgtttcacgtgaaacactcgggtccgacgaggttgctcctccctccgcttctgctgcggagtcttccaaacgttacatgacggcggacaccgcccgcgagcagggtatcgtcccggcgctcgccgtggaggaggctgtgcgcgacgccgactatatcatcgagttcgatgccgacacg

SEQ ID NO: 9326 - DNA, 210 bp, Unknown
  gut microbiota DNA sequence
tccgatcagcgcgccgaagcggtttttcatccaagcggtggacaccccgttgtcggtttgaaatacgatctcgaacacgtcgcctataggattatcggctccgagcaggattgcagcatctttctttgaaagggtattgaatcgtgcgtacgtaccgaagtaacgctcagcctgcatgttctctccttcgagccgttctttttgtcaacg

SEQ ID NO: 9327 - DNA, 286 bp, Unknown
  gut microbiota DNA sequence
ggatgtcagcttccagcgcacgcgcgacgagctggtggatatcctcgagcgcaacggcggccacgccgaagccgcatggggcaagggcaagctcatcgccgagatcttcgaggcggtggccgaggagaagctcatccagcccaccttcgtcaccgagcatcccatcgaggtgtcgccgcttgccaagaagctggcgggcgatccgaacctgaccgagcgcttcgagctgttcatctgcggccacgagtacgccaacgccttcggcgagctgaacgatccggtcgac

SEQ ID NO: 9328 - DNA, 245 bp, Unknown
  gut microbiota DNA sequence
cagtgccgcgcccaccatgagcgtcggcgcgctgaacatgccgcccgcgcggatgaatgcgatgctggtccagcttttgcgctcggattcgtcgatgcgcagaccgtcggcttccgccgcggcggtggtgtcgcgtgccgtgggcaccggtgcctcctcgttcgtcgttttttaggtggtatcggctcgaaagtgtagcacagccgcgcgccaagctgggacaatcacgatttggacgcaaaacg

SEQ ID NO: 9329 - DNA, 685 bp, Unknown
  gut microbiota DNA sequence
actcttgcgctcggattcgtcgatgcgcaggccgtcggcttccgccgcggcagtggtgttgcgtgccgtgggcaccggtgcctcctcgtccgtcgtttttcaggtggtatcggctcgaaagtgtagcacagccgcgcgccaagctgggacaatcacgatttggacgcaaaacggcacccatgacaatcttggagcgcttccgatgcatcgcagcatgtaaccagatcgcataagcccaggtggcgaagatcgagcatgccctttcccgcccgactaagctgctgaaattgtcatgggtgccgttttgcgtccaccgcaatccgattccgacccgtcgccgcagcgtggcaggagatttccgcaactgcaagggagtagaatgggagccgcccggcgaaagaaaaggagcccgcatggacgtcgacctgcactaccgtgagcaaggaaccggcgagccgctcatcctgctgcacggcaacggcgaggacggctcgtacttcgagcgacagatggacgcgttcgcgtcgcgcttccgcgtgatcgcgctcgacacgcgcgggcacggtcgctcgccgcgcggggaggcgcccttcaccatccgccagttcgccgacgacctgctggcgttcatggacgggcaaggcatcgagcgcgcgcatctgctgggattctcggacggagggaa

SEQ ID NO: 9330 - DNA, 112 bp, Unknown
  gut microbiota DNA sequence
tttcgagcatcagatggacgcgttcgcgtcgcgtttccgggtgatcgcgctcgacacgcgcgggcacggtcgctcgccgcgcggggaggcgcccttcaccatccgccagttc

SEQ ID NO: 9331 - DNA, 154 bp, Unknown
  gut microbiota DNA sequence
catcgcgctggtgttcgcgctcgcgcaccccgagcgcgtgggaaagctcgtgctgaatggggcgaacctggacggcagcggagtgaagccgtcggtgcagctgcccatcgtggcgggctacggggcggcgtcgctcttcgcgcgctggagcgtc

SEQ ID NO: 9332 - DNA, 959 bp, Unknown
  gut microbiota DNA sequence
tatcgcgctcgcgttcgctctcgcacatcccgagcgcgtgggcaagctcgtgttgaacggggcgaacctggacggcggcggcgtgaagccgtcggtgcagctgcccatcgtggcgggctacggggcggcgtcgctcttcgcgcgctggagcgtccgcgcgcaccgcaaagccgaaatgctgagcctcatggtgaacgacccgaacatcgccccggaggagctagccgagctgagggtgccgacgctggtggtggccggagcgagggacatgatcaagaaggagcacaccaggttgatcgcgagcagcattccaggcgcgaggctggccttcgtggagggggatcatttcgtggctgcggggaaccccgaggagttcaacaaggtcgtgaggaggtttttggaaagctgatagacctagtcatgatgatcatgcaatacgcatgtaaattgcataatgcaagcgaaaaatcaggtagtcgcgagagtcggaagaccggatctaatcccgtctgaacaagtcgcgcgtgtacatcttgccggcaatgtcggacagctcgtcgctccaacggttggccacgacgagatcgcagcgctccttgaacgaagtcaggtcgcgaacgacctcgctgccgaagaagtcgggggcgtcgagcgtcggctcgtacacgaccacgcacacgcccttcactttcacgcgcttcatgatcccctgcacggaagaggcgcggaagttgtccgagccggtcttcgtggtgagacggtagacccccgcgaccgggctcttgacgcccgccactctcgccagcacctcgtcggccacgaagtccttgcgcgtgcggttcgcgtccacgacggcccccattatgttctgggacacgtccgcgtagttcgccagcagctgctataaaagacgtaaattcgattctttaaaaccttgctcgcttcttctagatgctctt

SEQ ID NO: 9333 - DNA, 436 bp, Unknown
  gut microbiota DNA sequence
actggtggtagccggcacgagggacatgatcaaagaggagcataccaggttgatcgcgaggaacattccaggcgcaaggctggccttcgtggagggggatcacttcgtggctgcggggaaccccgaggagttcaacaaggtcgtgaggaggtttttggaaagctgataaacctagccaggatgcttatgcaatacgcatgtaaattgcataatgcaagcgaaaaatcaggtagtcgcgagtgtcggaagaccggatctaatcccgtctgaacaagtcgcgcgtgtacaccttgccggcaatgtcggacagctcgtcgcttcaacggttggccacgacgagatcgcagcgctccttgaacgaagccaggtcgcgaacgacctcgctgccgaagaagtcgggggcgtcgagcgtcggctcgtacacgaccacgcacac

SEQ ID NO: 9334 - DNA, 555 bp, Unknown
  gut microbiota DNA sequence
cacgccgcttaggtacccgctgccgttgccgttatcgtaagatctgatgttcgcgaaaccaaccccgggggcgatggagtagtacacccgcaccggcacggtggcggcggtgctcaggtattcgctcccctgggaaaacccggcggtcgtggtttgggacaccgcccacgacacgtcggacgatgaggcgccgaactcgccttcgaacgcggcgcgtgccgtgaccgacggggtatccgcggtgcgcgagccggtctcctgggcgctgccgctcagataggcagccttcaacggattctcaaccgaagccggttcaggaaccgccagcttgttgaagtacgcctggacttcggatgccttcggagccgtgcgcacgtacaccgttgcattgccgtcctcgtcggccaagccgtggttcttatggttctcggcctcggcgtagaacttctgcacatcgaggcgcagggatatgacgttgttcgtatcggtatcggttccggcaagggtacccgaagcatcgcccgtttcattcgttccgtaccaggtgaagcagtc

SEQ ID NO: 9335 - DNA, 418 bp, Unknown
  gut microbiota DNA sequence
tcgctgcttggaccgagcgcattcagacgtttgagcgcgagcacgcgcaggcgtggctccctgcgttcatgcagcgcacgcaggagcttgcggccgagaagccctattgcgcgttcgcggcactggcgttgacggttatggaggtgcgctcatgacgctcatcttggtactcgcgggcgctgtggcattcgcgttcgcatgcaagcggcccatcaagtcgtgtccgatggcgttctacgccctggctgccacgcttgacgtgctgttcgtggtcggctcgttcgcgggactgcctccgatgctgtacgacgcgctgttcctgctgttgcacaagtgcacgctggccaccgcgctgttcgccgtcgtgatgtacatcggggtgttcgcgcgcgactcgcgcgtggcgacgtacctgcgt

SEQ ID NO: 9336 - DNA, 3417 bp, Unknown
  gut microbiota DNA sequence
tcggtttcgggcgtggccggtgcgtgcagggtcaccacatccgaaacggccagcagctcgtcgaggctcacttgacgcacgccatcgccttccagttggggttttgccgatcgattctcgaacaccacgggcatgccgaaagcacgcgcgatgcggcatactgcctgcccgatgcttcccatgccgacgatgcccatcgtcttgcctgccagctccacgagcggcgtgttccagaacgagaagtccttggcgcgcgtccagtcgccttccatgaccagattggaatgctctcctacatgcaagcacagctccagcagcaacgcgaacgtcatctgcgccacgtcgggcgtggagtaggcgggcacgttcgatacgatcacgcccgcatcgcgcgccgcgtcgagatccaccacgttgtagccggtggaggtgagcgcgatcatcttgaggcgaggagcccagccgagcgcctcggcgttccattccgtcttgctcgacacgacgatgtctgcttcggctacccgagttttcagctggtcgcgcgacgtgcggtcgtacacggtgacggtgccgaaccggtcgagcgcgtcccagcttaagtcgccggggttgttcacctgtccttcgaggaccacgatgttcataggcgttccttcccgagaaaaggatcggcccggggagaggggagctccaccgggccacaaggaggggatgatgcggcacctattgggtgccgctctgctttaaggggtaagcagatgcaaactgaaaaggaggggagcctttcgtttgctgaagctattataaaagttgacattgaatatcatatgatgcacgagtgcatgttttgtgaattggaggcctcgaaagtaacagataggtaaacatgacgcaaaaccctagggaaaaaccctgacgcggaagctcgagctgattgtccaacggagcgccgggggtttgacggtgaaaacgacgtcgggcggtaggaatcgaccggtttggcaattctggcgagggcccggctgcggcgcttcgggcttgccgaacgcgatcgaaggcgtttccccagctcgggttctcgaaacgtcaagtgaatcactcggcgggattaccaaaccggtcgattgctgccaagaagcgggggtcttgccgtcgaaccgaggacatcgcgggcctgtcgggtccgtggtcggggatcgtccgaagccgtgcggttccacgtggagctgcagccgggatcccgccccaaaccgtggagtccctcttagtgtttcatgtgaaacgtttgtacgcgcatgcttgttcggccgccggggttcgccccatgctccgcctgccatctgcgctcgttcgcgcctatggcgcgggctcgcgctggcattccgtttggttcgcgcagtctgcctcaagcgtttcacatgaaatgcttgtgcgcgtcgggcgaggccgtgggaatgccgttcgctgacaagcttgctgtagcgcggccctcggcggtggtttcgcggctcgcgggttctgcgggccgaggccgggttggccgcaaaatggctcccatgacaaaatcggcggcccgattgggcgtcggcggcggtaggcggttttcgccacctgcgattatgctggttggcgaggccgcgcggcgcgctggagccgctttgagattgtcatgggagtcgattcgcgtccaagccgcccttccgacggctcggcaatgccccgccgcacggcttcgccatacgatgtgctgcaaaaacgtcggtttggcagtcttcggcggccttcgatcgcgcccgacgctccttcccgaggatcggcgaggcgtaatcccagttcgcgttttgtcgccgcctcggaacgcaccgccagatcgggccgggactgccaaaccggcgtttttgcagcacataggttggcgttcgctgttaaaccgggattgacatagcacaggtcgacccgctccgcgaaaactcgccggcggctcggaagcccccttcggccatcggccggacgctcgtctcgcctgatcgctagctgtccgacagaggaagcggcatgtggcggtgcatgtcaatcctggtttagcagcgtaggttggcgaaatcgcgcgtttgcagcgagggacgtgactgggtgacggctcaggcggaggttctgccgctctgccgctctgccgttcggccgctgcgtgggcgcgggctccatgcattgtctcggcgggttcgacgaagcgaggggcatgaaaacggatcggcccggggagaggggagctccaccgggccacaaggagggggatgatgcgacgcttgcgcatcgctctgcttctaagggggtaaagcagaggcaaactgaaaggaggggagcctttcgtttacagctgctagtatacgggtcgttcgcgcacatcgtatgatgcgggcgtgcgcgttttgtgaaacgatgggtcgcagagtaacggttcgttaacaaggatcaaaatagtcaggaaaagaagttttccgatgggcgccgcgccgcagaaatctggcgagtgaaaggttggcgaacgacattgcctcaaagcggcatcgacctgaagtaacatgttctacgatgatatgcgttggtcgatgatgcggaagcgggcgtgtgcgggtacgagaaacagatcggcccggggagaggggagctccaccgggccacaaggagggggatgtgcggcaccgaggtgccgccactgctttgtaaggggaaaagcagtacaaactgaaaggaggggattctttcgtttgcgagaccaagtataaaagtaagccttgaagaacacgtgatcgactcatgttcgtcctgtgaaatgccgcgaagcgtcggcgagcgtccatcctccttccttccgccgctcgaactgcgccgttcgcgcgagatgcttccgtctcggcgtgcgcgagcgcatcggcgcatttcgacggtcgcatgtcggggctcttttcggtatcatggatcacctgacgaaaggaactccccatgcccgatatcgcgcttcgttttcacaaggacatgctcgtgctgtcctcgccggttgccgttgtactggcccggcaagggttcgacgtggaacacgatctcgaattcgccaaccttgtggagccggaggcggtgcgcgatgcgctgcgcctcaacaagatggcaggcgcccagtgcctcgtggcgaacacggaaggcatcgcgcctgctcgtctggcgcatcgcggcatggaggaccgcgcggcggagatcgtgcgcacgggcttgtccctggcgcgcgagctgaagtcccagcacgtgctggtggagatcggcccgtgcggcctccccctcgatgccgctagcaaaagctcgctcaacgagaaccgcgaccagtacgcccgtgccgcccgcgcctgcgatggccaggagttc

SEQ ID NO: 9337 - DNA, 4149 bp, Unknown
  gut microbiota DNA sequence
ccccagcacgtgctggtggagatcggcccgtgcggcctccccctcgatgccgccagcaaaagctcgctcaacgagaaccgcgaccagtacgcccgtgccgcccgcgcctgcgatggccaggagttcgacgcgttcttcctcaacgggttcgccaacccggccgacctcaagtgcgcgctcatgggcgtgcgccaggtgagcggcgcgccggtgttcgcgtcggtggacgtggatgccgacggcatgctggccgacggtcgccatacgctcgaggatgcgctcgccgtcatggtggactacgaggccagcgtggtcggcttcgccacggcggctccgctcgatgcggccgtgacgttcgctcgccgcgccagcggggcggggcggctgccggtgctggctcagctgatcgtgcgcgagcataatccgaagcaaggcgacgctacgcacgagaacccgtattactgccccgatgtgctggtaggggcggccgtgcagctgcgtgcggccggagcccagttcctgcgtgcggccggtgccgccacgccggcctatgcaggcgcgctcgcggcggccagcgaagggttcgacgttgtgcgctcggatgtggaggagtagcatggcaggctctaacacggtgcgcagcccgcattacggagcgctgcaggatgtggtggattcgctgtacctcgggctggggccgaaggagaagctccgccgcctcgacatcgtcgtggccgccgaggccgccgatcttcccgacgacctggccgagatcgtcaacctgctgccgcccggcagctacacgcgccagcgcctatgcgaccagctgaactcggctatcggcgggcatgcgtgggggcaggtgtacggcaccgtccaatagcgcgtggggcgaggctgcagcgaccggcaggggcatcggtgcgagcccgtcgttcgcggtgctcttctggcgaagctgctccccgcgtgcgcgcgtcgcctcggacgagctttcaacgttcgcctgcatgcccgtggatatactgtgaatcgcccgccgtatcccgtgtgggcgttgaatctccatggttttacctcttgcatggtgggcgccgcgcgagtactatatgttcactttcctaacatcacctactactacatattgtggaaaacatggcgtagatcgtgtggaaacactgcgcataaaccaagcgaagccacagctcgcagcaggaaaacgacgaagcaagaagaagctcgaagagaggattggcagcatggtcgagaccatcatgaagcgcgacggccggacggtggaattcaagcaggagaagatcgccgaggcggtggagcgcgctttccaggcatgcggggccatgcaggatcgtgcggcggccgaggatatcgcgcagcgcgtggtggacaagctggagagcggcgccatcgagggcgcgcccacggttgagggcgtgcaggacctcgtggaggagacgctcatcgagtccggcttcgtgcagacggccaagtcctacatcctgtaccgcgccgagcgcagccgctcgcgcgacgtgaacagccgcctcatccaaacgctcaaggacatcacgttctcgaaggcgtcggactctgacatgaagcgcgagaacgccaacatcgacgccgacaccgccatgggcaccatgctcaagtacggctcggagtcggccaagcagttctatgagatgtgcgtcatcgacccgaagttcgcgcgagcgcatcgtgagggcgacatccacatccacgacatggacttctatacgctcactaccacatgctgccagatcgagctgaagaagctgttcaagggcggcttctccacgggtcacggcgtgctgcgcgagcccaacgacatcgccagctacgcggcgctggcctgcatcgccatccagagcaaccagaacgaccagcacggcggccaggctatctgcgacttcgactacggtctggccgagggcgtgcgcaagacgtaccgccgcctgtacaagaagcatctggccgaagccgtcgatctgctgctgggcgattccgtggacgactcccgcgcgttcgcgcaggacgcgctcgcgcgcatcgaggcggagacgggcgtgtgggccagcctcgccatggacgagggcttcgaggccgccgtgcgcgcggcgctcgtggaggtcggcgccagcgaggaggccgccgacaaggccgtggcctatgcggctaagaacgccctgggcgataccgaccgcacgacgttccaggccatggaggcgctcgtgcacaacctgaacaccatgcacagccgcgccggcgcgcagacgccgttcagctcggtgaactacggcatggacacctcgcccgagggtcgcatggtggtgaagaacatgctgctggccaccgaggaaggcctcggctccggcgagacgcccatcttccccgtgcagatcttccgcgtgaaggagggcgtgaactacaaccccgaggatccgaactacgacctgttcaagctggccatgcattgctccgcgaagcgcctgttcccgaacttcagcttcatcgacgcgccgttcaacgcgcagtactacaagggcacgcccgagacggagatcgcctacatgggctgccgtacgcgcgtcatgggcaacgtgtacgatcccgatcgcgagatcgctcccggccgcggcaacctcagcttcacgtccatcaacctgccgcgcctggccatccgctcgaagggcgacctcgatctgttcttcgacctcttggacgcgaagcttgcgctggcggtggggcagcttgacgagcgcttcgagatccaggcgcgcaagcacgtgtacaacgcgccgttcctcatgggccagggcgtgtggatcgattccgagaagctggcgcctaccgacgagcagcgcgaggtgctgaagcacggcacgttgtcgctgggctttatcggcttggccgagacgctggtggcgctgacgggcaagcaccacggcgagtcgaaggcttcgcagaacctgggcctcgagatcatcggccatatgcgcagctacctcgaccgcctgtcgcaggagcgcgggctgaactacggcctcatcgccacgccggccgaaggcctgtccggccgcttcgtgcgtatggaccgtgagcgctacgggtccatccccggcatcaccgatcgcgactactacacgaacggcttccacgtgccggtgtactacgacatcagcgccttcgacaagatcgagatcgaggcgccgtaccatgcgctgacgaatgcgggccatatctcctacgtggagctggacggcgaccccagcgagaacctcgaggcgttcgaggccgtcatccggcacatgaaggagagcggcatcggctacggttcagtgaaccatccggtggatcgcgatcccgtgtgcggttacaacggcatcatcggagacgtgtgccccaagtgcggccgcaccgaggcggagcacggccagtcgttcgagcgcatccgccgcatcaccggttacctcgtgggcaccctcgaccgcttcaacgatgccaagcgcgccgaagaaggcgaccgcgtgaagcatcagatgtaacaggttgaacgtgacctctcccgacactatacgtctttacggcacggctccggattccatcgtcgatgggccggggctgcgctatgccgtgttcgtgcagggctgctcgcacggctgtcccgggtgccacaaccccgacagccagccctgcgcgggcggcacggtgcgcgccatcgccgacgtggtggcggagatcgctgccaacaagctggtgcagggcgtcaccatttcgggcggcgagccgttcgagcaggccgccgcgtgcgccgcattggcgcgccaagtgcgcgagctgggactggacgtgtggacgtactcgggctaccgctacgagcagctggcggagggcatccccgatccggccgcgcgcgatctgctcgaccagaccgacgtgctggtggacggccccttcgtccaggcgcagcattcctaccagcttccgtggcgcggctcccgcaaccaacggttgattgacgttcccgccacccgagcccgcggtcgcatcgttttgtgggaaactcacgaagacttccctgtaaagcccccatcgtggtgaggcgcc

SEQ ID NO: 9338 - DNA, 822 bp, Unknown
  gut microbiota DNA sequence
acattcctaccagcttccgtggcgcggctcccgcaaccaacggttgattgacgttcccgccacccgggcccgcggtcgcatcgttttgtgggaaactcacgaagacttccctgtaaagcccccatcgtggtgaggcgccgtctcctttccttggcgacggtatggtcgacatggtaggataacggcatggaacagcttcaaaactacatcgacgctatcgtgcgcaccgactgggtgaccacggccatctcggcggtggtcattctggcgatcacggcagtcgtcgcgcgtctgacgaggcgcttcctgggccgcgtgcttgccatcaacgaagagcgcgatctgccctcaagctccatcttcatcaacatcgcccgcggagccgtgtggatcaccggcgtgtgcatcatgctgtccacctgcttccgcgtggacgtgagcgccgccatcaccgcgctcggcatcggcggcatcgccatctcgctgggcttccaggacacgctgtcgaacctcatcggaggtttgcaggtcagcctgctgcgcatcatcaaacccggcgacaacatcgaggtgggctcgtccacaggcgtggtgaaagacatcacctggcgccacaccaccatacgcaacggcgcgggcgaggaagtgctcatccctaactccatcatcagcaaaaccgctctcacgcaccttccgcccacgaaccaagtaagcttggccatcgtggtcaccacggaaggccagcatcttgacgaagtggccgaggctatcgagcgcaaggccggcgaggcggcggccggcatcggcaaggtggttaaacag

SEQ ID NO: 9339 - DNA, 527 bp, Unknown
  gut microbiota DNA sequence
gagcttggccatcgtggtcaccacggaaggccagcatctcgacgaagtggccgaggctatcgagcgcaaggccggcgaggcggcggccggcatcggcaaggtggttaaacagccgaagctcacgttctcggagatcaccgcgcagggctatgcgggttccatctcgttcagcatggccgacagccgtaccacgggccgtgcaatcgatgcggtgctgcgcgccgtggcgccgctgacccgaacggcggcgcccgatcgcgcggagcaggtgctggaggaggcgcagcaggaagccgaagaggccgctgcgcaggaagccgccggccatgcgccgactaagccgaagcctaaaccgaagccgactcccaagcagaagcagaggccgagcttccgcaagcgcatggcgcgggcgctgcggcttgggaaagaggagcaatcgtgagcgaggaggcgatgaaaaccatgtccgaaacgcgtttgaccgaaggcccgctgcaccacctcgacggcaagctcgccgaatgcgg

SEQ ID NO: 9340 - DNA, 4042 bp, Unknown
  gut microbiota DNA sequence
atttcgaaacggattgccgtatcgtagcccccatcaaacagaacgccgccaatgcggctaaagggaaaggctcgataccatggccgaccgaatcgacaccacaaggctcacgaacgaggtgggcaaccccgtcgccgacaacaaccatacgctgaccgcgggcgagcgcggccccatgatgctccaggacaactggatgatcgagaagctggcgcacttcgaccgcgaggtcatccccgagcgacgcatgcacgcgaagggctccggcgcgtacggcaccttcaaggtgaccggcgatatcagcaagtacacgaaggcgaaggtgttacagccgggcgccgagaccgaggtgttcgtccgcttctccaccgtggcgggcgagcgcggcgcggccgacgccgagcgagacatccgcggcttcgccatgaagttctacacgcccgacggcaactgggatctcgtgggcaacaacacgcccgtgttcttcctgcgcgatcccaagaagttcatcgacctcaaccacgtggtgaagcgcgatccgcacaccaacatgcactcggcgcagagcaactgggacttctggtccagcttgcccgaggcgctgcaccaggtgaccatcgtcatgtccgaccgcggcatcccggccagctaccggcacatgcacggcttcggcagccacacgttcagcctgatcaacgaggacaacgagcgcgtgtgggtgaagttccacctcaagaccaaccagggcatcaagaacctcaccgacgccgaggccggccagatcatcgcgggcgaccgcgagagccaccagcgcgacctgttcaacgccatcgagcgcggcgagttccccagctggctcttctgcgtccagatcatggacgaggccacggcgaagaactacaaggagaacccgttcgacatcacgaagacgtggagccagaaggagttcccgctgatcgaggtgggcacgctggagctgaaccgcaaccccgagaactacttcgccgaggtggagcaggccgcgttcgcgccgacgcacctcgtgccgggcatcgggctgtcgcccgacaagctgctgcagggccgcctgttcgcgtacggcgacgcgcagcgctaccgcctgggcgtgaaccacaatcacatcccggtgaaccggccgcgctgcccctatgccgagttccatcgcgacggtatgatgcgcaccgacggcaacttcggcggcaccatcggctacgagccgaacagctacgggcagtggcagcagcaggccgacgcggccgagccgccgctggacctgttcggaccgatggacgcgtgggatcccgccgacgaccccaccgacgacacgttctaccagccgggcgacctgtatcgtctgatgggcgaggatcagcgcgctgccctcatcgacaacacggcgcgcaacatggacggcgtgaccgagaacatccgcctgcgccatgcggcgcactgctacaaggccgatcccgagtacggcgatcgtttggccgcagcgctggtcgtggacgttgagcgcgtgcacgaactggccgcgatgactcacgaagagcgcatggccgccaccggccagcaggttcccgcccgcaagatcggcggcgaggtgcgcgcctagcgctacgcgcctgaaaggcgcccgccatgtttcgggcgccacctaaccaagctattccgttgacggtcgcttctgctcctccctcttgcagaagcgacccgttttgttttccggcttattggagaagttattaggcgcaaaagctcaaaaatagctttaagtaaacattaatgatttgataaaagctattaattgcttttatatgctattcttcaaggaaaaacaaagcgaatcaaaacggaggcgtccaatggatatcccttcaaaagaaagcctcacggttgaattcaaaagcgacacaacgggaaacgcctcgaaacacggggttgatgaaagtttgcttgttgaagcagtggttgcgatgttcaattccgaaggaggggtcctgtatctcggagtcgaagatgacggaactcctaccggactgaaccgaaagcatgccgacccagtcggtctggcggctttgcttgccaacaaaacgatgcctcccatcagggtcgagtctgagctcaatacgatgtctggcgtcgaagtcctcaggatcgtcgttccgaagggcactgtcgtgggcgctacctcggatgggcgtattttgaaaagggtcgtgagggttgatggttctcccgagaacattccaatgtacccttttgaaatagcaacgcgacttggcaaccttggcaagctcgatttttcaaacgaagcagtttcagatgcaagcgtggaggatttcgatcctgtagaagtaagccgtcttcgccggctcatcggaagcctgcccgattccgacagaacgctgttggatttggacgatgcagaactgttcaaggctcttggcctcgttcgatccttcggagaccgcatgtatcccaccgttgcaggccttcttatggtgggcaaggaggacgccctttctcgtcatgtgccgacggcaaaaagcagctttcaagttttggaggacaccgaagtgaggttgaacgtcgagacggcgcttcctctcctcgccgttttcgagaaattcgaacagtacttctctgcgcagaatgcttcacgggaggtcgaccgaggtcttttccgcttgtctatctctgattacgatgcacgtgcatttcgcgaggctctggtgaacgcctttgcccaccgcgattatactattctgcggccgacccgcgtgcttatggactccgaggggatgaccatttcgaatcctggaggttttgtcgaaggcatcacgtacgagaaccttcttacggtgccccctcatggacgaaatcccctgctggccgaagcgctaaagcgcgttgggctcgcggaaaaaacgggccgcggtgtggatcgtatatacgaaggttccctgcggtttggccggccgcttcccgattattctgcttctaccgtgaatgacgtcgtcctcttcacgcctcgtgctcctttcgatgcggcgttcacaacgatgatatttgacgaggagcgtcaatcggggcgtccgttcacggtgtttgccttgatggtgctctcggtcattcgcgatgagcgcaaggtgaatttcggggctttgcgagaagcgacccatatcgatcaggggcgattgcaccgagtgcttggagagcttgtggagcgagggttgatcgagtcgcacggtacagggcgagctaccacctatcttctctcggcgcgcgtttacagagaaacgggtcatgcgctcgggtacgtgaggcaaaaaggaatcgatgatgttcgccatccggaactggtcatggagttggctcgcgttcagggctctctgatgcgctccgatgtggcggagttacttcgcgtctcgccctcgaaagctggatcgatcatcaaagaaatgactgcgtcgggaaagctgcgacttgaggggcatgggcgaggagcgcgctattaccctgccgaccctgatggggaacgtcgagaatctgcaatctaaacgaatggaagccatcctgcatcagctgcgtcacaaacgccgttccttgcattgcgctccacgcactcggtatacgctcgtcctttcaagcgaaaggagcgtctcatgcgcgagatatccggtttggcaaaattcggctacttctgcgtcggcctcttcggcggcctgttcggcgtgttggccgcatggttcatgggcaaggatggttggggttggagcgagggcggcaagctgtttgcctggttcggctgcctgttctggctcatcgtgtgggttgtcatggtcgtgacgggaggcatcgcggcgtttctgggcatgctgttttaacgcgttcccgacaattcggccgcttcgatcgtgttaccctttgacggatcaaatagccgaatggagggaacgccatggatggacgggcgaagcggggcgaaagccttgcaggaaagacgatcgcgttggctgca

SEQ ID NO: 9341 - DNA, 280 bp, Unknown
  gut microbiota DNA sequence
tcgcttcgatcgtgttaccctttgacggatcaaatagccgaacggagggaacgccatggatggacgggcgaagcggggcgaaagccttgcaggaaagacgatcgcgttggctgcagtgctggtgacgctgctggcagccggcacattgttgagcgcatgcgcgcaacaacgtgcgacgagccagttcgccgtggcgcagcctgctattcctcagaaggcgtctgagaacaatcccgaagcatggctggacgcgctcgagcagaacccgatcgatcaatcc

SEQ ID NO: 9342 - DNA, 237 bp, Unknown
  gut microbiota DNA sequence
gtgccaaggcgaaccgcatgtattctccgctcagtttgtactacgccctggcgcttgcgaacgaaggcgctgctggtcagacacgcgacgagatcgcctcggtgttgggtgcgcccagcaccgtcgacgtgccccagcagtgcggcaacctgttccgcgtgctggcaaccgatcctttctccacggtcgatctggcgaattccatatggatggcgaaggacgcctccttcgagcaat

SEQ ID NO: 9343 - DNA, 1569 bp, Unknown
  gut microbiota DNA sequence
gttgttgagcgcatgcgcgcaacaacgtacgacgagccagttcgccgtggcgcagcctgctatccctcagaaggcgtctgagaacaatcccgaagcatggctggacgcgctcgagcagaacccgatcgatcaatccttcgtagactcgcttgcagcgttcgcctaccgcagcaccgcttcggtgttgggcgacggcgcggacgatgccaaggcgaaccgcatgtattctccgctcagtttgtactacgccctggcgcttgcgaacgaaggcgctgcgggtcagacgcgcgacgagatcgcctcggtgctgggtgcgcccagcaccgtcgacgtgccccagcagtgcggcaacctgttccgcgtgctgacaaccgatcctttctccacggtcgatctggcgaattccatatggatggcgaaggacgcctccttcgagcaatcgttcatcgacacggcgatcggccagttctacgccacgccgttttcggtggagttcggcactgacgctgccgaccaggccatggccgcatggatttccgagaatacgggcggcaccatcgacccccaggtgaaaaccgagagcgaccttctgctgtccatcatcaacgcggtgtacttcaaaggcggttggatggatacgttcgatgcggcgaacaccgcgcccgccgtgtttcacgccgcatcgggcgacgtcgaaacccagttcatgacgcagcgtatcgactcgctgcaaggctttcgccagaccgacgacttcctgcgcgcacgtctggcgttcacgggcggcacgatgatgacgttcgtgctgccggccgaaggcgtgtcggtggacgacctgcttgccgatgagcagcgcttggcccaggcttttgccgttgacgcgaacgaggacgagtacggcttcataacctacgtggtgcccaaggtcgccttcgataccgaacttgatctgattccggctctcgagcgcttgggtatgaagacgccgtttagcgacaaggcggatttctcgaaccttacggccaccccggccttcatctcgatggtgaagcaggaaagccatatctcctgggatgaggagggcgccgaagccagtgcgtacacggatatgggaatcagcgccacatcggcgatgatccccgaaggcgaggaagtggagctgcgcctcgaccgcccgttcctgttccagatcacgtcgtcgcagggcatcccgctgttcatgggcgtatgcggcaacccagctgcgtagcctgacaggttgccgtgcagtcgtccatcggctgcacggcgcctggcagagcgcccgtcccgtcccgtcccgtcccgtcccgtcccgtcccggtgggatccttcgatgccgatgtttcacgtgaaacactcgttcggtttactattcgaaacatgctttgcccgcaacgccgcctcagcggcgcactgcgtgcggcgcttcttgcgagccggctcgtgtgcagtgacccgttaagcgcccttgcggaagcggcgggggaaagcgcgttctttgcttgatagctgctttcggtagtctgtcggtggagacggcctcgctga

SEQ ID NO: 9344 - DNA, 21054 bp, Unknown
  gut microbiota DNA sequence
actcagcggcgcactgcgtgcgcttcttgcgagccggctcgtgtgcagtgacccgttaagcgcccttgcggatgcggcgggggaaagcgcgttctttgcttgatagctgctttcggtagtctgtcggtggagacggcctcgctgattcttcaagcgcggtcgaaagaagaaccccggtcgtcccagcaaggggacgacccgggtccaaaatagaatccgaaccgccgaagcgggttcgagagccgtggggagtaaccagctccctgcggctcgcctgctattgtaggcagtacgccgtttgctcgcaaggcgcttccggctttcgcgcacccgggccgatgccgttgcgtcacgtctgcgtcagccgtcgggcgcgacgcaaccgccgtactgcagcagcgggacggcggtcgcgtcgctcgtgctagggtcgcgatgcaaaacgagctcctgaaacgcaaggtttctggagctcgttcatctgcgaagtggtgcccgaggcgggatttgaacccgcacgtctaagacaacggtttttgagaccgccgcgtctgccattccgccactcgggcgcaggatgacagtataccggaattcgatcaaagcatcgagtagaaaatagcgtcgagtccgcgattgcgaatacgtcgtcaagccttcatgcgtcaagctcgatcgaacccgccgagctcggctgcgggttcgagatggctcgatcggcgcagtctcttgtcaccttgctggggagccgacgctccgtttcttcgcgcatcgtgcgagcgccatgcagcacaggcttgccgcggctgccagtgcgagggcggcgatcggtgcctctccatcgccggtggcggcgagcgcttttgcgggcatctggcggatccgcgcgtcgtcggtgccgttgtcatcgggcgcgctgccgggatgctgcgcgccgtcgcttgaggggctgccccccgaaggctgatccccgccggaaggcgcgtctccggcatcgtccgacgggggagtgccgccgggcggatcgttgccctggtcgccttcgccctcgtctggttcggcggtttcgtaaaagccgaatacggtgtggggcgtcgttccgcggtcgcttgcgatgcgtaccgcgtacgccaaaacgcccggctcgaacagcagcgggtcttccagcggcaggaagggcgcgctcaagttgaggatctgctcgtaggtggtgagggtcgcaacctcgtaatgcgcgccggggaggcttgccagctgaggcgagctcagtgcgatctggcttcccggcttcaccggtccgctcgacgggtttgccgctatcttataggaaacaggcagcgaagaggtggcgaacttcgtttgggtgccggacccggcgttcgcacccggcgctcccgaggctgccagtgaggctatcgtcgccgagccgcctccttgcagcgacttggagggttccggcacggaaagcaggggaacttccaacccgtccacgatggacggattggatcctgcgcggttcaccaagctgtgcgggcccgtttcctcgcgcaggaaaagcgccgtcgcgtaaccgagggcaaggtcgtccaggctggccacggcgcagtcgtcgccgacgcccgcgtacccgatgttgtcgagtgcggccatcaggctctccgacgtgcactgacccagccctcgctcgtcccgcatcgcgtcgaacaccgatcggtacacgctgtctccgcctccgggaagcccgcgggtttggttggcgagatagcgcgagaacaggtaaccgtgcgcgtacaccgctgttcctcctgcgcccagagaagcgtccggcacgaagctcccctcgtatacgaacgggggaatgcggccgctgaggttgaccatcacggccaagttctgagctcgggttttctgggtggagccgtatcctgcgatggccacggccgcttgggagaacgcctcgttgagccatgcttcgctggagccgtctgtctgcgcgaagttcaccaggtgctggaattcgtgggcgatcatcggcgggacgaggctctcgtcgaactcgcccacgccctccaacgactttcggttcagcacgttgaggtgcagcacgtccatagcgttggtgtaggaggcctcttcgatcaggtctgcagccgtcagctgctcgggtgtgtacaagtcgatcgaggtgaaatagccgtccagcacctccgtctccggcgggaatcggtggaagacgaacgcggttttcccgtcgccgtccaaatcgacgcgaaccgtcgacccgaaggcgtccgttacttttcgaagaacggggtcgatcttgccagccagcctttgcaccagatctgcggggagcatgtcggactccgcgtcctcgacccacagggtgaacagctctccgacagccactgccgtggccgtgaatccttccggacggcctgcggcgcgaaacgtcttcgaatcgcctacctggtaatcggttttctcggcagtcgtgatgcgaggttcgtcagcggcgatctgctgcttcagcgaggacatcgtctcggcatcgcttggcgcaaaagagcgcgcgccgcaaaggggcgtttccccggttgcgccctcgtcggtcgattcgccttcatttccggccgaaaggggcttgtcggcactcgggtagccggacgggaacagcgcgtcgtattcctcggcgctgccgatgggcgtcatgttctgcacgatgacgacttcgttcgcctcgggttgcgcatgcgcgggctgaggcgcgaaggcgagattgcttgcagcgagcgcgaaagcgattgcgatcgcgacgatgccgttcgagcgtgacctcgtgcgcagcataggggctctttcttttccgggcgtgcgagaaagcgagtatagcacggctatggccgcttctgaggagtgccgggcgaggggctgctgctattgcgtctgcgaatcgtggcggcggcgaagctttatctgcgcgatcatcgccgcaacggcggcggctatcgccagcgcgagggcagcgggtgccgccgcgctgtcgccggtggaggcgagcgccttgtcgggcagcggttcgacctgcgtgtcgccggagggctcttcgccgtcgggctcgccggaagaaggcgcgccgttcccgtcggaggggctgccgcccggcttgttcccgtcttcgtcagccgggcccgccgccttctgctcgaacacggcgaacggcgacagctcatcgacggtcatgctcgcaagaccgttttccaccgcaaccttcgccgtttcgagcgagccgtcggctttccggtggaccatccagacgctttctccctcgtagcgcttgtcgaccgagaacgacacggagagcttgccttcgtgcgcggcattctcgccggtcgccgcgtccaccaccgacgcgtcagcgctgacgatgagcgcgcccagctggtcggacgcctttgccatttcggccttctgctcatcggtcagggccgagagcgccaaggagagctcggcgcctgcggggaacgatcccgacacttccacgcgcgatccggcgatctcaccgacgtgcgagctctcctcgtagccgccgcccggctcgtccggctcgggcaggtccaccgtcacgctcatgacgtcgcccacggtgtcgcccaccgaaaggacgataccggagtccacgcgctcgtcgggtgtgtcgcagccgttgtactgcagcagcgggacgacgttgccctccatgccgaacgtctcgcaggcgctggtgttgaagaacgggcgagtgtaaagcgcctggccgtcccggtactccgtattctccggatagacgggcatgacgcccggacggtggtcgaccgtgttcacggtgttgctcaaaaggggatcgtcggtcatgctgcgcgcgtccgcgattccccggtcgatatgccagatgacgatgccgcccgtttcgttgtagtattgcggcttttctttattgtggtcgacccggtacccggatgtcagccctaggtcgaagctctcgtactggcggttctccaccaggtagtattcgccctcggtgctggtggggacgcgcaggcattggtagcccttgccgctccagaacgtggacgcgtcgtgcgtgccgtcggcggctacctcgacgggctctatgtagccgagccgttccaaacagtaggggtcgaggctgacggggacgaagacggtatcgccgctatcggtgatgtatctgccccatgatccgcctgccatcaagctgagttcgctcacgtcgtaggccaaccaggggaattgatcgacggtcgcttcggggtcgtttgccgtgtagttgatgtcgtacaggtcgggcagtcccagatagtgtcccagttcgtgcgcgacggtgctcgtgggcatgggctgggcggggatcatgtcgttcataagggtttcccctatggagatgtagtcgttgacctcgattttgctgcccgtttcggggttgacgatttcttcgggttcgaagttgtctctgtccatgctggacagctcccatcggcaggcccaggttgacggtgtgcctccggcccctgaggcttcgtagcccgccacgatgaacagcagccccgcctcggtcggttcgagcacgccgttgcggttcgtatcgtaggtcgcgaagtcgatgtactgggaggcttcgttgagcgcgtcgacgtacgcgtcgcgctggtccttggccgcgtcgctcaggtattcgactgattcccagttgccgtggtcgcgcttgagcgtcacgtggatcacgccgtcgcccgccttgtcgtgcaggttggtgttgccgcccgtgccgtacgcgctggtctcctcggtcgccggcgtccaggagaacttgccgttcgacatggttgcgtagtagctggtgatgctgttctcgccgctgtagagcagcttgttccaatcgtagccgtcgcggtagcgctgatcggcggcgttccagctcgcgacgacgttgccgtcgtcgtccttctgcacgacctcggcgccggggtcctccgggttctcgaacccgatgacgatggtgatcagcggaagcgacgtctcggtctgcgccgccgaccgcgcgccgagggcgttggcaccggacgcggcctgggcggcctcgatgtcggagagcgtcaccgcctcgccgacgccccggtctcggggaacgtaggcgcctccgcccagcgcggagtaggccatcttgccggtatcgtttgccagcaccgagggcgtcagagcgttcgccggtgcggcctcgtcggcgcgcggcccgagcgcgaggccgaagccctcgctcgtcacgtagtaccacgtctggtcggcggggctcttctgcacgaggcgcccctcggccgtccgaacgtagtggaagaactcgtcgccgcgctgcccggcctggaaggtggcgccgtcgggctggacgtagccctgctcgatctccaaggccggaccggcgtaggccgcgctgggcgcgaggcacagcgcgagggccagcatgaggaaggcgagaagcggggcgcgctttgcgcggcgggccgtctcgcgggtcttgtgctgcatagttccctctcttcaatggggatttctacgtttcgcattaataatgtcagaataccatagcgtatttccattcgacggccgcgcccgcgaaggggcttggcgctcgttgcgcgttttcgcgcgttcgtgcctccgggtttccaacgcgcttttgccgggtcgtttccctgatacaatcaaaagcaatcgcgttcgttttcgcaaaggatggagtgccatgaaacgcttcctttcgatccttctcgccgcggccctttcgcttatggccgtgcccgcgtccgcgctcgcggacgaggtttccgagaccgcgggttccgacaacccgacggtcggatcgggagaggaggcgcgttcgctcgacgagttgctacaggcgggcgactacgttccgggtcgcgtgctggcgcacgtgaacgacgacttcgctccggtgagcgcctattcttccaacgggggaggctggtcggccagcaacctgtacaccttcgacccccagcccgaagccggggccgaagccgatgtgccgctcgctcgctcgatgccaacgcccgagcaggtgatcctcatcgagtccggaacgcagtccaccgaggatctgctgcgcgatctggccgatacgccgggcgtgctggcggcccagcccgactacgtgcgttatatcgacgacctggagacccaggcgaagccggtcgaagagccggctgccgccctgtccgcggataccgcccctacggacgacccgttgatcggcctccaatggcacctcgcccccacggacgagatcgccggcgccgccaacgtcgaaaccctgtggggtgacgagggcattcccggcaggccgtggcaagggaaggaagaagtggtggtggccgtggtcgacacgggcgtggattgcaccaatcccgacttgaaggacgtcatgtgggagaatccgggtaacatcggcctggagggcgagcatggctacgactacggcatgggcgacgacgacccgatggacaatgacggccacggcacgcatgtggccggcatcatcgcggcctccgtcaacaacggcgaaggcgttgccggcgtggctccgaacgcgaagatcatggcgctgcgcgtcgccaatgaaagcggcggctttctcacgtctgctgtgctcggggcgtactcgtatatgaagaaggcggcgcaggccagggtgaacttggtcgcggcgaacaattcgtggatgggcgcgggtgagagtcctctgctgaccgaggtgatggacgatctgtaccgatcgaacggcgtgctgtctgtctgcgcatcgggaaactatgccgccgacctcgaccaatcgctgaaccttccggccggcgcccccaccgacggggccattgccgtgaacgccgtcgatcgagagggcaggctggcttccttctccgattacggcgccgcggccaccgatctggcggctccgggcacggacatcctgtccacggctcctcagggccaggggatagttgatggggacgatccggagctgacggtggcgttcgacgatttcgaatccgaggacaggatgttctcgttccaggcgtccggcgatgcggagccttcggtttcgcgggcggaggtcccgcaggttgtgggcgacgccccaagccagggcgtgcttatgtccatcaagcaggcgaaggcggggcagaaggcgtccgtcgtgttcacggcgaaaaagggcgcggtcaagcagggcctcgcggcggcggacaagaccgtcgacgacctgcagtgcctggccttcgatgccggcgtcgcggactccaaggagagcgatatgggccgtttgctgcgcgtcagcgtgcacggcatcgacggcagctggatcgacctgacgcctgaaagcttcggcactggcggcgccatcccgctttcgctcagggttcccattccaaaagacaagcgggacgaaatcaactgggacgagttctctttcaaattggagcgcacgttcacttcgttcgacgacgggatggacctggacttctttttcgacaacgtggcgcttgtcagcgacgtcgcgccgtacgtctacatggatggaacgtccatggcggctccggtggtgacgggctcgtgcgccctgctcgcggggctgttccctaacgacggcgccgagcaactgcgagcgcgcatcctgggaggcgtcaagcgggcggacgctctggccgggacgtgcacgtccgacgggcagctggacgtcgtccgcgcggcaaccgacccgtacccggtggtggacgcgctggagcccgcggccgacggcacgctcgaggcgacggtgcgcggcagctggttcggcgaggatcgcggccgcgtcacgctcgacggcgccgacctcgaggtgaagtcgtggggcgcgaacgaggtgcgcgtcgtcctgcccccgtctctggagtccaagcagcgctacgtccaggtggagcgcgccgacggcgacaccggccgccgcaaggtggccgtcggctccgaggagggcttcgacttcttcgagagcctgccggcccccgacttcaaaagcctgggccttcccgagcctacgctgtacaatgcgtggtcgatggcggcggctgctggccgcgtgtacgcggtgccccacttcgagtcgtccgatggcagggaaaggagcgctttgctggcatacgaccccgcctcggcatcgtggtcggtgcagcatcttgtcacggatacgcttgatgccgttttccgcctgacctcgagcgggggcgttctgtatgcgctcacttcggatcaggtgctgtattcgttcgatccgtctaccggcacgttgggggatcctgtggactgccgcgactccttgaccgcgtgcgggttcggcgggtttgatttcatgggcgttacccttgcaagcgacggccgctctctttgggtgttcgccggccttgacgccagcggcgcgtcgtcgccgcttgtcgctcgcgtcgacatggcgacgggcgacgcgaccgcgctgcccgatttgggcgaggggcgctttactcccttcgccgacatggtgaacggggtgttgacggttgccgccggcaacgtgaattggatagaatcccggattgtcaattcggttgcggcgttcgagggcgacgagtggaactatgctcctttcccgcaggatatcgtgttgaaccagtatggtgcggtggccggaggcgttctgccggcaggatccaccatcgccggatcgacggcttctcacgagcgcatcatcttgtcgggcgcggtcgaggctggcaaccaaggcagcgacacgttcgtgtacgatccgaaagccggcacgtggctggccgttcccacgcgcctgtcggcatcgaaggtgtcgcttgccagcggcgccgtgctgggcgacgccctgtacgtggcgggcatggactcgctcacgaaagaaatggtcttcaagcgcttgaagttcgaactcgcgcccgacgaggagggcggcggtggcacccccgacaagccgaccaccgatcccggcgaggagcagccgaagccgcttcccgacgcgcccgacgcgccggcctcgccgcaggaggcgttgaagccgtccgccgaggcggcgaagccgaagccgctgacggccaccggcgatcccctcgcgccgcgcacggccgcccttgccctggccgcggtctcggctctggccgtagcgggcctggtcgtcgccgtcaggcgctcgcgctcgaggcgttagagttagattctgggcgcgcggcgggcttgaagccgccgcgcgccggcgtccgcgctgtctccgttgatttttcgacgttcggtcaacatatggaactgcatctggcgcaggtatcccgcaaggatcataataggctcaattgccgccggggcgaggcatgcgaacggctttcccgtcccggcgtggtcgcacgcgtatcaagagtcgggaggcacctatggagcacgaagaactgaccaggaagatcgacgcgtatctcgaggaaaattgggagacgatggtcgaagacatcgagacgctcgtccgcatccccagcttcgaggaatcggacaaggcgaccgaaggcgctccgttcggccccggcccgaaggaggcgctggaagccgcgcttgaaatggcctccgacatgggattcaagacgcacgatgccgagggctacatcgggttcgccgacttccccggcaagagcgacacgcagctgggcatcatcggccacatggacgtggttcccgccggtcccggctggaacttcgagccgtacgcggtcacgcgcaaggaaggctacctcgtcggtcgcggcacgctcgacgacaagggccccagcgtggtggcgctgcacgccatgaagttctggaaggacttgcaggacgccggcgaggctcctcagttcccctacaccgtccgcttcctgttcggcgcgaacgaagaatccggcatggccgacgtggcctactaccacaagcattacgacgatccggcgttcctgttcacgcccgatgccgagttccccgtgtgctacggcgagaagggtggctacgacggcgagctgatcagcaagcccatcgccgaccgcatcgtgctggagttcacgggcggcgcggccacgaacgcggtgcccggcatcgccgaggccgtggtgaaggccgacgctgccgacctgccgaatactgatcgcattaccgttgcggccgacggcgaaggccgcgcgaagatcactgcggccggcaaaggagcgcacgcctccatgcccgaaggaggcgtgaacgccatcggcctcatcgtggactacctgctggagcacgacctgtgcaccgccgacgagcgcgcgttcttcgagctcgaccagaagctgctcaatcataccgacggcagcggcatcggcatcaagagctccgacgagtacttcggcccgctcaccgtcatcggcggcaccatcaaaatcgaggacgaccgctttgtgcagacgctcgacagtcggttccccacgtccatcacggccgacgagatcaccgagcgcctgcgccagctggcgagcgagatcggcggctcgtttgagaacacgctgcttatggagccgttcctcgtaaagcccgacagccctgtgatccaggcgctgctgaacgcgtacaacgaggccaccggcgaggacgcgaagccgttcaccatgggcggcggcacgtacgcgcgcgagttcaagagcggtgccagcttcggtcccgaaaagccgtgggttgaggatcccgaatgggttggcatgatgcacggtccggacgagggcgtcagcgaggacctgctgaagcagtccttcaagatctacgcgctcacgctggacaagctcatgcagctcgacctgcaatagcgaagggtgtgtcaaggggacgggtgatttgacgcgctccgccccggtcgtcatcctgagcgcagcgcgaagcgcggaatcgaaggattccgtgaggcgctagccggaagcccccccggctagcgccgacaaaacgcttccggctgcgcgctcatcatcgtcgtcgaaaggcttttcccatgtcccaactggatactgtccccaccgatttcgcccctgctatcggcattgctccggccgaaggcctcgagagcgaagaaggcggccgcatcgtgcttgagggtctgccaaacacgcgcgacgtgggaggcctgcccacggacgacgggcgctacgtgaagcatgcgcgcctgctgcgctcgggtgcgctcgaccatgccaccgcccgcgacctcgaagtgctgcttgacgactaccaggtgcgcacggttatcgacctgcgcaccgaagaagagcgcaaggagcatcccgacccacaggacggcctggtgggcgttcggttcgcggatgcgccggtgctgagcgcctccacattcggcgtcacgcgcgagggcggcatgatgcaggcgctcaaaatgctgcgcaccgtgcagaagaaccctgccagcatcatggaggaagtgtacgagcgcatgatgttggacgagcagagccagcgcggcttcgcgcagttcttcgacgatgtgctggctgccgaggatggctccgtgctttggcactgcaccatcggcaaggatcgcgctggcttggccgccgcgctcttgctgcacgcgttgggcgtaaagcgcgaggccgtcgagcaggattatctggccacgaacaagtacgtccaatccgaaacgcagaacatcatggacgcgctttcctcgttcggtctgggcgacaagctggataagagcattcacgtgatcaactccgccgatccgcgcttcctgcacgccgcgctcgatgccgtggaaaagcagtacggcagcctcgacgcttacgtgcgcgaccagctgagcgtcaccgacgaaaagcgcgaggccctgcgcgctcgctacctcacggacgatccccgcgggtaacggcggatttaccgatggtcagcggtggttgatgttctttcgtcggtttgcttgctcctatctttcggcttttggccggtttcggtgatccatgatttataatggtcgaaagcaaacgtacggagggtaggaggcttaggtgttgaaagcgatgatcgtcgatgacgaggctcctgcgcgttcagagctgaagttcctgcttgacgagctggggcagacggaggttgtcgccgaagctgccagtgtgcgcgaggctatcgagaagttgaaggaatatccgtgcgacgtgatgttcctcgacgtgaacatgcccgaagccacgggcttgcagctggctgaggcgctgcagcacctcaagttcccgcctgcggtggtgttcgtgacggcgtacagcgagttcgccctcgatgcgttcaaggtgaacgccatcgattacctggtgaagccggtcgaaaccgagcgcctgtcgcaagctatctcgcgcgtgcgcgagcacgtgtcgctgcacgtgcaggctcagaagtccgagcgcattcccgtcgaaaagggcggcaagaaaatcctcatcggcatcgacaagatccgcttcgtcatggcgcgcgacgactacgcgtacctgcaaacggatacggatcgttacttctccacggtcagcttggctcagctggagaagcgcctcgacggtcacggtttcttccgcgtgcaccgcggctatctggtgaatctctcgatggtggaggagatcgaatcggtgtcgggcggtacgctgctgctcacgctgaacgccgtggacgagaaaattcccgtgtcccgtcgccgagtttccgctttgaagaaggcgctggggctgtaaggcgcgtccgcataacgaacctcgaagggccggagaatcgtcggcccttttctttttggcacgagcgccatcaggaaagcggcttttccctcctgcgtccccgcgtgagtgaccccgtcatcccgagcggcgctgccccccctttgtcatcctgagcgagcgaagcgagtcgaaggatcccgtgcggcgtcggccataaaatcatctgcaataatcgcacggatcttcggttccggcatcttctgcctgtgctcaagacggcagtcccagcgatgtttcacgtgaaacatttgttcgcttgtcgcatggcattacgacaagtgtttcacgtgaaacacttgttcgcgcaaaccgcggacagtcgcgaagcccgcaagcggcagacggggacgcatcggcaccagacaggcgagaggttcgcgcgcagcgggcggcgcgaggttcgcgggcggcggacaggcgcgaaggtgggaaatcgctccaatcgcatgcgagaatgcgaaaagcgcccgagagacgaaccctcgggcgcttccgacagagaaatgtggggtaatggcctagtaggcggtgaaagacgacttcggagccaggcagatgggacaggcggtgaagttttcgcccttgtggatgtagccgcagatggggcacaggtagtacttgccgtcgaacggggtgtcgatggtggtgtacgcatccatatacagcttcgcatgatacgcctcggcaagcttggcgcgcgtgaacacctgcacggccttgttgttgccctcttcctgggccttcttgatgaaggagggatacatgtccgaggtctcgtagatctcgccgttggcgccggagatcaggttgatgtcgctctcgtgctcctcgaccgcgggcggctcgggcttctcggttgcggggtcgatctccttggccaggtcgtactcgaggccgatgtggattttctcggcgtccgcggtgcactggaacaggcgggccagcacgtcgaagccctcgttcttggcgaccttcgagaacgcctcgtacttggtggtggcgcccgtctcgcccgcgatggccgtcataaggttttcgtaggtggtgccgacggtggtcttgctgtcgtagatgatgttgaaattgctcgccgtcgaggcatcgggcatggatgtgggttccagcacctcggccatatactcgctgttcgtcccgctgccggttccggtgccgtcggcggacggatcggtcgtggtttcggccttcggctcgctcggggcggcgcaggcgcccagcaggcccatcgcggaaatggacacggcgctgacggcggcgcccttcaacaggttccttctagaaatatcggacatggttcctccctcgtcttcccgatgggctcctctccagcccatctgatatcgatactatatatcaattaatataaataatcaataatgaaatagtacgggaatgcttgggatttgcgcgctgattctcgttctcgggcgcgctcccacacgctttgtccacaactccgtcacaagcgcaaacacgatggtcagcctcgtcaccgtttgctagaatggagcgaattacgctgaaagaaggttgtatgctatccggtgatgtagaaaaactgtatccttccgcgaaagccctcgtgaaggactgcgttgccagccgtatccatgccaaggatgcgagcctgtacgacttctcggaggaagcgcgcgcgtgctccgagcaatacatgggatggacggaccttgcgagcaattcgccgtactccctgcgcgacatccagaatttcgccgactcgatcatcgcccaagggctgaagacggtcgtgctcatcggccagggcggttccacgcaggcgcccatgaccatcacgaaatacaacaagcccgattcgtcgaagatcacgttcaagacgctggactccgactcgcccgtgcgcgtgcgcgccattttggccgaagcgaagcccgagaccacgctgttcgtgatctcgtcgaagagcggcggcaccatcgagccgcgcctggccctgcgtgccgtgcgcgacgccgtggccgaccgcatcagcgaagaggagctggtgcagcacctcgtggccatcaccgaccccggctccatgcttgagcgccaggcgcgcgaagaagggtgggccgcggtgttctccggccagcccaccgtgggcgggcgcttctccgcgctgtccgtgttcggcctgctgccggcggcgctcgtgggcatcgacctggaagagttcatggcgcacgccatcgacgccgagcgccagtgcagcgaggacgccatcgacaacccggccatcggcctggcatcgtttttgtacgacaactacctgcagggacgcaacaagttcacgttcctcacgcagaagcgcggccgcgttctgggtctgtggatcgagcagctggtggccgagagcctgggcaaggacggccagggcattctgcccaacatcgaggtggactccctgctgctcaagaaagacccgggcgatcgcagcgccatcgtgtacctcacgcgcaacgacctgtgggacgagcgccgcaacttcgagatgagcctgtcctacatcgacccggccatcccgcgcgccaactacaagatcgactccgtcgaagagctggccgagcacttcgtgatgtgggaatacgccatcgcgatgtgcggctacctcatgaagatctgccccttcgaccagcccgacgtggcgtcggcgaaggccgtggtgctcgacatcctcaaggagggccagcccgagcccgacttcgtgcaggatttcatcgacgaggtgcacatgggcgaggtggaagtgcgcctgtctccgtgcttcaaagattgcaccgatgtccgcagcgcgctgcgtgcgctgctgggcagcattcaaccgggcgatttcttcgcgctcaacgcgttcttgccgttcacgggcgagggtcgacgcgaggcgctggaaaccatccgtcacggcgtggctgagaagcgcggcgtggtatcctgcctggaagtgggtccgcgctacctgcactccaccggccagctgcacaagggcggcccgaactgcggcgtgttcctcatcctgtcggccgacgagctaaaggacatcccgctgaagcaggaggctgaaagcctgggctcgctggccaaggcgcaggcgtcgggcgacctcgttacgctggccgagcgcgggcggcgcgtggtgcacctgcacctgcccgacaactcgggcgttacgctgcgccagctggctgaagtgatttccgacatcctggaaaccatgacggtgccgacggcttagcgggcggccgcgcgacacgatagcgttacatcccgagggcggccgtcgagccgccctcgtagattgaaggccacagcacaacgcggaggcgatcatatgaaggaagcgctggacattcaagtcaaaggcatcgtgcagggcgtgggctttcgccccttcgtctaccgtttggcgaagaaatacctgatcgacggatgggtgctgaacgccaccgacggcgtgttcatccatgccgagggcgagacgaagctgctcgacgagttcgtcatcgagctgtccgagaacccaccggccgcctcgcgcgtggaggaagtgacgctgaaggaagtgccgctggaggacttcgactcgttcgagatccgcttctccgacgcaggcgccgtggagaagaccacgctcgtgtcgcccgacctggccacctgcgacgattgtgcccgcgagctgttcaacccgaacgaccgccgctaccgctacccgttcatcaactgcacgaactgcggcccgcgcttcactatcatcgagaagctgccctacgatcgcaagagcacgtcgatgaaggacttccccatgtgcgagcgctgcgcccgcgagtacggcgacccgttggaccgccgcttccacgcgcagcccgacgcgtgcttcgaatgcggcccccatatcagctggcgcgaacacgagggcatgcccggagcgctcgccggcgttcatgcccccggcgtttccgccgacgtgccggccgcccctgacgtccccgctggcgcttccgcctcccatgcggcgcaaacaaatgtttcacgtgaaacattgtgcgcttccgatgccattgacgcgcccctgggacccatcgcctggggaaccacgcgcgaggagagcgatgccatacttgcgcgcgccgtggaactgctgctggcgggcaagatcctggccgtgaagggcctgggcggtttccatctggtgtgtgacgcgtcgaaccccgaagcggtggcgttgctgcgcgcgcgcaagcgccgcgagggcaaggcgttcgccgtcatgatggccgatatggaagccgtgcgtgcctattgcgaagcgggcgaagcggaggagggcatcctcacggccacgcagcgccccatcgtgctgctgcgcaagcgccccgatgctgtttttgctcccggcttggccgacgccctccccgaactcggcgtcatgctgccctacacgcccctccagcatctgctgctgcacgacttcgcgaaagcgagcggttgtgccgagcgcagctcccagcgcgaagccgaaggatcccgcgcagcgacggccgtccctatgctggtgatgacctcgggcaacatccacgacgagcccatcgtcatcgacgacgaggatgcctacgagaagctgttcgccgtggccgacgcgttcctgggccacgaccgcgccatccgcgcccgctacgacgactcggtggtgcgcgttatcgaagcgggcagcgccggcgaagccgtccaattcatccgccgcgcccgaggctacgcgccgctcccgttggcgatgcccgcgaaggcgcgcgaaggagaagatgtttcacgtgaaacatccgttcgcgaacagggttgctccatcttcgccaccgggcccgagcagaagaacacgtttgcgctcacgcgcgacgccgaggcgttcgtgtcgcagcacatcggcgacctcgagaacgccgaaacctacgacgcgtggctccaggcgaaggaccgctacgaaacgctgttcgagatcgaacccgaccgcatcgcgtgcgacctgcatcccgagtacctcacgtcgaagtgggcccacgagcagagcctccccgtcaccgaggtgcagcaccatcatgcgcacgtcgtgtcggtgatggccgagcacggcctggccggccccgtgtgcggcatcgcgttcgacggcacgggctacggcatggacggcgccatctggggcggggaagtgctgctcaccaacctgactgcgttcgagcgtttcgcgaacttcgcctacgtgcccatgccgggcggcgcggcggccgtaaagcatccgctgcgcatggcctacggcgtgctgtgggcgttcgacctgctcgaccatccgggggctgcggctgcgctcgaggctctgggcgagcaggcggccgtgtgcgatcagatgatcgaccgcggcatcaacacgcccatgacctcgtccgtcggccggctgttcgacgcggccagcgcgctgttgggcatctgcgccgagcctgcgtacgaaggcgagcccgccatcctgctggaagccgcaatcgggcgaacagatgtttcacgtgaaacatctgccgccgacgcaaccgatgcgacccctgctgacaccaaccgggatccttcgactccggcgcttcgcgcctccgctcagaatgacgatgccgggcttagcgcctccgctcgggaagccgcgtcccgttacgccatcgcggtggtgaagaacaccgccactgccgccagcacggcgcaggacacctcggtcgtgctgttcgatgccgcgccagcgttcgccgcgctgctcgacgacctcgcggccgacgtgcctgtcggcatcatcgcgcgctgcttccacgacgcgttcgtgcaagccatcgtcacggcggccgagctcgtgcgcagcttgtacggcataaccacgcttgccctgtccggcggcgtgttcatgaaccgctacctgctggagcacgctctggcggcgctcgagcaggcgggtttcacggtggccgtcaaccgcgatctgccgcccaacgacggctgcatctccttcggccaggctgtggtagcatgggcttcgagcaaagaagaaggagaacagccatgtgcttagccatacctgcaaaagtgactgaaatgaaggacaaccgtctggctacggtggacatcctcggcgtcacgcgcgacatatccctcgacctcacgccgcaggcgaacgtcggtgacttcgtgctggtgcacgccgggttcgccatcgaggtggtggatcctgactacgcgcaggaaaccatcgacctcatcaagcagttccccgagctggcgggcgacgacatccccgcagccgacgaggtagcgcgatgacctcctcgaccggaacggatgtttcacgtgaaacatccgtcgagccgaaggataggcccgagcacctcgcgcgcgcggtcgacgcggccacgatggaatccgagctggcagccttcaaagaccctaaactcgcgcgcggtctcatcgagtccatcgcgaagctgtcgcccgcaggcggcgccacgctcatggaagtgtgcggcacccatacggtggccatcgcgcgcaacggcatccgcaacctcatgccggaaggcacgcgcctggcgtccggtccgggctgtcccgtgtgcgtgacctcgaacagggatatcgacacggtcatcgccctcgcccgcgtgccgggcatcaccatcgccacgttcggcgacatgacgcgcgtaccgggctccacgtcaagcctgctcgccgagcaggcggcgggccgcagcgtgcagatcgtgtactcgccgctggacgcgctcactctggcccagcagaaccccgatcgcgagatcgtgttcgtgggcgtgggcttcgaaaccaccacgccgctggtggccatggccatcaagcgcgcggccgcggccggcctcaagaacttcagcgtgttcggcgctcacaagaacatgcccggcgcgctggaggccatcatcaacgacccgcagctcaaggtggatgcgctcatcctgcccggccatgtcagcaccatcatcggcgccgagccgtatcggttcttggccgagaagtacggcatacccggcgtcatcaccgggttcgagccggttgacgtgctgcagggcatcgccatgatcatgcgccaactgcacgaaggccgtgcggacatcgagatcgcctacgcgcgcggcgtcatgcccgaaggcaaccccgtggcgctggccgccatcgacgaggtgttcgagacgtgcaccgccctctggcgcggcctgggcgagattcccggttccggctaccgcatccgcgaggagttcgcgcagttcgacgccgtgcgccgtttccagcccgacgtcgagcccacgcaggatccgaagggctgccgctgcggcgacgtgcttcgcggcatcatggcgcccaacgagtgtcccttgttccgcaaggtatgcacgcccgagaaccccgtgggtccttgcatggtgtcaagcgagggcagctgcgccgcgtaccaccggtactactaaagagaaaacaggcgctgcagcatccgaaggacccctcgtcgaggggtccttcggactatcttcgaatgtttcacgtgaaacattcgttcgatagactcggatacgtcgatccagcggcaagacgacgcgggaaatttcccaaaagatattcttttcagttgattgtgcagtccctatgctcagcggcgcgctcatgttcggtgctgtgcgtgcatgagttacccttttgtttccatcgctatacagaacgagagaattaattgcggataatatccaatattgggtcaaaaactgcataaaggagaaaacgccgtcgttcaacatttttgtgcatttgaacaatttacttattcgttttgctcaaatgtctatgtaatttcatgttgcagttgaacaaaaaagatggtataactggctcatcggcaaatctggaaggacttgccacgacggggtctaagccgtggcgctctctccagcgaagctgcagtttgtagttgtgccatccaaataggcggcgccggaagcgctgccggagaaaggagactgtcatggcgaagatagtcaattcttggaacgactgg

SEQ ID NO: 9345 - DNA, 214 bp, Unknown
  gut microbiota DNA sequence
ttcggagagcggctgggtggcaacctcgcggccgttcaccagggtgccgttcgtggagccgaggtcggtgatagtccatacgccttgcggttcgaagcgcagctcggcgtgcgtgcgcgatgcgttcacgtcgtgcacggcaatgtcgttcttcgactcgcggccgatgagcaggcgcgccgacgccaggtcgtacgcgcggttgttcgtggtg

SEQ ID NO: 9346 - DNA, 930 bp, Unknown
  gut microbiota DNA sequence
cgcgttgtatgaaagctctgccagcttgggcgcgaggccgtcgcgtgccggcacgatttgcgactgctctccggccgcgttcagccagatgccgtcttcgatgccgtcttcgccggcatcgcgcgattgcagcaccgccggctcgtgacgcgtggggctggtgaagtacagcgggttatcgggcgcctgcgttccctcgccctccacgtcgcgcgcgtacgtcagctcgtcgctcactacctccaccgcctgttgcagcagcgcgtcggcctgcgcctgccgggtgatggaggtgtacgagttcatggccacctgcagcccgacgcccaccgcaacgcaaagaagcccgatgaacactatgctggccagctgctccgcaatcatgaacccccgcgtgtcgcgcaggcgggatcgaagcgacgctttgtcgagaaggggcgtcatgctaccgaccctcctcgtagtatgcatagccgcccgactggtatacgctcactttgatgggaactgcggtcgaagagtccggaagcgttacagacacgacaggcccgtaggaagacgaatcgtataaagaagcctccgcggcgtacgaggcgttcagcacctgctggcttcgggccgaagcagttgccgacaccgtcaccatggtggcgagcatcgtggcgcccagcgccgcgatgaacactgccgccagcacctccaccatcgtgtcgccgtggcaatcttgtagtttctcgcgcagcacacgcgtcgttttgccgatcatcacgccgcctccgtcttcttcacggtggtgttgtcgccgtactcgatcaccgtcacgcggccttggctatcgaacgtgggcgtgcattggatggagatggtggtgttgtagggggaatccgccgcgaaagcggaatcgagcgacaactccacggtgatgttgag

SEQ ID NO: 9347 - DNA, 2205 bp, Unknown
  gut microbiota DNA sequence
gttggatgcggagcttcccagcacgtaatccttcccctccgcgcgggcggcgaggatgtccttcgtgcgccgttcggtccagaaactctggccgatcatcgaacgcaagctattcgtatcgacactcgcctcacctgcggtatcgtaggcgattttaacgactaccgatttctcctcccagacagcatcctcgccgcccagctgctgagccatcagcttcgctgccgactgcatcgcgtactctttctgctgcaagtccacatgcgtctgcgctgccttggcctgcaccgaggcagccgtcatcaccaccgacccgatgatgccgcaaataaggaagaacaccagcgcaatgacaatagaagccccggaagtgtcacgaaggatgttgcgagcttttgtcattactgcaccccgacgtcggcagtcacctcaacggtttccccgccttcactcgggtcgccgtatttgacgaacacctgcccggattcgttctgagcaaccgcgctcattgatgcttgcccaacgtaccgcccagcaacaacagaatctcgcaactggccggcaggaacctgcagaaccgcgttgctcttcacgttctggctaatgactgccatttgagcgctgccgaccaaaccgccgaaatggatgcgcgtgttttggctgggatatttctcgttaacgaacgtaggctggaaaagagcgcatgcgaagccatcgacggagctcctcgacatgttcaactgcgagccgtagccgaagatccccccgatcgcgggagaggttttccatgcttcgacatcggcgacaacctcaatacgaagattcttgaccgatagatcgctcacattggcttgacttgcatagcccaccaaaccgccgatatacgcctcgccacctgtaccctttttgatgatcctaagcgtagccgtctccttgccggcaacgccgaccgtgcagttttgaatatcggctccgtctccgtcaatcgacccgacgaggagtccgaatcgaagtttgcttccatgggtggaaacgaacacatactctgagccttcatcggtgggatccagcacgatgttcacgtttttaatcaggctctccccgccaacatcaagaaacagaccgtttcttccctggttctcaccggtaatcccttcatgtgccagtcggtacggtattccgaatatgctgttgccgcctccgtcgtacgtcgagcctaagaacggctgagtgaatttagacgtgctcacgacaggcgcatcggccaaatcgatgttccgcgtttggataaagcagttatattgagcatacttcccctgcacattgttgcttccagctgtcaaattgccgacgaactgccgtcccagtcgaacgttccagggcgaaacgctcgttccccatgaaagggcggcctcttcattcgtttcgacagcgcaagcgaatgcgaagttcaccgtgtacgtgccctcgacggagaccgtgctcgcacctgtctgaatatcagccttgaacgacagtgtctgattcttcagtttatatttgtcgtacgggcggttttgccccacgtctttatcgctcaccgtgatgcgatagcaatcgtataagcctccttcgatggacaaaccctgcagcacgtcggagaagtccttgagatagttcgggatgtcgcctctgcccgtcattttcggctgattgctgccagtgggaaccaccacgtaatagccaccgtcggtgacggagtactcgttggacagcaagttttcgaccgcagccgcgttgttctcgatatacccatagtaaccgtacgccggcgaacccgttttgtcggtgccggtttctatgtacatcatgcccaaagacggctgcaccttcttccgctcgtcgtagcttgcgacaagcgtcgtgccttggtagctgagtccgtcgtagtcggaaaccagcttgtctgcttcgacgagaagttctgcacccgacatggtatccttggttgtccaccctttgaacgtgtacagcttatcgtccgtttcgtagttttcggcggcggcgattttcgcgacgctctcatcgcttgccgatgcgtgcgggacgtattgagatggcggcgcacttccattctcgacggtgtatgcgagcgcccggtagaagcggtagtcttcttgggtggttatcttgaagtcgtacgtacttccttggcggcacgagaac

SEQ ID NO: 9348 - DNA, 353 bp, Unknown
  gut microbiota DNA sequence
cctcaccccgcgcgagaccgaggtgttcgacctcctggcgcgcggccgatcgataccgtacgtgcgcgacgccctcgtcatctcgcgcgagacggccgccacccacgccaagcacgtctacgccaaactcgacgtgcactcccgccaagagctcatcgacctcgtgcattagctcgcacgttgccttgccgtcctgagcaagcgcatggaaagccccgcgtgcggggctttccgttaagggagggagggttggctcgggtggtgcttacgctgcgccgagggcgtgcttggcggcgatgcgggcgaaggtggcggtgcggcccgcgttgatgcccgtgaagttgctgggatag

SEQ ID NO: 9349 - DNA, 178 bp, Unknown
  gut microbiota DNA sequence
ggtcgataggccgcaggtgcaaggcgtgcgagcgcctcagccgagcggtactaatagcccgagctcttcttccagtacatgcacgaccctcgggttgtgcgatcgtgaaagtcacgagcgctgtgcaaccgccagggtggcgcggggggatcccgcggccctgacggggccatacagg

SEQ ID NO: 9350 - DNA, 208 bp, Unknown
  gut microbiota DNA sequence
cgaggtgctggaaacaaagcccaccatctgcgacccggccgccgacaaggcccgcgacgccgagctgcgccggtcgggcgaaggcgcgaccatcgccttcaacgatgtgagcttccgttatggcgattcgaaggagtgcgtgctcgagcacatcgacttcacggccgagcccggcaagaccacggcgctcatcggctccaccggatcg

SEQ ID NO: 9351 - DNA, 408 bp, Unknown
  gut microbiota DNA sequence
ggaggagcaaccggccgagcgcgtgacgatcggagtctggtggcaggtccaccccttcatgatggaagcggttcgtcagatggcgcaaacgcatccccgcctcaaaatcgacttcgtggaaacctcgtacggcgacgcggcagaagggttcgcgcaggggctgttcgatcttttcttctctacagactcgcttgcgctgcggcagatgggagcctcgttcacgccgctgtcgcgcgagaaatactactgcgtgttctcccccgaaagccccttggcgaagcgcgagacgatatccaccgacctgctcgaaaacatcacggtgtacgcaggagcggactatcgcgacgttcccgagctgcacgagttcgaatcctttttcgcgcgagacaacgtggtgaaggaatccat

SEQ ID NO: 9352 - DNA, 685 bp, Unknown
  gut microbiota DNA sequence
tcaagccccgcttcacctcctctatcctctataacgaatcctacgatcgatccgtgcgggttcagctgaaaaatttccggacgcattcgcccggatgcccctcgtgcttcacccagcgaagcggtatactttcccaaccctaccaccttcgagaaaggaatcccctgtgaagacgcttgccaagattagcgacttcgcgggaaagtacatggcgatcatcgcactcgccgtcgcgattatcgccttggtctttcccgaccccgtgtccgccgtcgtgaagaccagctacgtgaacatcctgctgggcatcgtgatgttcggcatgggcatgaccctcaagctggccgacttcaaggtggtgttcacgaagccgaaagctgtcatcgtgggcatcctggcgcagttcgttatcatgccggtgctggcgttcctgctgacgatggtgttccagctgccgcccgagctggccgtgggcgtgatcctcgtgggctcgtgccccggcggcaccagctccaacgtcatgacgtatctggcgaaaggcgacgtggcgctgtcggtgggcatgaccgcatgcaccaccatcatggcgcccatcgtcacgccgctgcttgtgctgctgttcgccggccagaccgtggacgtgaacgtggtcgatatgttcctgtccatcgtgcaggtggtgctc

SEQ ID NO: 9353 - DNA, 2765 bp, Unknown
  gut microbiota DNA sequence
gcgcaggacatagccgggtcgcaggcgcacgcgcgcatgctggcgtcggcgggcgtcatcgagcccgccgatgcggaggccatcgtcgaggggctcgaccgcgtgaaggcgcgcatcgaggcgggcgacttcgcgttcgacatcaacgacgaggacatccacatgtcggtggagcgcgcgctcatcgccgacatcggcgacgccggcgcgcgcctgcacaccggccgcagccgcaacgaccaggtggccaccgacacgcgcctgttcgccaagcagcgctgcgaggacctcatggcggcgaacgtggcgctgcgccaggcgctcgtccggcaggccgaggcgcacttcgacgtcgtcctgcccggctacacgcacatgcagcacgcccagccggtgctgttctcgcaccatatgctggcctacgtgtggatgctcgcgcgcgacttcgagcgcctggcggccgcgcgcacggcggccgacgcgagcccgctgggttcggcggcgctcgcgggcaccacgtacccgctcgatcggcagatggcggcggccgagctgggcttctcgcgggtgatcccgaactcgctggacgccgtgtccgaccgcgacttcctgctggacctgtcgtacgcgtgcagcgtgtcgtgcatacacctgtcgcggctgtgcgaggagatcgtgctgtggtccagctcggagttcgggttcatcgagctgtccgacgcgttttccacgggatcgtccatcatgccgcagaagaagaaccccgatttcgccgaacttatccgcggcaagacgggccgcgtggtaggcgacctcgtggcgctgctggtcaccatgaaagcgctgccgctggcttacaacaaggacttgcaagaggacaaggaaggcgccatcgacgcggccaagacgctggaggattgcctcgtgtgcgcggccggcatgatcgagacgatgcgcgtggtgcccgaggccatgacggcgcaggcgaagaggggctacctggcggccaccgacgtggccgactacctggctaagaaggggatgccgttcaggcgcgcccacgaggtggtggggcacctcgtgctggtatgcgagcagcgcggctgcgacttggacgacttgacgctggccgacttcaaagccgaaagcgacctgttcgaggaggacatcacggcctcgctcgatctggagagcatcgttgcggcccgcaccaccgagggcggcaccgggcacgcggccgtgcgcgcgcagctggcgcttgcgaaagacgccctcgcggccgacgaggcggtgcttgcgggataagcgcagcgccttttggcgcgggggcaccgcctgaggcccgagcgtccttcgccgcgccgatcgcacgctgcgagcgtctcgaatcggcgcggcacgcgcgcaacggaccgcaagcgggctcccgcgcccgagaaaaaagcgctgcaccctgcttgcatcaaccacgttttgagctcccgaccgggcgttttcccgtgtgacctttttccaacgaacttgtgttgattcatgggggcctgtgccccgatgttacaatgggcggagttttttggaggtgacacgtggcttcacgttctataaagaataggccggggatcaagaaaaagcatccttccatcggcttccttgcggtgttcacggtctttttggccgtgatcgtcgccggcttctcaggcgtctacgccctcggttcgtcgtggatcggcgaccttgaggactacgacgtgtccgatgccggccagctcaactcgtcgctgccgtcgatcatgctggcgtcggacggtacggagctcgcccgcttccaggtcgagtaccgcgaccccgtcgagctcgaccagatcagcgagtacgtgcgcgagggcaccgtggctaccgaggacgagcgcttctacgaacacggcggtttcgacctcgcgggcatcgcgcgcgcggtgtacgtgaacctcaccggttccggcaaggagggcgcgtccaccatcacgcagcagctcgtgcgcaacactatcctggccgacgagatgaacgatatctcgttcaagcgcaaggtgcgcgagatgtatctctccgtcaagttggaggaacagtactccaaagacgaaatcctgctcatgtacctcaataccatcaactacggttccggcgcctacggcatcgaagccgcgtcgcagcgctacttctcgaagcatgcaagcgagctcacgctggccgaggcggccgcgctcatcggcattccgcagtcgccgacgtacaacaatcccatcgaccatgaggacaactgcctcgcgcgtcgcaacctcgtgctggatcgcatgctgacgaacggctacatcacccaggaagagcacgatgccgcccaggcggagggcatcgtgctcaacacgaccgagaccacggtggatggcctggagaagtatccttacttcagcagctacgtgcgcgacctgctcatggatcccgacggcgactaccgctactccgaggacgagatcttcaagggcggcctgaccatccagaccacgctggacgtcgactcccaggaggccgccgaggccgccatcaaggagaagcgggagagcctcgatccggccatcaacggcgcgctcgtggccatcgagcccgaaaccggctttattaaggcgatggtgggcggcgacgactgggagaacaacaagctgaacctggccacgggcgagcgcggcgttcccaatccgggccgtccgtccggctcctcgttcaaggtg

SEQ ID NO: 9354 - DNA, 1294 bp, Unknown
  gut microbiota DNA sequence
tcgttattccgacgatgagctgttcaaaggcggcctgaccatccagaccacgctggacgtcgactcccaggaggccgccgaggccgccatcaaggagaagcgggagagtctcaatccggcgatctacggtgcgcttgtggccatcgagcccgaaacgggctacatcaaggccatggtgggcggcgaggacgacgagtgggctactcagaagctgaacctggccacgggcgagcgcggcgttcccaatccgggccgtccgtccggctcctcgttcaaggtgttcacgctcatcgcagcgctcgaagcgggcatcagcccgcagacgatggtggactgctcgtcgccggccactattcccaataccgagtacggctccaccatccctccgctggagaacatcaacaactacaactacggcacccgttccattcagcgcgcgttcgccgtgtcgtccaacacgggcttcgttcgccttgagatggccgtgggcatcgacaaggtgatcaaggtcgccaaggacatgggcatcacctccgcgctcagcgcgaacccgtcgctcacgctgggccagtcgaacgtcacgatgctcgacatggccagcgcctacgctgtcattgcgaacggcggcgtgcgcattgatccaacgcccgtcctcaccatcaccaactcgaagggcgaggtgatcgtcgacaacaccacgcccgacacctcgctttcgaagacgcatcgcgaacaggtcatatcgcctgaagtcgcccacgcggccaccgaggtcatgaagagcgtggtgaacacctccgagggcaccggacagaaggccgctctgccgaacggccaggtggtcgcggcgaagacgggtacgagcgaaagctacaaggacatcacgttctgcggcatcacgccgcagctggccaccgccatttggttcggcgatcccagcaaccaggtgaccatccctaccagcacgggtgcggacgacgtcttcagccgcttcatgagcgcggtgctcgacggccagccgaccgagcagttcccgcaggcggccgatcccacgtacaagaacttctccgatccgacctaccatgtgggagggtccgctagctcgtcgaacaccgacgacgagaaggatgacgagaagaagaaggacgccgaggacaaggacgccgacaagggcaaggacgatcctgcgccgacgccgacgccgacgcctactcccacgccgacgcccacgcccgatccgactcctactccaacccccgatccgacgccgaagccggatcccgatccgacgccc

SEQ ID NO: 9355 - DNA, 878 bp, Unknown
  gut microbiota DNA sequence
gacgcctactcccacgccgacgcccacgcccacgcccgatccgactcctactccaacccccgatccgacgccgaagccggatcccgatccgacgcccactcccacgccgacgcccgaccccggaggcacgacggacaagccggcaagctaggttgcggacccggaaaccgttccgatacgaacgcgtcgcatccccggcgcgacggcgggcgaaccgctacgatagttcaacgatgattcgatgcaagagagcaggtacgacatgaaacatacgagattcgccaaggtgctggtcgccatgttcgcaggcgtcttgatggtggcggctctgggcggatgcgcgcagcaggatacggcggccgcgcaacagcaatccgagaaccgtcagtacatgactcaggtcaaccaaactatggacgacctgaagagccgtctggagagctttaccgatgcggtatcgcgcggcgacgtggtgggcatgcgcacgcaggccgacaacgcgttcaaggctatcgacgacctgaacaacctcaacgtccccgacgccctcaaggatatccagaaggagtacgtcgacggcacggccgatctcaaggacgcgctgaactcctatatcgacctgtatacggaaatcgacagcgccaccgaggaacagcccttcgactattccacgtacgatcagcgcatccaggatatcaagtcgaagtacgacgagggcatcggcaagctccagtcgggcgacaacaaggccagcgagctgccggaataacctcgactgacacgcacactgctttgagcggcggccctttcgggctgccgctttcgcattcgaccacgcttgcgtccgctcagtcgtattgccgggttttcggctgccg

SEQ ID NO: 9356 - DNA, 6642 bp, Unknown
  gut microbiota DNA sequence
gacgcgcgcccgcattctccggtcgacccgccgtgcgacccaccggaaccggcatgcgccccgcccgcgcgccaggctatcgcccgcccctcgcaagcttcaaacgcccttcccgcctcataccgtctttatattatgctcaattgataataattgcgttttagtatatattgatttaaatattattctcatttacgaatgttaaaggacgagggcaatagaagctgttgaagacatgctggaggatggggacggtgcttccggcgctatgagcgccggaagcaccgaggggccggcccctcggccgcgcgacgataaggcggcggctcaatgcgcttcccgccgaagcgcgcggcatggcacgctcatcctagtcgcgctcggcgcgctcgtcctggcgagcacgctggcctcgctcatgctgggccgctaccccatcaccccgatcgaggctgtcggcatgctggccaacctggcgctccccatcgacccgttctggacctcccagcaagagacgctgttcttccaggtgcgtctgccgcgcatcgtgctcgcgctcatggtgggctgcagcctggctactgccggcgccgcctaccagggcacgttccagaacccgctcgtctcccccgatatcctcggagcttcgcagggcgcggcgttcggcgccgcagtggccatcctgctgggactcggctcgctcggcatctcgctgttcgcgttcgcctgctccatcgccgccgtgctgctggtgctggccgtcggcacgcgcgccaagggcaaccatctgctcatcgtggtgctggccggcgtcatggtcagctcgctgttccaggcgggcgtgtcgttcaccaagctcatcgccgaccctaccgaccagctggccgccatcacctactggctcatgggcagcctcaccggcgccaaatggagcgacatggctttcgcgctgcctcccatcgcaatcggtctcgcggcgctgttcgccttgcgctggcgcatcaacgtgctcaccatgggcgacgacgaagcctccaccatgggcgtgaacgcccgtcgcgtgcggctcatcgtcatcttggccgccaccctcgtcaccgccgccagcgtgtcaatctcgggcatgatcggctgggtaggcctcgtcatcccccacttcgcgcgcatgatcgtcggctgcgactaccgcaagctgctgcccgccagcatgctcatgggcgccagcttcctgctcatcgtcgacgacgtggcgcgcctcgtggccagctccgagatacccatcggcatcctgaccgcgttcgtgggagcgccgttcttcctgtacctcatcacgaggaggaagcaggggctatgagcatcgatgtcgagcacctcagcttctcgtacggcagccaccatgtgctgcgcgacctgagcttccgcatccccgacaacacgctggtgaacgtgctggggcccaacggcgtaggcaaatcgaccctgttccgatgcatcctgtgcctcaacaacagctggacgggcagcatccgcgtgaacgggaaggacctgcgctcgatctccatccgcgagcgcgcgagcgaggtcgcctacatccctcaatcgcattcgtccacttacgcctacgacgtgctcgacgtggtgctgatgagcgcgggcggcgggataggtttgttctccacgccgaagcgcatgcacgtcgaccgggcgtgggatgcgctcgagcgcgtgggcatcgcccatctgggtcatcgcccctacacgcagatatcgggcggagaacgccagctggtcctcatcgcgcgcgccatcgcgcagaacgcccgcaccatcatcatggacgagcccacgagcgcgctcgattacggcaacaccgtgcgcgtgctgtccaccgtgcgccagctcgcgcgcgaaggcatgagcatagtccaatcgacgcaccagcccgatcaggcgtttctttacgccgaccaaacgctcgtcatcaacgacggacgcgtgcacgccttcggaaaccccaaagacgttatcaccaaggagctggtcagcaccatctacgacgtggacgtggaggtcaattccctatacggcgacaaggtgcgcgtgtgcgtgcccgtacgcgagatagagcggtaaacgcaaggcaacgaagtcgaagaaaggaagattctatgggagggaccatcgcaaggaacatgtcccgggcgaaacgcctgctggtcgtaggcgcgctatgtctgggactggcgttcgcgctgaacggatgctcgcaggctccgtcgcagaacgcacccgaaagcgccgacggcgccgcgcaaaccgatcaggcggcgcagaacgagacgcgcacgttcaccgactcggccggacgcacggtggaagtgcccgcgaagatcgaccgcatcgcgccggcgggccacaccgccacgcaggtcctgcttacgatggcaccggacaagctggtgacgatctcgacggagctcacggccgaccaggcgaagtacctgggaggcgactacgccaacctgcccgtgacaggagccgcgttcggagcgaaaggcgacctcaacaaggaggccgtcgccgcatccggtgcgcagatcctcatcgacaccggcgagatcaaagacggcatgaaagaggacctcgacacgatgcagcagcagctgggcatccccgtagtggtcatcgagacgaagatggaggactacggcgcagcctacgagaagctcggcgagctgttgggcatggaggatcgcggcaaggagctgtccgactactgcaaggccgcctacgacgagactgtatccgtcatgagcaagattcccgagggcgaccgcgcgaaggtggcgtacctgctcggcgacaaggggacgaacaccatcgcgaagaactcctaccagggccaggtgatcgacctcgtggccgacaacgtcgccgacctgggcaaggtgtccggcagcggcgccggcgtcgagatcggcatggaacagctggctatctgggatcctgcggtcatcctgttcggcccggacagcatctacgacacggtgggctccgatgcggccttcgccgacctgtccgccgtcaagaacggctcctactacaaggtgcccggcacgccgtggaactggctgaacagcccgccgacggtgaaccaggtgctgggcatgcagtggctgccgcgcctgctgtaccccgagcagtacgacaacgacctgcacaagacggtcgcaggctacttcaagacgttctacggctacgacctgagcgagtccgagttcaacgagatcgccgcgaacgcgcagcccaaggcatagggcaccgcatcgatcgcacgtccacggaaagcccggcgcgcgccgggctttcctgctatgatcaacgaaaaacggtacgaggagatgcatatgggagagaagatcatggacggtttcccgtcgcgcgaagaggcgctggccgacttcttcgcagcatgggagccggcgaggagcgtcgagtacgtggcgctcgacgacgcggtgggacgcgtgctcgcctgcgacctggcgtcgacgaacacgctgccggtggtgcgcgcctcgtcgttcgacagcatcgcggtgaagtcggcagcgttcgcgaacggcatgcccgacacaagcagctggaagcccggcgtggattacgtgcgcgccgacaccggagacgacttccccgacgcgttcgacgccgtggtgatgatcgagaaggcggtcgttcgggaggacggatcggtaacgttcgacgacgacgtgaccgtcgagcccggttcgggcgtgcggcccgccggctccacgctgcgcgcgggcgagccgctcatgagcgccggcagcattatccgacccaccgacctggccgctctcgccatgggcggcgccacgatggtgcccgtgcgcgtcaaaccgcgcgtggcgttcattcccacgggcagcgagctcgtacccgcaggcatcaagccccgacgaggtcaaaacgtggacacgaacagcctcatgtgcaagcacctcctcatcgagtacggtgccgaacccgtggtgttccccctcgtgcacgacgatcccgtcgagctcgaacgcgccttcgaggcggcgctcgccaccgccgacgtcgtggtggtcaacgggggatcggccctcggcgaggaggatttcaacgtgaagctgatcgaacgccgcgggcaggtggtgcaccattacatcgccgccgtgccgggacggccgctcatgctggccgtagccgacggcaaaccggtcgtcgatctgcccggccccaccatggccgcctacttcggctccgaatggtgcctgcaagcgatcacggcgcgcatcctgggaattccgctgcgccgccgccccgtcgtgcaggcgcgggcggatgccgcgaagacgagcatccccaagatggcgaacatagcccgcgtacacgtgacgcgcgacgacgagggctacgcggcacacttcctcgatttcaaagccggggagctggccgcgtgcatgacgtcgaacgcgcagcgcgtctcgcccctcggcgaagcgggatgggccgaaggcgaccttttggacgtggagttgctgcgcggcgaggagttcgtcgatcaaggctagggcgcgcctgaagcggccccaccgatgccgttgtcgcccgaaagccgcgcttcgagggcgaaaaccacggctttcgggcgacaacgcgcgcggatcgtccctggacgcacgaacgcccggtcatcgaccgggcgttcgctgtgcttgcagcagaagcgctattcggcggcaggagcctcttcgacgagagcgtccaccgcggcggcctcctcggccgtagcctcgggcgcggtctcggcggcagcctcggcctcggcggccctcttagcctcggcctcggacttcttggcgaactcctcggcgcgcttggccttctcggcggccttcgcctcgcgctcggccttcttcttggcctcggcctcggcgatagcggcggcacgcgcggccttcttggcggcctcgcgctcggcaacggtctccttcgcggcaccgaacttgtcggcgaagcgctggacgcgtccgccggtgtcgacgaagcgctgctggccggtgtagaacggatggcacacgttgcagatgtcgatcttcagctcaggcttcgtcgaacgggtctggaacgtgttgccgcagctgcacttgaccgtgcagtccacgtactccggatgaataccctgtttcattatggttctcctttacgggccttggtttccgaccaaggcgaagacaagcctttgcactatagcacagtcgacgccgcaacgcacgcgttttctccggaaattcccaacctaagcgaggaacgcctcgttcaccggaagatggtacgcctcggcgatgccgcgcaggccctcgtcgggaatggcgctggcgaaccggtcgctgccgccgttcatcgcgcgcgcctgcgcgtagacggtcgcggccttgtcgatggtctgcgccaacccgaacgtcgagtcgaagtcgttcccagcgcagaacagaccgtggtgagcccaaacgcatgcgtcgtagacgcgcatggcgtcggccgtggcgctggcgatctcagggccgcccggcaccatccacggcactactccgatgcccttcggaaacgcgatcatggcctccatcagcatcttccacagcgcacgggtgaacgtgcgcgcatcgagcggcagcacgttggtcagcgccaccacgtttgcgggatgggcgtggtacagcacccggcccgtgccgccggtcgcctccctgcgtaccgactggatggctacgtggctggggaactcgctcgtgggcacgccgccgttcttgaaaccccacacgatgcgccacgcgtcgcccgcggcgttgacctccacgatgcccgcgcccgtgtcggggtccagcgccacgttgcgcatgtgcgctcccgcggccgtcaccaggaagaactcaccgcccaggttggcgacctgcacgcctagcggcacccacgagctgggattgtcgtagaagaacgagcggctggatgccacgtcctccggcgcaagccggtacgacgcgttgccgccgttgctctcatgccatccctggctcgagccctcgctgcacagacgagcgaaccctttcacgaacgcctgctgctccaccgccacgcccgagacggcgcccttcgccgccgacacgccgcggtcgagcacttcctgcgcattgtcgaagaaacccatggtcaactccttatccgaagcctatcgtccgttatccgccgcatacggccggcaccgtccgccgcggcctatagcccgccgtcgccttcgccgggacgtatctgcacgacgtacatcacgttggtggcggccgccgcgccgtcgcccggctcgccgatggtgggactcgtggagggatcgcccgccgtgaacaccgcgaggtcgcccggtcgcacgagcccgttctccaacacggcgtcgtgcgcctgctcgacgacgtggcgcatgtcgccctgcacgtcgccgagcatgggggtcacgccccagttgagctgctgctggcgcatgacgcgcggaaacggcgtgaccgcgaggatgggcacgcgcgggcgcaggttcgacacgag

SEQ ID NO: 9357 - DNA, 11488 bp, Unknown
  gut microbiota DNA sequence
ctgcggtcgggcgcgcgctcgtcgaacaagtagggctcgctcgactcggcgatgcgcgccatcatgcgcacggcctccaccgggtagcgcccgccggccgtctcgcccgacagcatcacggcatcggtgccgtcgtagatggcgttcgccacgtcgcccacctcggcgcgcgtaggacgcgggttgcgtatcatagagtccagcatctgggttgccgtgatcaccggcttcgacgcacggttcgacgcgcggatgatctccttctggatgtgcggcaccttgtgagccggcacctccacgcccaagtcgccacgcgccaccatcacgccgtcggccgcttcgatgatgtcctcgaagttctccaccgcctcggcgcattcgatcttcgcgatcaagcacacgccctcgccgccgtgctcgtcgaggaaacgccgcaactcgcgcacgccctcggcgttgcgcacgaacgaggccgctacgaagtcgacatcctgatcgatgccgaagacgaggtcggcccgatcctggtcggtcatcacgggcagcggcacgctggcgccggggatgttgacggacttgcgctcgcccaacagcccgctgttgcgcaccgtgcagcggatgtccgagccttcgaccgcctccacccgaagctcgatgagcccgtcgtccagcaggatgggctggccgggcccgacgacgcgcgccaaccccgcgcaggtttgcgagaccagctgcgccgtgccgtccaccacgcgctcggtgagcacgagggaaccgccctcccgcagctccacgggacgtccgcccgcaagcgagcccgtgcggatctcggggccgcgagtatccagcaggatggcgcacggcgagccgaggtcgcgacgcacgcgtttcagcagatccatgcgcgcccggtgttcgtcgtgcgagccgtgcgagaagttgaaacgcgccacgtccatgcctgcggacagcagcccgcgcagggcggtctcgtcgtcgacggcaggtcccagcgtgcaaacgatcttcgtgcgtcttgccatgctcctcctcgatcgcgcccgttccatgggatccatcataccgtgaaatccccgcgagcccccgtcgcgccaccccaatccgacgagtctgcacacaagcgcggcgtctccgagcggcaacgggcttcgaagccgccttcggatcctcgcgcgctgcgcgagatccttcgactcgcttgcgcgcgcccaggatggcgaacggagatccgctaactcaggatggcggcatgcatgctcttcccttccgagcagacgtcccgaccgcacgcctggcgcatgacctcccgagaaacgtctcgccccagggatcgcacgccccgtcggacgacctcccaagcagcttgcagacgcacggaggctcccctgatggcgaaaaagcatcgaattcggaagaaatcgagcgccccgatgagaccctgcgcgcggcggcgaaagaagagacgcccgcgaacaggagcgatacaggaggaggcctcccgacgaacccgcagcaccgtcggggacttccgaattcgatgctttttcgccatccgaggagccgtcggaagctcggaggccatggcgcgcgggcgagacggatgcggggatgggccgctcgggcggcaagcgcgacgcatggtgcgaaccccgcgcagccgcgccgcgcgggcaaaacgccaaacgcgaccgaacgagtgcctaaacgcccattcagcacaaatgtttcacgtgaaacatccgcagcggtaacacgcgcgccgaccgcaacgcaaacgaaaacgcccgccccgcgaagcgggacgggcgcgtcatgcgcgaaacgcagggccgtctacacctcagcgacccaaaggccgtgcaggttgcagtactcgtacaccttgagagcctcatcgccttcggcaatggcgaagtcggcgacgggagcatcctccggcgtcagctcgacgatctggtagccgttcttcgtgaccaggcagatgaacgtgatgtagtgctccggagtcatgggatgcagcgtgctgcccacctcgacgtgcacgttcgagccgtcgacgcgcaccacgggcacgtgcttctcgaccgcggcatcggtggtattggcagtgagctcggtcatcttctcgccacagcacaccagcggcacgcccgcgtcgaacggcttgatggcgatgttgccgcagtgcatgcacttgtagaacttgagatccatgggaagtcccccttcgtcgtctgataaaacttgcagccaatatgatctgttgccagtttagcttcgcccggcaagcaaaccgttaccgcaggcaaggttgccgccgaaccgtaaccaatcgcacggcttagcgagtcgaagcctcgaggagccgtgcgttcgattcccttatatgttactcagattgtttcatttcaggaagccctttttggggctttttcacgacaagcgcataaaccagcacgccggcgcccacgaggatcagcggcaccgataacagctgccccatggtaagccagccaccccatagatagcccagctgcgcgtcgggctcgcgcacaaactcgacgaggaagcggaagcatccgtacatgacgaggaacgtgcccagaaacgtgccgcgcggacgcggcggcatgcgtcgcgacagcagatacagcacggcgaagatgacgacgccctcgagaaaggcctcgtaaagctgcgacggatggcgcggcatcgtgcccgcggcgcctccgaacaccacgccccaggcggcgtcggtgggcgcgccccacagctcgccgttgatgaagttcgcgcagcggccgaacagcaggcccagcggcgcgccgatgcagccgaggtcggccaacgtgaggtacgggatacgagtgagcttcgcagccgcgatgcccgccaaaagcgcgcctataagcccgccgtggaagctcataccgcctttgttgaacgcgaggatctgctcgggatgctggaaatagtacccctcgccgtagaacagcacgtaacccagccgtccgcccacgatgacgcctatgatgacgcagaacatgatggtcagcagtgaatccgcatccacgcgcacgcgccagcggcgcgcgacgcgccagatgacgaggcccgcgaaaacgaagcccagcacgtaggcgacgccgtaccagcgcacggtgaacgggccgaacgcgaacaggacgggatcgatggattggtagatgtcgttgagcatgtcgttccttcgcagcccgcgcggcacgggcattcggttgtcgttcgaaccgcatagaaaaaagttccgccggcacgatgccgacggaaccgctactcaaggcccatgccggcgcccacttcgagggcggcgaaccgcacctcctcgtacagctgcggcggaatgggctgcatgctggacacggtggctttgcagtgcgggcagcgcagcgtgaacatcgcgagatcggcgcgcaccaccatcatggactcataacggcacacgtccaaaccgaccgccccgcacgcaggacaggtcacgcctttgctcataggttcacgctcctctcgcttcgtcgcccgccttccttcgtcttcattgtagcagaactcgtcgagcgcgctcccgcgattggaaacgccccggcaacgcaggagaggctcctcacgacccgacgacgcgctccaggaagaaagcatgcacgcgggaatcgtcggtgagctcgggatggaacgccgcggccagcgcgcggccttcgcggacggccagcggctcgccgtcctcggacgtgctgagcacctccacgccctcgccgagatcggcgaagcgcggggcgcggatgaacacgcccttcaccgggtcgccctcgatgcccgcccacggcaccgtcgtctcgaacgagtcgatctgccgcccataggcgttgcggcggatacgcacgtccatcagcgccaacggctcctggtcggagcgggccccctcgatgtcgcgcgccatgagtatagcaccggcgcacgtgccgaacacggccatgccggccgcatgcgcggcgcgcaacggcccgtacatgccgtggatggccagaagcttcgcgatggccgtggactcgccgcccgggatcaccaggccgtccagcctttccagctcggatggccagcgcacgaggcgcgtgtcggcccccaggccttccagcatccgccgatgctcccggaaggcgccctgcaaggccaggacgccgatcgtctttctcacaggttccattgacacctccctggttggcgtagtaagtcagcgaggggcgccgaggcgccccgaattcgtgggatggcggaggcgccgcgtacttcggtacgcaaaccttcgacatcgcgcgaaggcggggcacctcggtgcgccgcagcgtcgagcagttccggcggctggcaagccgccggaacccgccttaccagccgcggccggccatgagctcgttctcgggaatgtccgagatctcgatgcccaccatggcctcgcccagatcgcgcgagacgcgggcgatggtgtcggggtcgtcgtagttcgtcgtggcctccacgatggcccgggcgcgcttggctggatcgcccgacttgaagatgccgctgcccacgaacacgccgtcgcagcccagctgcatcatcagcgccgcgtcggcgggcgtggcgatgccgccggccgagaagttcaccacggggaggcacccgtgctcggccacccacttcaccagctcgtagggcgcctgcaggtccttcgcagccgtgaacagctgctcgtcgcgcaggcccttgatgcgggcgatgtcggtggtcacggtgcgcatgtggcgcacggcctccaccacgttgcccgtgcccggctcgcccttcgtgcggatcatggccgcgccctcggcgatgcggcgcagagcctcgcccaggttgcgcgcgccgcacacgaacggcacgtcgaagtcccatttgttcacatggtactcgtcgtcggccggggtgagtacctcgctctcgtcgatgaagtccacgcccaggctctgcagcacctgcgcctccacgaaatgcccgatacggcacttcgccatgacggggatggacacggcctccacgatgccctcgatcatggtggggtcgctcatgcgggccacgccgccgtgcgcgcggatgtcggcgggaacgcgctccagagccatgacggccaccgcgcccgcgtcctcggcgatcttcgcctgctcggggttcacgacgtccatgatgacgccgcccttcatcatctccgcgaacccggtcttcaccttcagcgtgccgtgagcctgctctgccatcgtctccctttcgtcggttctttgctggtatgggggtagcgcgcggccgcgcagatgtcctgcacggccgcggttgctcgctgcgattgtcgcgcgctcctcgcggatgcgcgcgtttcgaaccggttcgccctgctagagcagaaaccggttcggattgccctgcctcgtgacttcgccagtgcgctcggccacgccagggccgtgctccaggaagtgctcgcagaagcgacacacctccttgacggccgcgtcgtaatcgcgctcgggattcagcagcttgttgaaatcctggcacacctcgtgcgtcgagcgcgtgcatgcggcgaagcggcaatcggcagggcacggctcgcccgggatgttgtgcgggcagcgcgacatcatctcctcgtcgcacccgcggcgttcccaacactgcgccatatccgcctccttcgccttcgaaatcgatccggtttacaggtcggccggaacgaccttcgtcacgccgggaacgcgctccttgaggatgcgctccacgccgttggccagcgtcatctgggacatggggcagcccttgcaggcaccctgcagctccaccgacaccacgccgtcctcgttcacgtcgacgaggcgcacatcgccgccgtccgcctgcaggctggggcggatgagctcgagcaccgccgccacatcgttcttgtctaccatggtaaagctccttcgttgaacttgaacatcttgctttcaggtgccgattctaccacagtctacgatgtgggcttccaatccttgccgagaaccaccaacacgtcggtatcgaacgtgtagaaacccgccccgggcaccgtacggcccaggccgagcgatgccaccacggtttccgccgccgcctcgaacgcgtcgtcgttgtacacgacgagcgtctcgtcgtaaacgtacgtgtcggtgttgcccgtctcggtcacgtcgaagccgcggtctttcagcgcgtcggcgatctggccggctccgcccgtcacgcccgagccgttgcgtacggtgatggtgaagctgcccggatccacctggggcgccgtttgctccaccacgggctcggaaccggccgccacgagctccatcatgctcttccaggcatcggaagacaccgcatacgagctcgcgccatcgcgcgcggtctcgtagccgggcacaagcgccccgtacaccgaggaagagtccacaccgcgaagcgcatcggcgacggaaagcgcggccgcagccgaaaggtcggtctggaacgaccctcccacgttgtcgagcgtggcgaggaagctcagccgcccttcccccagaaggcgcagcgacagtgccgtgagcagctcgcgctggttcgccgcctggacttcgaggccgttcgagaagttgctggcgcgcaaaaacgtgagcgcctgcgcgccgtcgagcgtctgggcgcccgccggcaggtaggcatcgcccgcgttcgggtcgtccacctcctcggccacgttcacctcgacgccgccgaggacgtccacgaggcgcacgatggattcggcgtcggtcttcacgtaatgagccacgttcacccctgcgaagtcggccacggccgacacgagcgcggcatcgccctcctgcgtcgaagcctcacgcagcgggtgcttcttgccgtccttcagcgatacctgcagcgtaggcggaatcgagacgacggtgacggcgcgggtctcctcgtcgacgcgcaccagcgcgatggcgtcggggccgtccgtcgcattcgccgagcccggcgcatcgaggtcggccgacaccaccgtgtagaacgccttcgcatcggccttgggagcaacgagcgccgacgctgcatcggaatccttgagcccgagcttcgcatcgagcgacccgaagaacgtcgccacgccgacggcggcggcgacggcaaccgccacgagcaggcagaccgcgatcgcgacgatgcggcggatgcgcgccttacgttggatgtcctgggcgaattcgcgacggctgacgcgacgggcgtattgcgacgagctctcgcccgacgatgtgacgggcagaatagtttccacgatgccgcgagccgcgcgcttccttttgcgcgggctggagaatcccaccgcctcgccgttcatatgacgcgacgagcgtcgcggcacatgggtgccgaccgttgccgacctcatgcgatgcgacgtaagtttcgcacgagcctgcgtcaggccctgcttgcgtttgttgaccatgggagctcgctaccgggacgtctgggcttgctcggtttcagcgcgcacgacatcggcgccgagagcgcgcagcttgcccacgtagtcctcgtaaccgcgatcgatatggccgatgttgtgcacgcgagtctcgccctcccccgcaatgccggccagcacgagagccgccccggcgcgcagatcggtggacgacacgtcggcgccctgcagcacgtccacgccgcgcacgagggcgtgatggtcctcgatggcgatgtccgcgcccatgcgcatgagctcgctggcgaacatgaaacggttctcgaacacgttctcggtgatgacggacatgccgtcggcgaacgcggccagcagcatgaactgcgcctgaaggtcggtgggaaacccgggatgcggcagcgtctgcaagtcgatgggagccagcgggcgcgtgcggcccacggtgatccagtcgtcgcccgtctccacgtcgcagcccatggcgcggagcttcatgagcgcaacgcgcagatacgacggatcgatgccgtgcacggtgacgggaccgcccgtcagcgcgcctccggccaggaaggtgccggcctcgatgcggtcgcccaccgtcgtgtgctcgcaaggatgcagcgaagaaagcggcacgccctcgacctcgatgatgtccgagcccgcgcctgtgacgcgcgtccccatggacacgagcatgttcgcaagatccacgatctcgggttcgcgcgcggcgttctctatgaccgtggagccctcggccgccacggcggccatgagcaggttctcggttgctcccacactggggaagtcgagtacgacgtgcgcgccgtgcagcccgttgggcgtgctggcctcaaggaagccgtggtcgatggagaactccacgccgatagcctcgaggccgacaagatgcatgtcgatcttgcgagcgccgatctgacagccgcccggcatggccacgcgggcgcatccgaagcggccaacgagcgggccgagcaccgagatgctcgcacgcatcttcgacaccagctcgtagggggtctcgtgcttgtcgacggcggaggtgtccaccgtcagcgtatggccgtcgcgctccacccgcgcgcccaaacagcgcagcacgtcggacatgatgctgatatccgagatgagcgggacgttatggatggtcgtttccccctggcccagcaacgcggcggcgatcagcttgagcgccgagttcttcgcgcccgacacggcgacgtcgccggccagcgtgttgttgccctgtacgatgatgatctcttcagccatggaagcatcctccgcgcccgcgacgacgagggtccgggcgttggtttcattgggtggcggacgccgtccgaggcgcccttcgcggtacccaccattataagaacagggaggctgcgcgcccaccatcatcacaacgaaagcagaagggccgatagctgctggtaccgaaacgaagaacgcaggttggcgcagcaagacagcgagaagccccctcgtgccgatagtcggctcgtttcgcggctgagcgtacttcggtacgcgaagacaagcgaaaagagccgaggatcggtgcgagggggcttcgcagcgtcgagcggttccgacggccgtcaggccgccggaacaaaactattctcccagcacgaagcgcttgaagtcgacgatcttgatctcgccgcccaggttcttcgcaacctcggccgtgtagtcgttcacggactggtcggggttcttcacgaaggcctgctcggtcagcgtgctctccttgaagaacttctccagacggccgacggccatcttctcctggatggcctcgggcttgccggactcggcggcctgagccatgtagatggccttctcgtgctcgacgacggccgggtcgacggcctcgcgggtggcggccaccggagcggcggcggcaacctgcatggccacgtcgcggccgtactgcttgaagccgtcgaacgcggggtcgatgccctcgacgtcgaactgcacgagcacgccgatcttgccgccgccgtggatgtaggacgacacggcgccgccctccaccaccgcgaagcgggcgagctggatgttctcgcccagggtgtggatggcgtcggtgacaacggcttccaccgtctcgccttcggcgtcggcggccttgagggcgtcgaggtcggcaggcttggcggccagggcggccttggcgatcttctcggcgtaggccttgaacttgtcgttcatgcccacgaagtcggtctcgcagttcagctcgacgaccgcgccggacgtggcgtcgtcggagacgatggccatgacggtgccttcgttggtggcacggccggccttcttggccacggcggccagaccgcgcgtgcgcagcacgtcgacggccttgtccatgtcgccgtcggcttcgacgagcgccttcttgcactccatcatgccggcgccggtcatttcacggagttccttgaccatggaagcggtaacagcagccacgttgttcctttctctcacgatgccgcggccttgggacgcggcggggtgtcgagcgccgcagcgcgggaagggcgcgacggcgcgttcagtgcggtagatgcgcagatcagcttattcggcggcaggggcagcggcctcggcgggcgcggcctcggcggcaggggcctccacggcggtagcctcgacggcgacctcgcccatgtcggcggcggtcaccggcacgcccacgccggcgatgacggcgtcggcgatgaagtcagccagcaggcggaccgagcggatggcgtcgtcgttggcggggatgccgaaatcgacgtcgtccggatcgcagttcgtatcgagcgtgcccaccacggggatgtcgagacgacgggactcatggatggcgatggcctcgcggttcgtgtcgatcacgaacacggcgtcgggcgtgcgcttcatgttgcggatgccgttgaggttcgtctgcagcttggacagctccttgtgcagcaggatctgctccttcttgggcagcacggccatgcggccgtcggcctccatggcctccagctcctccatgcggttcacgcgggagcggatggtcacgaagttggtcagcatgccgccgagccagcgagcgttcacgtagggcatgccgcacttgttggcagcgtcggcgacggcctcctgggcctgcttcttcgtgcccacgaacagcacggtgccgcccttcttggccagctcggacacgaacgtgtacgcctggtcgaggcccacgagcgtctgcttgaggtcgatgatgtagatgtccccgcggctgccgaagatgtacggcttcatcttggggttccaacggcgcgtctgatggccgaagtggctgcccgcatcgagcagcgaagtaatgctgactttcgtcatgactctctccattcgttagtcctctgcttgcggtcatccccgagatccgcagcctttttcagttggccactagcggatcgggtcgcgcaagcatgcgtatttagaaactgcagaagtataccacgcccccgagcgtttgcaagcggaaagcgcaaaaggacgcagttgtgcgcggttgcccacaactgcgagcggatacggcgaattcgcggccggccgacggcggcgcccacgttcaagccgaagacgagctgcgcaacgagatcaggcgtcagtacgacgccctcaaaggagggattggatcgtgaaatcgggggcgccgttgtagaaggacacgtcgacgcggcgatccatcatgacggagtggacgagcagagcggccgcggcggcgaagcaagcgaacagcgccaacggcacgaacgagaacatctgaatcgattggagcatgccgggcatgaacatgcccaagacgagcagcgcgacaccgccgccgacgcc

SEQ ID NO: 9358 - DNA, 152 bp, Unknown
  gut microbiota DNA sequence
acggccggccgacggcggcgcccacgttcaagccgaagacgagctgcgcgacgagatcaggcgtcagtacgacgccctcgaaggagggattggatcgtgaaatcgggggcgccgttgtagaaggacacgtcgacgcggcgatccatcatgac

SEQ ID NO: 9359 - DNA, 151 bp, Unknown
  gut microbiota DNA sequence
gaacagcttccgacggcgcgcttccgccttctcctccggcgtgtagcagtcctcgaccaccggatactccttgcgaaacgccgcatggctgcgatacgccggaacgaaaaagcacaggccgagcgcgatccctacgaggtggacgacgatg

SEQ ID NO: 9360 - DNA, 2055 bp, Unknown
  gut microbiota DNA sequence
ccgcatcttccgacggcgcgcttccgccttctcctccggcgtgtagcagtcctcgaccaccgggtgctccttgcgaaatgccgcatggctgcgatacgccggaacgaaaaagcacaggccgagcgcgatccctacgaggtggacgacgatgttcgccgaaaccgtcgtgctgttgtaaccgccgcctgtcacgaacatcgccaccccgaagctcatgacgatcaccgccacgctcgcagcgacatcccacgcacggcggcgcatgtgctcgtcgtagccgtccttatcgacaggcatggctgcggaggctggctcggcctccacgatcgcctcgctcgccgtcgcgcagccggttaagtcgccccgtacgaggtcgtcgagcgagcactcgaacaggtcgcacagcttgatgagcttgtccatctcggggtagcttttctcggcttcccacttcgccacggactgacggctcacgccgagcagcgtcgcaagctgcgcctggctcaaatcgcgcgttccgcgcagatgctggaggttgtctcggaagctcataggattctcctctcgcttgccttctccctacagcatgcaccgaaaccgcggttccctcaaccaactttcggatgcttttcacggtttttctcgacaaccggaagttgtcaccgctgcttaccggccggtttgcgcatggcgcgggcgtagaagaacgcgacgagcagccccgccgccgcgatgacgacggctatcgagagggtgtgctcgaacgccgcggcgtacgccgacgccttcgccgcgcccgccgccgtgtccctgagcacgtcggccgacagcacgccgacgaacagcgacgagccgatggccgaggcgatctgcgcggccgtggagttgatggacgcgccggcggagtacgtcgcgggcggcagcgtgccgagcgccgcggtcttggacggcgccaccacgaacccggcgcccgcgtacacggccgccgacgacaggacgatcaggatggcgatcatgctctcggccgagaagaacgccgccgcctgcccgacgagcacgagcacgaggcccgccggtatgagcggccacgcgccgtgcctgtcgaacacccggccgcccaggaacgtgaacgccgcgttgaccagcacggggcctagcagcagcaggcccgcgaagaacgccgtgtaccccaacgccccctcgtagtacagcggcagcaggatgctcatggagaacgacgtgagcatgcccaccatgacgagcaggatgcccacggcgaaccgcgggtggacgagggggtgcaggtcgagcagcgggctctccaacgcgaactgccgccaggcgaacagggcgagcagcaccgcgccgaccgcgagcgccgcgagggagggagcgagatcgcgcgtgacctcgcccaagccgtacaggaacgcggccaacccgagcggcccgagcatcacgctgagcgcgtcgatgggaacgcgcttcgtcgaagggccgccgtggatgcggaagaagccgaccgcgagcagcgcgacggacatggcgagcgatacgacgaacatggcgcgccagccgaactgcgtgagcgcgaagcccgaggccgtcgggctgatggcaaggcccacggcgatgacgccgctgttcaacgcgaggcgcgtgccgcgcaccgcggccggcgagttcgtcatgatgacgctcgtcaccgacgggaagaacaggcccgtgcccaccgcctgcacgaggcggctggcgaacagcatcgggaagtcctgcgagagcagcgcgcacgcgctgccgagcgcgagcgcccccgcgccgacgaagaacacgcgcctcagcccgaggcgcctcagcatgaacgccgacagcatgatggccgtcgccgcgaccaccatgtaccccacgatcacccagttcgcgatggagagcgtgacgccgaagcgctcagccagctcgggcagggcgacgttcatcatgctttggccgaacgaggccgtgaacgagcacgccagcagcacgggcagcatgctcgccacgcttccgcttcgcttc

SEQ ID NO: 9361 - DNA, 605 bp, Unknown
  gut microbiota DNA sequence
cgccagctcgggcagggcgacgttcatcatgctctggccgaacgaggccgtgaacgagcacgccagcagcacgggcagcatgctcgccacgcttccgcttcgcttcttcgcgttgcccatccgaccgcccttcctcgtccgtttcctcgttgcgcccgacgcggcgcggcgacggacgcttcaagtgtagcggcgggaaaggccggccccggaagcgttccgaacacgcaacgctccggtcatacagccgaaggtctgccgttcaaccaccattgacgggtatctggctgcataccaagcggctcctacgggtacgctctagcttggtgaagaggcttgcggacgggttgccccgaagcagagcacactgatcaacgggtgaacgacggttcacgtcaatagtgccgcggcacgcgaatcgtcgagttctaaccaattttttcgttttgcgttcgttcaggggtgcgtgttgtcccgtttaggggacatgctgacccgcagcgatcgaacatgaatcacgcgacctgcggaaacgtaaaaaccactttcgaggatcggtgtccaaggacgcttcgaagcgccaaatcgcgcgcaaaacgaaaaaa

SEQ ID NO: 9362 - DNA, 399 bp, Unknown
  gut microbiota DNA sequence
ccagcgtgacggagggcgtggtcgggcagggcgttccccaggccgaccccgatacgcccgatccgcagcgcgagacgagcatcgacaccgacaagccggcccgctagcgcgcagcgaacaaccaggtatcaaacttcgaaccaggaggttttcatgaaggaacagacatctaccagcaagattctcgacagcatggacgagggcaccaagtactcgacgcccatcttcggttccgaggcgtccgacgtggccatgccgcgtctcaagatgaacgcccagccggtcgagccgcgcatcacgtacgagatgatcaaggagtacctgtcaatcgagggcaacgccacgcagaacctcaccacgttctgccagacgtacatggagcccatggccacgaagatc

SEQ ID NO: 9363 - DNA, 224 bp, Unknown
  gut microbiota DNA sequence
gaatcgaacggcttcgtcacgtagtcgtcgccgccggcgcggaagccgatgctcttgtccacgatgtcgcacttcgcagacaggaagatcaccgggatgcggcggccctgctcgcggatgcgcgcgcagaggtcgaagccgttcgtgcccggcagcatcacgtccagcagcagcaaatcgggatgctcgctggccagcagctccagcccgctttccgcatccct

SEQ ID NO: 9364 - DNA, 265 bp, Unknown
  gut microbiota DNA sequence
agcgttctcggccatctacgccatggcacccgacgtggacgcgcatttcttcgtgggcgactcggccgacactggccacccggaccagtacgtcgagctcgcgcaactgctgaacgctaacgcgcgcaagccggtcggcatcgtcatgggcaaccacgagtactacaactggagcggcagcaagcagaacgcccaggacgcgttcaagacgttcctcgcctcggagctgaacgtgcccggttcgttccaaatgccaggcggtgcg

SEQ ID NO: 9365 - DNA, 179 bp, Unknown
  gut microbiota DNA sequence
tcagccccgcacccttgtttttatctcctcgaatgtgagcgaagcaacatacgatgagctgatcagccaaaatgggatgatttggctttcttctatccctgtcgcgattgccttcacggcaattgccgccgtggtgctcgtgagaatgatacgcagggcggcaaagccgctcgacgctg

SEQ ID NO: 9366 - DNA, 3030 bp, Unknown
  gut microbiota DNA sequence
acgtcgagagattggagagcctgtgtactattccagcggaaactacgaagcattcgcccgcccggcaaagccggagggcatcgaggacaaatcggcctacatcgtcggcaccgggctggcgggcttgtcggccgcgtgctacctgatcagggatgctcagatggacggctcgcgcgtgcacctgttcgaacgcgacgccgaaccgggcggcgcctgcgacgggtgggagtatccccagctcggcttcactatgcgcggcggtcgcgagatggacaaccacttcgaagtgatgtgggacctgttccgatccatcccctccatcgaggacgagaacatgagcatcctcgattactactatcaattgaacaagcgcgatcccaattattccctgtgccgcgcaacggtcaaccggggtgaagacgccggcctcgacaatacattcaacctgtccgacaaggcgtgcatggagatcatgaacctgttcttcacccccgaagagcaactcgacgacaagcccataaccgactatttttccgacgatgtgctcgattccaacttctggctgtactggcgcaccatgttcgccttcgagaactggcacagcgcgctcgagatgaagcgctacatccagcgtttcgtccaccacgtcggcgggctccccgacttcagcgcactgcgcttcacccggtacaaccagttcgaatccctcatcctgcccatggtgaactacctgaaaggccagggcgtgcagatccatctgaacaccgaggtcgtcgacatcacgttctccagcaccccggagcgcaaagtagccaccgaggtgcagacgatatgcgaaggggccgacaagacgtttcacctcaccgacgacgacctgctgttcatcaccaacggcagctgcgtcgccaattcgtccttcggatcgcaagacgagccggcccagttcaacgccgtgctggaaaaaggaaccgggttcgacctgtggcgacgtatcgcacggcaggattccgcattcgggaatccggaaaaattcatcggcgatccggagaagtccaactggatgagcgccaccgtcacgacgctcgatgagaagatcgttccctatatcgagagcatttgccgtcgcgatccgttctcgggcggcgtcgtaaccggcggcatcgttaccgtaaaagattcgaactggcttttaagctggacgttcaacaggcaaccccagttcagagcccagcccgacgatcagctgtgcggctggatatacggcctgttcaccgatgtgcccggcaactacgtgaagaaaaccctgcgcgaatgcaccggcaaggaaatatgcatggagtggctgtaccacctgggcgttcccgaatcgcagatcgaggagctcgccgagaacagcgccaacacggttccgtgcatgatgccctacatcacggcattcttcatgccgcgcgccgcaggcgaccgacccgacgtcgtgcccgaaggcgcggtgaacttcgcgttcatcggccaattcgcggaaacgccgcgcgacaccattttcaccaccgagtattccatgcgcaccggcatggaagccgtctacacgctgtgcaacgtcgaccgcggcgtgcccgaagtatggggcagcgcgttcgacatccgcgatttgctgaacgccaccacgttgatcagggacggcaagcccatcaccgacatggagatgaatcccctcgaaaagctcgccctgcacgagggaatcgagaagatcaaggggaccgacctctacggtctgctggtcgagttcggcgtgattccgcccgatcgcggcgacgcgcccgcgcccgccaccggagccgtataccccggcatgcattagacgtttccgttaaaaaccgaaccccctgttcaaagggggttcgggacgaattccttacacgttgaacttgaagtgcatgacgtcgccgtcctggacgacgtactccttgccttcctgacgaagcttgccggcatcgcggcagcccttctcgccgcccagccccacgtagtcttcgtacgaggccgtctccgccttgatgaagccgcgctcgaaatcggtgtggatgacgcccgccgcctgcggagccttcgcaccgacggggatggtccaagcgcgcgtttcctgttcgccggtggtgaagtacgactgcagccccagaagtttatacgcctcgcgcaccaggcgcgccaggccgctctcttcgagacccatggcctccaggtactccttcgcctcggcaggatcgagctcggccaggtcggcctccaccttcgcgctgatgggcacggggcggcagccgtcgatctcgggcagatcggcgtccagttggtcctcgtccacgttggcgatgtacagcatgggcttcatcgtcagcaggtgcagatcgtaaatggcagcctgctcgtcctcgtccagccccaacgtgcgggcgcggtgcccctcgtccaggcccgcgagcaccttcttcgccacctcgaccttcttggcgccgtccttgtcgcgcttcgcctctttttccaagcgcggcagggccttctcgatggtggccatgtcggccagcatgagctcggtcttgatggtgtccacgtcgctgctcgggtccacccggcccgccacgtgcaccacgtcggggtcaccgaagaaacgcacgacttcgcagatggcgtccgtctcgcggatgttcgcgaggaactggttgcccaggccctcgccctggctggcgccggccacgaggcccgcgatgtccacgaactcgatggtggcgggcacgatgcgcgtgggatggtcgatgttcgccagcgcgtccaggcgcgcgtcgggcacgggcaccacgcccacgttgggctcgatggtggcgaacgggtagttggccgcgaggccgcccttgttcgtgagggccgtgaacagcgtggacttgccgacgttcggcagaccgacgataccgatggatagcgacatggaacttccttctcatacgatgcagatgtgtcgtcccatgatagcaaactacc

SEQ ID NO: 9367 - DNA, 1613 bp, Unknown
  gut microbiota DNA sequence
ggcgaaatccccgctccgtggcagcaatcgggcggtttggtaatcctatcgattcgcttttatttacgcttcgaacatccgacctgggaaaactccttcgatcgcgctctgcgggtccgagatgccgcgaccgagccctcgtcgagattaccaaaccgttcgatttccgccgttcgacttcgcttccgccgtcataccatctatcggcgcaaaaccgttcagcgcgtccgttgcacggttttgcccgcgatgttgcacttcgagcgcacttggatgcctccgcgccccaagacgcgcaacccgcgacgttacgccaggtcgcgcgaggttgggagccggacggtccgaaccgaacgcaacatccctgcgaaaaccgatcgctgccgccgtaacgccgcttgcagcgggatcgcgcccgaacgaaaaccggatccggtatgcggcaaaatcaacggtttggcactactcggcatccctcgacgcatcttcccgaaggatgccgaagcgaaaccccaggtcgcgttccgccatcgcctcggaatgccgcgcctgagcgagccggccgtgccaaaacgacgtttttgctgcacatggccttgcgaaaacacgcatccggccgaagcggcgcggccagggcacggctgggcaggacgacacaggcgggcgatgatggcacgggcgggacgaccaggcgcgaccaggcgagggacgcggctgagcggggcgacgcgaccggggcagcggaccaggcagcgaagccgggcgcggacgcggccaggcgaccgggccggcggccggggcacgaccgggacgcaaccggaacgcacacgaagcacgagccccatccgcgccgctcgcgcccgaaacgaaacggagcgccccgaagggcgctccgcgcgaatgcctcgtatgcgcctgaacgctagaagctgatgagcccgaacgtctgcgcgacgaacgcaacgaggatgaccaccacgagcaccggcgccacgtacttgatgatgacggtccaggctttctccaccttgaactcgctggagatcttcacttcgtcgacaatggccttcggcttgatgatccaaccgacgaagatgcaggtgagcagcgcgacgataggcatgatcaccgagttggagatgaagtcgaagaagtccagcagcgtggtgccctcgcccatcggctcgatgaacgacaagccgttgtagcccaggttcacgaagatgccggccaccgtgaccacgccgatgacggcgcacagcgcctttttgcgcgaccagcccgcaccgtcctgcacgatggaggtgcaggtttcggtcagcgaaatggcgctggtcaaagctgcgaacagtaccagcaggaagaacaggaagcccacgacggtggccgcgccgcccatatcggcgaacacggtgggcaggatgacgaacatgagcgacggaccggagttggccgccacggcctcgcccgagcccatggccacgaacgcggccggcacgatcatgaggccggcgaggaacgacacgccgatgtcgaagccaccgatgcgggcgacgctctgcgtgaggctggacttcttgtccaggtaggagccgtacgtgatcatgatgccc

SEQ ID NO: 9368 - DNA, 405 bp, Unknown
  gut microbiota DNA sequence
acccatggccacgaacgcggccggcacgatcatgaggccggcgaggaacgacacgccgatgtcgaagccgccgatgcgggcgacgctctgcgtgaggctggacttcttgtccaggtaggagccgtacgtgatcatgatgcccatggccagcgacaggctgtagaacatctgcccgagcgcgccgatgaccagctccggtgagaacttgctgaagtcgggcgtgaggtagtacagggcaccgtcgacggcgccgggcatggtcagcgtgtacagcgcgatgcctacggccatgatgatgagcgccggcatcatgacgaggttcgccttctcgatgccgcccttcacgcccagcgacaccacgatgaacacgatggccatgaacaggagcatccacaggaagctctc

SEQ ID NO: 9369 - DNA, 559 bp, Unknown
  gut microbiota DNA sequence
atgcagtagtacggcgtgatgatgaagggcacggtggacgccaggatgccgatgaaggcgtacttcttgccgaactgcttgaacgcgccgatggcggactggcccgtcttgcggccgagcgccgtctccaacaacagcagcgatacgccgaacgtgaacaccagcaccaggtaggtgagcaggaacgtgccgccgccgtacttggccgccagataggggaagcgccacatgttccccaagcccacggcggatgccgccgcagccagaatgaacgcccacttgcccgaccaggccgagcgcgcgtgcgcatgcgttgaagccatcgaaaacctccgttaacgttcagttggtattccccggaaaatccgctcgcggaacgcgcccgcaagggatcggatacgggcgcccatccacgtcgtgcacctgcgccgcgatccagatgcatcattataccgggaaaaccctggtcgccaacaacgttttgccgaaagatccgttttgccagcaaccgacgcccgaagaggtgctacggaagcgtcctccgacgcgcgcaccgccg

SEQ ID NO: 9370 - DNA, 186 bp, Unknown
  gut microbiota DNA sequence
gcgctacgccaagattcataccagcagcaaacggaagcgctccgcttagcgaatccatggcgcgctcacgtggatgcggaaagagacggaaagcgcgaggggcgagaggcgctctgcccaattgggggagtttgacggcatgtgggcgagcgcgaagccgtccgcgctcgtgcgcagcggtatact

SEQ ID NO: 9371 - DNA, 289 bp, Unknown
  gut microbiota DNA sequence
caccggcgccagcacgggccctaccacgaacatcacctgcacgacggacagcagagcctcgcgccgttcggggacgacggcgtccttcaccaccgccgtggacaccgcgctcaccgccccggcgcccaaggcttgcaggatgcgcgtggcgatgagcatgacgatgtccactgacagcgcgcataaagcgctggccagcgcatacgtgagaatgcctgccagcagcacgggtttgcgtccgtagcggtcgcttgcgggcccgaacgccagcagcccgacggcgaagaac

SEQ ID NO: 9372 - DNA, 5600 bp, Unknown
  gut microbiota DNA sequence
caaatcacaatagtagcatttgtcatcgactgcgagcctcgatcgccctcgagggttcacggcgtggttcatgcaaggctggggaagggcgtacccgcccatgcgaagcgggaggcagagcagcatggccaaggtcgtttccatcggggaggcggagcctgcgacgaggtgcttgagggcttttcgggctttgaccgttcccggcatgttcgcagctttgtccaggaagcgtgcgaggcgggcgggggtggtgaaggggcgttcgaaccggaagtccgcttttccaaccgttgccaccccgtacgtgccgcacagctcgaatccaagcctgatcagcgcgggaagcgacagctccgaagccatttgcacgaagcagagctcgggcgagcttgcaagcacgttgcgggcgatgcgtatgaacgatcctctgggaaacgttgcggagctcacgtggcaggcgactttcccgcatctgctgcgtgccgcttggctcggcacgacgacgtgcagggggagcgcgatgccctcgagctccggcattccggcaagctcgcggatcaggagttcggtgaccttgcattctgagggcagcggttcgtcttttctccaggaggggtttctggaatcccaacagcgcgcgagcacgtctgcgccggtcttgaaagacgaccagatctctagtgccgaactatgactcagatagatatccatgaggtgaaaaataacatgggggattcagcctcatcgaccgggagacgatgctgtttaccaggcgtaatgtgacgtggaaaccgcgtggaaaacgcgtttgatccgcgttggatcagcgtgggttccgcgccaaattcgcataagatccgcgttagaattgctagatcggagcagcgtcgaccgtcttcccgcaaaaggccgcaggtcgtcgccgcgcgccgagggccgtgcgcgcggggcgccggtcggaagggaaggagcggacatggacgaactcgagcttcagcatgcggaggcccactacgcggagctgtcgcgcgacggatacagcggcaggtgcgagatgttcctgcccgaggacctgcgcggcatgcgcgtgctcgatctgggatgccgcaacggcaagggcgcgtgcaagctggccgatcgggtggggccggacgggttcgtgctgggcatcgacccttccgccgcttgcgtggcccgcgcggaggcgacggccgcggccgcgcgcgcggagggcgccgcgtgggccgggcggctcgcgttcgcgcgggggtgcttcgagggtctgcgcgcggcgggcgtggaggatgcgtcattcgatgtggtgatcgtcaacagcgtgctgaacctggcatgggatctcaaggaggcgctgcgtgagacggcgcgcgctattgcaccgggcggcttcctctaccatgcgggcgtgttcgcggacgagccgcttccgctcgccgccatgcaggcgttcgcgcgtgccggcaacgtgttcggcgccgctcgctcccaaggcgaattcgcccgcattgccgtggatcgcgctggtttctcctcgtgctctttcgagcgcgagcgccctgtcgaacctgacggcaccgacatcgccgaagagctgatcggccggtcgttcacggccgccgtcgcctgcgcgcggcgctaacgagcgggtcgcaggcaaggaatccgacccttgctagcgacccgcgaaaccgtgcatcatggagggggcgagggcggccgagtccccgccctgccgacacaaacccctgatcccgccttacagcggcaggtccttcttctggaagcggatggcaccggcgacgtagcacacgacggctacggcggccagcaccccgaacttccacacgaaggcgtagtccacggcgcccgagccgatggtgccgatggcgttgatgtcgaacaggccgataagcgtcagcttgttgaacacgccgagcgcctccacgccgatgcccatgtcgatgaggctttgcgagccgaacatgcccaggagcgacgccaggaagaaccacacggtcagcccgccgccgaaggccatagacttcttgctttggctgaacacgcagctgcccaggtagcacagtcctgcgatggcctcgatgaggatgtacatgcccgcgtacagcacgacgatctgctccacgttcacctcgtcgaacagcacgaacgacgatccgatgcgcacgcagcacacgatgccgatgatgatgagcggcgccacgaccaggtagatcgcctgggtgattgccacggccgagcgcttcgtgggcgtggacagcacgtaggccatcgaccccttgtcaaccttgtcggccaccagcgagttcgccacgatcacgatgaacagcaggatgggcaaaagccccatcaccgtgaagtacatctggttgagcatcgacgtgctgtccatggatcccatggtgtccatgaggtcggtggacacgcccatggtggcgaacatggtgttcatcatgtcctcgatatcgaggtcgtctccgctgaacacgcccttctcctgccccagcgcgtacacgtactcgaactgctcgacgtaggtgtcgagccccacgccggtcttctccagctgcgcggccgcatcctcgagcccctgcacgctcagatccagatcggcctgctggttcatcaggtcgaacaccgtttcgtacggctccttgtccgacgtgctggcgaaatcgtcgtacgacaggtcggcctgcgccatttcgtcgtaagaggccatggcgtacaggtaggtgtagaagtcctgctgcgccccggtcttctcgtcggcgacagttcgcttacggtgtcggagcccatcacgctcatggcgtagttcaccacgttgctcatgccggccatgatgacgaggatcacgagggccagcacgaggttggatttgacggtctgcttcatcaacggcttcgagaagaagcgcgtcgtcttggtgttcgcgctcatatcagttctctcccttcaggtacacgttcttgaagtgctgctccagcgtgaagtgctgctcgcgcagtccgcgcacgtcgtagacgcgcaaggcgtgcagcaggcgccccagttcgcttgccgggacttcgacggcgacggtcgccgcggtttcgtccacggcacccgtcggctcccatgctcccgcgaagcgcacggcgtcttcgggcgacgcgaaggcgatgcggaacgtcttcctgttcccgtggcgcagctcccgcaggtcgagcacctcgatgatccgtccgtctttgatcatggccacgcggtcgcatacctcttcgatctcctcgaagatgtggctcgacatgaacacggtgcgccccttctccttctcggcgcgcacgaggtccaaaaacgtgtcgcgcatgagcgggtcgaggccggtggtgggctcgtccagcacgaggatctccttgtcgcccatgagcgcggcggcgatggccgtcttctgcttcatgcccttcgacatgcgcttgaggttggccgacggatccagctgcagcagcttcaccacgtggttcaggtatgtgagatcggtcacgcccaagaactcggcctgcgatttcaggaaggcggtgccggtgggcaggctggggaaggcgatctcgcctggcacgtagctcacatggttcatgatgcgcgtggaatcgcgccacgagtccattcccaggatcgacgtgctgcccgcgtcgggtttgatgaagcccatgaggtggcggatggtggtggttttgccggagccgttcgtgcccacgtagccgaacacctcgccccgcttgacggccaggtcgaggccgaacacgccgcggccgtgcccgtagtccttggtcaggccgttcgcgcggatgatggcgtcttccatctacctcacctccccgaactggcggtcttcgcggtagaactgcatgaagtagtcttccagcgtgaaagggatctcctcgaagtcggccacgtcggcatcggcgagatcggcgatcagccggttcacctgcgcgtcgttcacgtggaccttcgcccggcgccgctcgggacttcgcgcggcgaactcgtagggcagggcggcgaaagcttggtaggcgtcgacggttgcgaaggacacctggtagaacctgtcgccgcgctggtggaactcgttcgactcgaactgcgacacgatgcgcccgtccttgatgatggcgatgcgatcgcacgtggcatcaacttcgttgaacaggtgcgacgagaggaagacggttttgccgcgccccttctcccatagcacgtagtcgatgaacacctgctgcatgacggggtcgagcccgctcgtgggctcgtcgaggatcaggatgtccggatcgtgcatgaacgcggtgaccacggccatcttgcgcttaacgcccaggctcatctcgcgcgtggggatgtccggatcaaggcggaacgtgtccagcagcatcttcagatgctcgtcgtcgcgcacgccgcgcatgcgttccatcatgcgcaggaacgccgtgccggtcatgccggcgggcagcgcgatctcgccgggaaggtagcccacggtgcgctgcagctcggcggagcgcgtccagcaatcctgtccgtggatggcgaccgttccggcctgcgggcgcgagaagcccatgaggtggcggatggtggtggttttcccggctccgttcgggcccaggaagccgaagcattctccgcgctccacctcgagggacacgtcgaacacgccgcggccgctgccgtagtccttcgtcagatgggaaacctctatctcgggcatgaacatcaccccttacgtttgtggtaaactatccaacaacgtgttgtgtgattcaagcatagggggcgcaggcccgcacatcaaccgacaacttcgacgcgagtgtcggacgatcggaggcgttgccatgaagaagcaaccgcagcagacggcgcagacgcgcaagaagctcatggactcgttctggaagctgtactgcgacgatggcatcgaccgcgtgacggtgggagcggtggccaaggacgccggctacaaccgcggaacgttctacgagtacttcaccgacgtgtacgacttgctcgatcagctggaggacgagctgctgggcgagctcgagcgcaatgcggcggccatcgtcggggcggggctgccgcgcagcctgcacgagttctcgatgcggtgcgcgcagctgttcgccacgcacaacgaggaggtgctcgtgctgttgggcgacaagggcgacccacggttcctcgtgaaggtgaagcgaaccatgatgccgttcttcttgcaggtcacaggagtgtccgaggacgagcccaatgtcgagtacctggccgcgttcatgtttcacacgatgttcggcctggtgagccaatggcacgagaacggcagggacctgccgcccgaggagttcctcgagatgatgcagaccctcgtggcgaacggcgtgtcgggcttcgtcgggaggccgctgttctcttgacggccccgcgctgcggccccgcgttgtcgtctgtcctttgcgtgaaatgccggaaaacgcgtgcgagcagggcgcggtcgttttcattttcgggtaaga

SEQ ID NO: 9373 - DNA, 489 bp, Unknown
  gut microbiota DNA sequence
ggaacgcgcacaggaaggacaagcatgagaaagatcggcatccaggaaatcgaggacatcgcgctgggcgcgacgcttctcggcgctggtgggggcggcgacccttacatcggaaagctcacggccatcggcgccgtgaaagaatgcggcgaagtggagctgatcggcatcgacgaggtgcccgacggcgcgttcatcatgcccgccgcatccatgggcgcacccaccatcctcgccgagaagggcgtgggcgccaacgagttcgcgaaactgttcgacatggtgtcgcgctactacggcaagcccatctacgccaccatgcccatcgaagctggcggcgtgaactccatgctgcccatcgccgcggccgcgcgcctcggcattcccatggtggacgtggacggcatgggccgcgcgttccccgagctgcagatggtcacgttcaccatcggcggcgcgtcggccacgcccatggcgttcatcgacgag

SEQ ID NO: 9374 - DNA, 1511 bp, Unknown
  gut microbiota DNA sequence
cccccccatcatcgcccgaaaaacacgctccacgcgctgaggcgtgtttttcgggcgatgatggggtcccgtgcgctggcagcttcaagttgacgctgagggaaagcatcgcgtgcgtgatcgattattgtcgtacactgtggattgatacaaggacacggctctgcgcgatgccgtcggtttccccgattccgtgcgacgcgccgatggacacgaacgagtgaatacgataggagcaagcatgcaaactgctttgctgtgggctgccggcgggaccggcttcaccttcttgatgaccacgttgggcgctgcgtcggtttttctgtttcgcaagcgcaacagcatggtgtttcagcggatattcctaggattcgcggctggcgtaatgatagcggcgtctgtgtggtcgttgctgattcccgccatcgagcgcgcggaggaagcggggcaggtcgggtggattcccgctgcgggtggattcgccatcggcgtggcgttcctcatggtgctgcaccagctgttgccgcacctgcatccgggcgagagcaagcccgagggcctgcccagcaaatgggatcgtcccacgctcctgttcacggccgtcacgttgcataatatccccgaaggcatgagcgttggcctactgttcgccatggctgcccagaacggcggcgaccccgccatgttcggcatggccgtggcgctggctatcggcatcggtatccagaacgtgcccgagggcgcagcagtggcgctgcccatgctgcaggagggcatgagcgcaccgaaggcgttcgcattgggagcgctgtcgggtttggctgagccggtgttcggcatcctcgtggtgctgttcgccgggctcatctcgccgtacatgccgtggatgctggcgttctcagccggtgccatgatgtacgttgtggtggaggagcttatccccgaggcgcatctgggcgagcactccaacgccggcacgctgggcgtgatggccggcttcctggtcatgatgatcctggacgtggcgctgggctagaggcgcggtgcaggatgctctttcttggagacgctgctggtagtactatgtgatacgttgcaccacgaacaatcaacatgacgtgaacgcatggcggaaaggaacgtctatggagaacttcgaattcgtgtcgccgacccacttcgtgttcggaaagggcgctgaagagcaggtgggaagcaagctggccgagtgcggtgcgcgtacggtgctgctgcacttcggcggccagagcgccgtgaaaagcggcctgatcgaccgcgtgaaggcatcgttggatgcacagggcatcaagcacgtggagctgggcggcgtgcgtccgaaccccgagatcacgcttgctcgcgaaggcatcgcgctgtgcaaggagcacgatgtcgactgggtgctggccgtgggcggaggctcggtcatcgactcggcgaaggccatcgccgtgggcgcgcactacgacggggacgtgtgggatttcttc

SEQ ID NO: 9375 - DNA, 379 bp, Unknown
  gut microbiota DNA sequence
acacgatgtcgactgggtgctggccgtgggcggcggctcggtcatcgactcggcgaaggccatcgccgtgggcgcgcactacgacggggacgtgtgggatttcttcgagacgaagcggccgacggacgacgtgctgcccatcgccgtggtgctcaccatcccggctgccggcagcgaggcgtcgaagaacacggtggtgtcgaacgacgccttgcagatgaagtcgggctacgcgaacaacgcccagcgcccgaagctggcgttcatgaatcccgagctcacgttcacgttgcctccgttccagactgctgcgggccttaccgacatgttctgccatctgctggagcgcttcttcgacgacgtgggcgcggtgccggtg

SEQ ID NO: 9376 - DNA, 988 bp, Unknown
  gut microbiota DNA sequence
attgcagatgaaatcgggctacgcgaacaacgcccagcgtccgaagctcgcgttcatgaatcctgagctcacgttcacgctgccaccgttccaaacagctgcgggccttaccgacatgttctgccatctgctggagcgcttcttcgacgacgtgggcgcggtgccggtgacggacaacctgtgcctgtcgcttatgaagacggtgcgcgccgaggcgccgcgcgtcatggtggatcctgagaactacgatgcgcgcgcgaacgtgatgtgggccggcatgttgtgccaccagggcctcgccggcgtcggccgtcacgaggactgggcgacgcacggcctggagcacgaattgtcggccctctatcccgagatcacgcacggcgcaggcttggccgtcatgttcccggcctggatggagttcgtctacgatgcgaacccggcgcgcttcgcctactacggtcgcgaggtgttcggactggcgcctacgggcgacgtgaacgccgacgcgctgtcggccatcgacgagacgcgctcgttcttcgcctcgctcggcatgcctatcacgctcgcggagctcgacgtggaggaagacgacatcgagaagctcatccctacgctcaaagagaacaagggcgagcccttcggcagcttcaagaagctcaccatggacgatgcccgcgagatctataggatcgcgttgtaacggcgcttgcttttgcgccgcccgttcgtataatagaggcgagccgcagggagctctaactccccacggctctcgaatcgcttcggcggtttggctacttttcttacggctccttgtccttgcggatcgggagccgctccactattgcggtcaaaaaacccagcaagctggaagcgaactcaagggcgtctcacgcgaagcattcgtgccgcctgccgcggagaggtggcgtcttcctatagaaaacagcttgcgacgatgacgatggcggtggtcagcagacct

SEQ ID NO: 9377 - DNA, 903 bp, Unknown
  gut microbiota DNA sequence
ggttacggctccttgtccttgcggatcgggagccgttccgctattgctgtcaagaaccccagcaagctggaagcgaactcaaggatcgccgctatcaaggccaaaacggtcatggcgtccacctccctccgtgcggtccctcgctcgggagcatctggtggaaaggggtgtggtgccgcgccgcctctgcgcttcgtacctcttagtatagcgaccgcgtatcatgcgcagatggcgcgcatccagcgcggatcttcctcgatctcgcgcgcgtccgacgcgcttgccacgcggattccacgtttctcgccggcgtttccgacgcggtttccacgcgaatgcgatgcgaggctagctcatatacgaagcggttgcgcgcaaagttcgcaagcgaggcgttcatctgcgaaaacgaaagggcgtctcacgcgaagcattcgtgccgcttgccgcggagaggtggcgtcttcctatagaaaacagcttgcgacgatgacgatggcggtggtcagcagacctgacacggcgatggagacgccgctcatggcgccttcgagctcgcccatctcgagggctttcgtcgttcccaccgcgtggctgcacgttccgatggccacgcccttggcgatgccgtcgcgcacgcggaacagacgcgccatgagcggcgcggtgatggcgcccaggatgccggtgacgatgacggcggccaccgtgatggacgtgatgccgcccagctgctgcgataccgcaatggcgatgggcgtggtcaccgacttcgggatgaacgacagcgccagcgcatcgtcgagccccagcagcttgcatagtgcataggcgctagccatggacaccaccgagcctacaaggcagcccgcgaagatgggaacgaagtgctccttgagc

SEQ ID NO: 9378 - DNA, 375 bp, Unknown
  gut microbiota DNA sequence
gatggcgatgggtgtggtcaccgacttcgggatgaacgacagcgcaagcgcatcgtcgagccccagcagcttgcacagcgcgtaggcgctagccatggacaccaccgagcctacaaggcagcccgcgaagatgggaacgaagtgctccttgagcgtctggcgctgccggtacaccgagtatgccagcgccacggtggccggtcctaacagaaacgagatgagttgcacgctctgctcgtaggaatccagggggatgcgcagcgccacgagcgctgcgatgatgaacgcgacggtaaccagcaagggattgagcagcggcgacttcacgcgctcgtacagcagcacggaaagcttgaacactgcgaacgaggcgac

SEQ ID NO: 9379 - DNA, 4616 bp, Unknown
  gut microbiota DNA sequence
ctgcacgctctgctcgtaggaatccagggggatgcgcagcgccacgagcgccgcgatgatgaacgcgacggtaaccagcaggggattgagcagcggcgacttcacgcgctcgtacagcagcacggaaagcttgaacactgcgaacgaggcgacggttcccactgcgagtgtcagtgcgagttgcgctatgccgtccatcgcgcctacgcctcctcgtcggcgacgcgggcgacgcctgtcgcatcgacgcgcttcgccgtcagccgagacacgagcatcaccgtgtacgacgtggccaagaacacgatcaccgtggtgattacgcatacgagcgcgaacttcagcgcgttgccctccaaaagggagacgcagcccatgatggccacgccggcgggaatgaagaacagcgacatgttgtccagcaggcagtcgcaggcgtcgcccacatgccgcgctttcagcagacccgtgcccagcagtaccaacagcagcaccatgcccacgatgttgcccggaagtcggacaggaagcacgcttgcgatcgcgcatcccgcaccgtacacggcaaccaccagggcgagctgcgcggcgaagcgcgctcctcgcttgcccgcccgtcctgctttcgcgcgccaagagacatcgccatgagcaggtgcggacgcgcacccggagacgcctgagacggcgtcggtctgctgtttcacgattccaatcctcacgtgtatgcgggcgcacgcgccgctttgcttgtgcgcctgcccaatttttgccgcgcccattgtacggcggttgtcgtgtttgcgtgcgatctgcgctcagaattcacgcaaacgacccttccgatcgtttcggagcgctctcgaaccaaagaaagcggcactgccgaaaccgacggtgccgcttgcaggtggttgcgatccggatgctagtccttgcctaccaatgcgttcaccagcgccgatacgatgctgatgacgatggaggccacgaacgcgctgccgaacgagtcgatgaccagtcccacttggaagatcccgttggccagccatgccgcgatgtacagcatgagcgtgttcaccaccaggtagaagatgcccagcgtgatcacgctgatgggaaggctgagcacctgcatgatgggcttgatgctgatgttgatcagcgacaggatcaagccgaagatggcgatgcccacccacgcgtcggtgccgccgagcagatccatgcccggaacgatccacaccgcaacgcccacggcgatagcggtgacgagccagcggatgatgaagttcatgggacgctccttgacgtgcgacgatatatccgtatcactgtagcacgctgaaagcgagacggaaaacatcggtcatggagccgtaacccaacgaacggcgccgacccgcgcgtatgcgccgcctgcgcgagcgagcaggcggcgcagtgggagctacagcacctgtatcgtcccggtggccatgagggcgatcgataccgccatgagcaccacgatgacggcggctatcgccttgtccgccatgtttggcagtatcttctcgccgcgttcgcgctggcccatggcatatacgatgatgccgggagcgaacaggatagtggtgatcatgattcccaccagcccggccgcccacacgaggaacaccgtgtacacgaagccgacggtgccgaacacgcgggccttcttcacctgctcgggcgtcaggtgctcgcgcttccaggcgatcttcatgtagtaggccgccgagcacacgtaggggatgaggatggtggacacggcgcacgcgtagaagaattggtacgtggacgacgagaacaccgacacgatcaggaacagctgcgtgatgccggccgagatgagcacggtgacgatgggcgctccgttcttgttcgtgcgcgcgaacgacttcgggaacacgccctggcgcgcggcttcgaacggcgtctcggcggcgatgatcacgtagcccagcatcgcgcccagaagcgacagcaccacgccgaggttcacgatgctcgcgccgacaggcccgatggcatgttcgaggatgcccgccatcgacggggtggccagctcggccatctgcgcgcgcggcatgacgcccatgctctccagcgagatgatgaggtacagcacgaacaccgagatgaagccgatgactgtggcgcggcccacgtcgcgggcgtatttcgcgcgacccgagatgaccacggcgccttcgatgccggtgaacacccacacgagcgcgatcatggtggacacgatttgcgtgccaaggtcgggcccgcccgcttcgccccagaagttctccatgaagatggcggggtcgaacttgcccagcagcgcgatggacagcacgaacagcgcaagcggcacgagcttcgcgatggtgacgatgacgttgatgccggccgcttccttcacgccgcgcgacacgagccacacgagcagccacagaaacgccgacgcgcacacgcacgacagcaggttgttgccgctttcaaacggatggaagaagtaccccagcgccgagaacagcaggatggcgaacgacacgctcgacaggcacgccgacacccagtagccccatgcggagttgaacccgacgaagtcgccgaatccggctgccgcgtaggcgtagatgccgccggtgagatcggggcgggcctgcgacagcccgttgaagcacatcatgagcgagaacacgcccacgaagcagatggcccagctgatgagcacggcgccggtgctggcgcctccggcggccatgtcgccggccagcgcgaagatgcctccgcagatgctggccgtgatcaccatcatggtgaggcggaacagatcgaggccgttcgggtcgatgatctgacctttgtcgcgggaggctcctgcgctggcggcgaggctcccgtcgagggtttcagaggcagcgttcgacatagcccctcctttatctgggggtcgaagggaatgctgacgcagggcacggcaaggtgcgagcgtcggaaatgcaacggcgcgccgggcaagtgccgcagcgcgccgtatgcggcgatgtaaaaacggaggagacgagctgtttgtgacgagtcggatagccgtgaaggttctgggggtttgagctagcgaacaatccagtgaattgttcgctagcgcttttcccggccgagcggtcgggggccgggtgcgaaagcccccaggttctgaacggctaggcggccgccacaaacagcccccaggttagaagcgcagcgacaggcagctcaggccgccgtccagcttgcggtactcggacgtatcgacggtgatcgtctcgtagccggcgtcttgcacggccttcagcacggtgggatagccctcgggcacgatgacggtgccgttcacccagatgcagttcgcggcgtacgcctcgtcctcggggatctcgatgcggttgtactgctcgaagtcgggcttcgtcacgaactcgccggacaccagcatgttgccgtcctccaggtagttcacgccggtcttcaggtgcaggaccttctccagcttcacttcggaaccctcgaggccccagccttccaggatctcgcagaactggcggatgccctcttcgttcgtgcgggcggactggcccacgtagaaatggtcgcccaccatcatgacgtcgccgccgtccagcgtgcccgggctcacgatgcgcttcacgtgctcgtcgtcgaagaactggcgcacggcaggctcgatctcgtccttctcgccgttgcggctgtcggcgcccgggttcgtgatgatggcaccgcagcgcgtgatgactgcgggatcctcgacgaagcaggagtcggggaactgctcgagggcgggcaggacggtcacttcgacgccgcactccttgagggccgcgatgtagtcgtcatgctgcttgagggctttctcgtaatcaggcttgccgagttcgggcgcggaggtgatgccctcgaccatggacttggcggggcggcggacgatgacgttggagaacttggtcatgacggatcctttcgtgagagatcatttccgtttgcttcctatggcgcatattgtattctgtatattgtatacaatcaagaggaaacgggaagtttttcggagttgttgaaaaggggatggtgggtctcatttggcgacggcgaggggcacgccggccctcgaattccctcgggcgcgatcggggtgcgtgggcagagcgcatcatcgcccgaaaaacacgctccagccgatgaggcgtgtttttcgggcgatgatgcgtgtcggaatgcgagcgcgaatgcggcagaacctccatgcatgcggggcaagcgcgcgaatgcgccgtagtgcttgtggtatattggcatacacgaaagccgtacgacaggcggatgaaatgacgaacgaataccgttccctcaaagaccatgtatacaaccacatcgtcgacctgatcgacggcgggactttggccgacgatcacaagatcagcgagcagcagatatgcgatgcgctcggcgtcagccgcacgcccgtgcgcgaggcgctcatccagctggccgccgacggttacttggagaacgtgccgcgcaagggcttctacgtc

SEQ ID NO: 9380 - DNA, 484 bp, Unknown
  gut microbiota DNA sequence
aaccctggccgacgatcacaagatcagcgagcagcagatatgcgatgcgctcggcgtcagccgcacgcctgtgcgcgaggcgctcatccagctggccgccgacggttacttggagaacgtgccgcgcaagggcttctacgtcaagcgcgtgacggaggacagcgcccgcgaaatcgtggagatcatcggcccgctggacggccgcgccgcgctgttggccgtgggcgacatgaccgacgacgacatcgcgcagctgcagttcttgcacggttccatgcagctggccatcgagaagggcctctacaagaaatacgacgacctgcagcacgacttccacgactgctatgtgcgcaagtgcggcaacacccgtctgatagggctgattcaccagatgaaccgctacttcatgaaacgggagtacgccaacgtgggcgccgacgagctggacggcctgctgcgcaaggccaacgaagagcatgcggaa

SEQ ID NO: 9381 - DNA, 417 bp, Unknown
  gut microbiota DNA sequence
tgcaagtgcggcaattcgcgcctggtagggctgattcaccagatgaaccgctacttcatgaagcgggagtacgccaacgtgggcgccgacgagctggacggcctgctgcgcaaggccaacgaagagcatgcggaaatcgtcaggctcttcgagctgcgcgacggcgaagagctgcaacggtttattcgcgacgtacattggagcatcgacaatgccaagttcctcgtctggtagcgcccaacccgcgcagcgttccacgcagaaagcgcccgtctgtcccgtcgagcgcgagtgcggcgcctgccagcacgtgggcgttccgtacgcgcagcagctcgcaagcaaggacacgcgtgtggccgagctgttcgccgacgtggccgacgcgtccgcgttgcggcccatcctgggcatgga

SEQ ID NO: 9382 - DNA, 1179 bp, Unknown
  gut microbiota DNA sequence
cgcgcccagaagccgcgccgcgagatcctctgcggcatgtacgcggccggatcgcaccgcatcgtccccaccgacggctgtctcatcgagaacgaagaggccaagcgcatcatccgcacggtccgcgacctcatgccgcgcttcggtatcgagccgtaccgcgaggattccggcacgggcttcctgcgccacgccgtggtgcgcgtgggacataccagcggcgagatcctggtcacgctggtcacgaacggccgcgctttccccgcatcgcgcgcgttttgccgagagctggtgcgccgctgccctcgcatcacgtcggtcgtgcagaacgtgaacgagcgccagaccaacgtaattctcggcgagcgcgagcagacgctgtacggtccgggcttcatcctggacaagctgtgcgggctgagctttcgcatctcgtcgcagtcgttctaccaggtgaacgccgtgcagaccgaggtgctgtacgagcgcgccatcgacctggccggcttcaccggctctgaaacggccatcgacgcctactgcggcaccggcaccattggtctggtggccgccaagcgcggcgcgcgccaggtgatcggcgtggacacggtggcgtcggccgtgcgcgacgcgcgcgagaacgcgaagcacaacggcgtggagaacgctcggttcgcggtgggcgatgcaggggcgttcatgcgcgagcgcgccgccgcaggcgatgctgtggacgtgctgctgatggatccgccgcgcgccgggtcgagcgaggagttcctcgcggccgcagtgacgctggcgccccggcgcatcgtctacatctcgtgcaacccgactacgcaggtgcgcgacctggcctttttgcgccagcgcggctatgccgttcgcacggtgcagccggtcgacatgttccctcatacggatcacatcgagacggtcgcgctgctatctcggaaatccgcaacgaagactttcatccccgtgacagtcagcccgaaggacatgggactggatgaggccaaggcgcagccgacgtacgagaacatccgaaagtatgtgaaggagacgcacggcctgaccgtaagcaccctgaacatcgcgcagatgaaggccgagtgcggactggagatggagtgcgaccgctcgggcggcaagcagcagccgaagtgtccgccc

SEQ ID NO: 9383 - DNA, 238 bp, Unknown
  gut microbiota DNA sequence
tgcggttctatctcggaaatccgcaacgaagactttcatccccgtgaccgtcagcccgaaggacatgggactggatgaggccaaggcgcaaccgacgtacgagaacatccgaaagtatgtgaaggagacgcacggcctgaccgtgagcaccctgaacatcgcgcaaatgaaggccgagtgcggactggagatggagtgcgaccgctcgggcggcaagcagcagccgaagtgtccgccc

SEQ ID NO: 9384 - DNA, 196 bp, Unknown
  gut microbiota DNA sequence
cgagcagccgacgttgatcctggcgcgcatgtcgaagcgcacgcagtgcgtggcgggccgccttgccgtgcgcttgggcgcgccggtggtcaccgacgcgtcgcgcgtgaagcttgacgacgatggcgtcgaggcggcgcacatggcgtacggcggtgcggccgagcgcgtcgagcatgcgcgggggatggcgatc

SEQ ID NO: 9385 - DNA, 236 bp, Unknown
  gut microbiota DNA sequence
gggagtgctcgccgcatgggagccggtggcgctgatcgggtcgttcgggctggtgccggcagggcttgcgcgtggccttttcttcgcggtgcgcatcgtgctgctggtggtggccagccttacggtcacgtacacgacgacttccaccgagctgaccgacgcgttgggcttcttcctgaggccgctcaagcgtttgggcgttcccaccgacgacatcgccatggtgttctcgttgg

SEQ ID NO: 9386 - DNA, 220 bp, Unknown
  gut microbiota DNA sequence
cccctctccgtcgacagcctggggcagcgcgcccgatgcggccgcggacgccgagagcccgcacccgacgccatcgtcttccaccaccaaacgcgcccgtccgtcctcgacggccaggcggatgagcgccttgtgagcaccagcatggcgcacgatgttcgtagcagcctcgcgggcgatgccgaacaacgccatgtccacgtgggccggcacgtccgca

SEQ ID NO: 9387 - DNA, 451 bp, Unknown
  gut microbiota DNA sequence
cgagttggagcgcaacgtgtcgatggagtcggccgtggacacatcgaacgagctggtggtggcgtacggccatctattggacgaggtgggccccgaacgcacggccgagctgctgggccgcttggaattccaccccgtgttcaccgcgcaccccaccgaagcgcgccgcaaagcggtagagggcaagatccgccgtatcgccgcgttgctggacgagcatccctacctgggcggatcggccctcctggagaacgagcgccacatgctgcaggagatcgacgcgctcgtgcgcacctcgccaaccgagctcaagaagcccacgcccctggaagaggccgacaccatcatcgacatcttcgacaacacgctgttcgacacggtgccgcaggtgtaccggcgtttcgacgactgggtgctgggcgaggacgccggcagcgtgccgcccgtgtgc

SEQ ID NO: 9388 - DNA, 399 bp, Unknown
  gut microbiota DNA sequence
gctgctctcgctcaaggagcaggcgatcgagcatccgctcgggtcgaacgacgtgttcgcctcgatcgtgggaacggtggaagccgaggctgtcgaaggcatccaggggttcgacggcaccatcgagatagccgagatcgagctgtgggacggcggcccgtcgttcccggtgaaggtcgcgttgccgcaggcggcgaaggacgctgctgccgacctggtgcaaagggcggctgacggattgcgcggcgtgtacgcgcaggtgacgggggtgcgggtatgggagtgatgcggatgcgcgacgaacggggccagatgacggtcgagcttgcggcggcgtttccggtgctgatcatcgtcgcggtcatcgcggtgaacgcgctcgcgttcttctcggaatgc

SEQ ID NO: 9389 - DNA, 218 bp, Unknown
  gut microbiota DNA sequence
cccgcgagcgcatcgacgcccagcaccgtcgtcaagcgagcgagcagcaccgtctgcggccccaggggcatggccagcgccaacgcgtcggccgcgtcggtcgagagcgccgccgtcacggtgatcgccacgcccagcagcagaagcgtcgagaaccaccagggagccgcgcctgtcgcgccggcggacaccgcgaagcacgccgcgcccgcagccgc

SEQ ID NO: 9390 - DNA, 698 bp, Unknown
  gut microbiota DNA sequence
tcagccgcgatacgcgccgcgatacgcgcgaacgaaggcgcgccagcggcgcattcccgctcctgtcggctcagcgcctgtttcatagcggcgctcgccacgtccggccgttcttccctcaagctcatagccgacctcccaacgtctcctgcatcagcgcacgcgcacgggacacgcgcgacttcaccgtgcccaccggcacgtcggtcacctgcgcgatctccgcatacggaagctcgtgcagccaggcaagccgcaccgtctcggccaacgcggccggaagcgcgtccaaggcggccatgatctcgccgattcccgcctgcgccatgagcgcgtccgacgggtcgccagcttcgtcggccagctgcgtcaagtcctcgtcgagcggaagctcctccggccggatccgccgcatgcgcgtgcatgcctggcgctttgcgatgcccagcagccacgtgagcacccggctgtcgccccggaacgccgcagccgagcgccagcatcccagccatacgtccaccgccgcctcttcggccgccccgcggtcgcccaggcgcgccgagacgaatgcgaacacggcgggcgcgtacaggctatgcaattcctccaacgcgccttcgtccccgcgcgcgatgcgcgcgagcgccgagcgcgccagcgcatcgtccgcatcctgctcgcccatgccaccgcctttc

SEQ ID NO: 9391 - DNA, 187 bp, Unknown
  gut microbiota DNA sequence
accggccgcaacggctgcagcaccgccgagcgaagccggccgtgcagcgacgaacgtctctataaggcggcgcgtgatagagggctcgatgagcgcatcgccctgggcgacgacgcgcaccgcggaagcgatctcgtcgggctcggcatctttgagcaaaaagccgctggccccggcggccaaagca

SEQ ID NO: 9392 - DNA, 199 bp, Unknown
  gut microbiota DNA sequence
gatagcgggcgtgtgccgcgcgctcgtggagaacgggcaggagcgcgtgctggtcacccggctcgacgccgaaaaggccgccgcggtcgaacgcgccctggaaggcgcgtgccctctcgcgttcgcttaccgccaaggcccgcgtctcggcatcctgggcgaggcgcccgagcccgacggcaacgggcctatcgtgata

SEQ ID NO: 9393 - DNA, 544 bp, Unknown
  gut microbiota DNA sequence
ccagtggcactcccaggacggcaagatcgtctacatggagtccgacaacaccggcgacgtcgatctgcaggcgcgcgcctgcctgcgcggccgctccatgcgccgttggatcaacagccccgatcgtctgacgaagcccatgaagcgcgtcggcaagcgcggcgaaggcaagttcgaggagatcagctgggacgaggccatcgacaccatcgccagcgagctgaagcgcgtcatcgacacgtacggcaacgacgccatctacgtgaactacgccaccggcatgtactccaccaccggcaagcagccgggcctgcgcctgctgggcctgctgggcggctacatcaaccaggcgtacgactactccacccacatgctgcaggtggcgctgcccttcatgtacggcagcaagtgcagcccgtacgacaacgtgcacgcttcctcgttctccgaggccgagcgcgcctccgaccttgtggtgatgttcggcaacagcccggcggaaacccgcatgggcggcgcgaacgccgtgtgggacttcgcgaag

SEQ ID NO: 9394 - DNA, 8153 bp, Unknown
  gut microbiota DNA sequence
attattctattcaatagtagcgttgatatatacaagaaattgcataaatatgaaataatatgcaaaggagataatcccgatgaccactccctaccaaacgctcgcccttcccgtcgacagcatccagtcgcacccggagaacgacttcaccatggatgaaagcgagatgcaggagctcgtcgcgtccatccgctccgagggtctcgggcagctgccgctcgtgcgcaagctgccggacggcgcctatcagatgatcgccgggcaccgccgactcgaggcgtacaggcgccttgcccgcgaggacgccgccttccgaaccataccggtcacgctcgtcgacgacctggacgacgcccgcgcccgtgtgctgctcaatgtcaccaacctcgtgacgcgccggctttcgcaggaagagcgcggcgcgcgctacgcggccatcggcagggaggtgccggctttgcgcgaggcagacccgtcgctcaagggcgtgcgcacgaacgacatcatcgcacgcatcgtgaccgaggaaacggggcagtcggtgtcgcccgccacggtcaagcgcgctatcgcggccgagaagcgtctgcgcgaaacgcgcgagcaggcggagctcctcaccggcgacctgaacgagaactggcaggtggaggcgcaagccggggtcgtcgacccgctcacgttgcgcgccatctcgcagcttccgaaccagaaacagctggatctgttcgtcgagtaccagcgccaggagatgaccctcggccagctgaaagcccacctcaaagcgtcgcggcccaagacgacggccgatgcgtcccgcgcgttgcaggcggctatccgcagcgtcgaggaagctcgtcgaatggatcgcgagggcgtgccgctctcgcagggactcattcgcaaactgaagagcctggtggaccagctgtagcttcggcggggcgcgggggaggggcgtaaagccgcgcatggccctgctggcgttcggggaaatcggagagcttgaacgcggcggtgtcgacgagttcgacggggtcggcctcgagcgcccggcaaagcttgatcatgtcgggaacgctcggaaccacgcggcctcgttcgatgttgctgatccgagaatgcccggtgcctatcatcagcccaagccgctcctgcgtcaagccctgcgccttgcgcaactgacgaaggttctcgccgaggatgaaggcgtattgctgcacaagggggtcgtgatatgccggcgtgttcttttcggaggattttcccatgtcgcaagcgtaaccggttgaatacgcacccttgtatccaccagagtacatatggacgatttcttggaaagatgacgcatcttgcacgtttccgccgacgtcggtgcgtcttcggtataatcaaaccttgctttcaaagcagatcgatgaatccctgcagcgaggaggccctatcgctcgacggtcgacacgaatgagaaatgcggctcgcgccctcgtcacgttgggtttcgtcggcatctgcgcggcaatcttctaccttaccgcgcaaggcccgacggaaagcgtagcgctgtcgagccgcttcgacgcgttcttgaaatccgttgtcgcgcatacagggtcggatggtttgcttgcgcagctcgtccaacagatacccgtgcgcaggatagggcatacaggcgagttcttcgcgttcggcgcgctcgcctctgtgctggtcattgtctggttttcgcaaagaatgagcgtgggaaccatgatgctcgcctcgttgggagcgtgcatggcggggtcgcttttcgaccagacgcacaagctgttcgttccggttcggcacttcgattggaaggatctcccgttcgacgccttcggataccttgcggccgtcgtcgtggtcttcgccgcttacggaatggcgaaagcgttggcgaggcggagggaaggctagaagccgcccgcaatggcgaagcgcatcggggcgtgctaatattatcctatgactattccggcatcgaggggagatggcagcgcgtggagcgaaagccgctcggcgaggcggctgcgacggtggcgcgcgatggttcgcatgagccgcatgcgaacggatcgagaaggaaggggcgggcgtgctgagcgatctggtggtgtgctacctgttccttggcggcaccggggcggggctctgcctcgtgctctcggtgctcggcctgctcgtgccccgttcgtgcttgtcaacgcccccgggcgtgcacctacatccgagcgccgcgtaccgcaaactgctcggttcggggctcgtggccgcgttcgtgctgcttgcgctgggcatcgtgtgtttggtggccgacctcggcaacgccgagcgcatgattctgctgctcgtgcacccgacggcatcgtacctggccgtgggctcgtgggcgctcgcagcctgcctggcgctcgcggcggcgctcggcctcgcatggctcggcgtcggcgtctggaacgtcgccctcgtacgcgtcgttcatgtggtcgccgggcttgcgtccctcgtggtcatggtgtacaccggccttttgctgcagagcctcggcgcggtgcccttgtgggccacgccgtggctgccggcgctgttcgcggcgtcgtcgctgtcgtgcggcatcgcgtgcgcgcttgcgcttgctcagatcacgggcgcggcatcggcgttcggcgccgtgctcgggcgcttggcggccgtcgatgccgcggtcatcgtggtcgaggcggccatcgtcgcggtgttcgtatacgcggcttcgcaggcaggcgcgccgctgtcgaacggcaccgagctcgccgcggcgcaatcggtgcgggagctggtggcgggccggaacgcgcagttgttctggggctgcttcgtcgtactcggcctggcggtgccgttcgcgctggacgtcgtgctcgcgctgcggcgccgcccattgccgggcgtcgttctgttcgcctccgcatgcgtgctggtcggcgggtttgtcatgcggttctgcgttgttgcagctggtgcccacccggtgctcagctcgatgggagtgatgtgacatgtttccgttcgaagtggattcgaccaccgatgtgccgttgtgggtgcagctgcgtcagcggctcatctacctgatcaactcggggtacttcaagccgggcgaccagctgcccaccgtgcgcggcctggcctcggagatttccatcaactacaacacggtgaacaaggcgtacctcagcctcgtttccgacggctacctggaatcgacgcgcgggcgcggcgtgttcgtacgcgacctcgacgccgagatggacgaggagtacacgaaagacgtcgacggcatcatgagcgactgcgtggcggcctgccgcgacctcggattgtcgttggacgacgtgcagaagtgcatgatcaagaagatcaagcagatcaagaaggacgagggcctcgaacccccgctcgagcgggtcgaggggacggggcggatcgtgccggtcgacgtgggaacgacggcgcgcaaggcgcggacgggagcgtgatgcgggtgaagaccaggcgaaacgaaggggatatgccaggcgggcagggcggcgtgccgtctgccgcatcgtcgcgccgcggactgcacgttgtccccgatgcgagcacggagatcgtaggcgagcgcgcgtcgagcacgggcgtgctgctgttctcggcggtggtgttcctgctggcgttcggccttgcgctgggcgcctggtgggcaatcgccggcatcggcgtcgcagccatctcgacggcgctcgtctgcgcgcttctggccacggcggccgtgcacatcgcgcagcaatgggagaaggtggtcgtactgcgcttcggcacgttcaaccgcgtgtcgggcccgggtctgttctggacgttccccgtcatcgagcagaacaccatgcgcgtggacacccgcgtgcgcgccaccaccttcggcgccgaggaaaccctcaccgccgacctcgtgccgctcgacgtgaacgccgtgctgttctggcacgtgtgggatgcgaaagcggcgtgcatcgaggtgggcgacttcacgcgtgccgtggagctggcggcccagacggcgctgcgcgatgccatcgggcgcgcgagcgtggccgaggtggccatccgccgcgagcagctggatcgcgagctcaagcgcgtgctggaggagaaggtggcgccgtggggtataaccgtgctgtcggtggagatacgcgacatcctgctgccgaaggaattgcaggacgtcatgtcgctggaggcccaggccgagcagcgcaagaaggcccgcatcatcctcatggaagccgagcaggacatctgcgagatgatggacgacatgggcgacacctatgcgaagaacgacgtcgcgctgcgcctgcgtgcgatgcacctcttgtacgagagcgtgcgcgaaacgggtggcacggtggtggtgcccagcagcttcagcgaaggcttcggcgacgtgctgggcgacgtggcgaaggatgtgctggggaaggggtcgggcttgtgatggcccaaggcgacgagcgttgagcttggtcgttctggtcggccgcttggggtctcgatcctgattgcgcttcgagtttcgcctcttgctcgcgccgcgaatcgcgcttcccgcgcccgcccgctgcacgctcgatgcgccgttggtggcaaaagggcatcgaattcggaagtttcgcagcgggcggctggtggggcgggcatgctcatacagcatattgcctgttcgcagagcgctcttatgcgatgtcgtgcgcgctgtgcttgctcggcctacgcgacttcttccgaatttgatgcttttttgccgttttggcttccgtccgctgcacgaaagggtggccgatgtctgaggcggcgcttgggcgaggggttttccgggcgatgtccatcggacgggtattcggggcttctgtctcgacgattccccggcatgcgtggcgcattcttcgccgccctttcggtttcaagccgacaaagtaagaagatgacctgcggaatcacgaaaaagtattcacaaaatagtataatgacaagcaaaaattatcctatgacaatcattgattgtcataggataatttcgtatagtgggcgcagtggaatttggccaattctcacgaggaacgggggtatcctcgtatgaggttttgccggctggaggtatgaagaccacagtcgacggaacggggatatcctgacgacatctttgaggaggagacatgtcaggaacaagcagcccgaacagcgggctcacgcgcaggagctttctaaaggcgaccggcgctgctgcgggggcgctcggcctcgcaggcgcggccaacatgatcgcaaccgacacttggctcgcaccagcccaagcccacgccgaggcgggggagcgggtcggatatacgttccattatcgtcactgtcaatgtaactgccatctcaaatgcacggttcgtgatgggcgtctggtcttgatcgagccgaatgattggcctgacaaacgtaatgagacaatttgtctgaaaggcatctctgagattcagcatacatacagcgaagagcgacttcaggttcctctcaagcgcgttggcgagcgcggatcgggagaattcgtcgagatcacctgggatgaagctttggacgctatcgctgagaaagtgaaagaaacccaagagaaatacggcgcacaagctatagccattcagacggccgttgactcgttgaccacgtttctccccaagctgctcaaaggccaagaaaaaccgcatcgcggaattgacataggcatgggcaacgggttttcaccggcgcttgccgaagctggccagcaaggagcctcttcgaatgaggtgagcgattggaagaatgccaagaccatcctgaatgtcggatgcaacatgctcgagacctgcatggtgactgcacggtatttctttgaggcgaaagaagccggggcggagatcatcacgatcgatccaaacttttgcacgactgcggagaagagttcgcgatggatccccatgattgcaggaacagatccggcgctttacctagggatgatttcgctgatccttgataaagggtggtacaacgctccgtatctgaaagcctataccagcatgccttttatggtgaagcgttcggatggttcccttctgagaaaagaccctgtcgacgatattaagcaagcgggatccgagaatccttttttggtgtgggatgagaacgcttcgggtttgagtccctacgatgccgacgggataagccctgcccttgattttgaaaccaccattgacggtgaagcgtatgcaacggtgttcaaactgttgaaagaaacccaaaagcaatactcgctttcctgggctgctgaaatgacgggcattgacgaagacgtgcttgttgaaatcaccgataagtatgcaaactgcggtccttcgattctctcgttcggctttggcggtggagagaagttttacaacgcggatgtcgctggtcatgcggcggtattgctggctacgctcgtcggttcgttcggaactgacatccccggttggggggcgggagcgtacgtaaacgcttaccagaagatttttggagcgggcaagcttgcttcctggccgttgccatccgagtgcaaagtcgcttcggcgcctaaagcgagcgtcgactatcgcgacgaggaaagcggtatccgattcatgtgggtgcagaacggcgcgttccagcagattgcgggtaatcagaaccggacaaacgaatgggcgaaggggcttgatttcgtcgtagttcaagatatatggcatacgccatcggtggattgggcggatatcgttcttccggtgtgctcccatttcgaggttgacgaggagattggttttcttcgagccttacgcggacatgtgctcttgcagcaaaaagtgctcgatcctctgtttgagagcaaaacggacttttggatcgatcgagagatggcgaagcgattgggatacggggatgcgcttccgaagagccaggaggagcttgcgcgttttcaattggacaatgcgaccgacaaggccgtcgccggcataacgctcgacgaggtagtagcaggaaacggcgtggtcgccttgaagaaccaaccggaaatcgcgcgcagttacagtaatcagacctacaaaacaacgtcggggaggatcgatttgtattacgaggacctggtcgaatatggacaggccttgccccagtacgaagcgccgcatgaggcatacgaaggcaatccgctgcgggatgcgtatcctctcgttatgacgcaacgtcgatcgaaatacttcatccatcagaacttcatggatgcttcgtggttgcgccaatactacgagccaacgttggaaatgaatcccatcgacatggaggcgcgtggattggagtcgggtgacgtgattgaagcgttcaacgagcgaggatcgtttcaatgcgcatgcgtcgccaccgaagccgtacgtccgggaacggcggttatcatcgaaggcatctgggataagtatatggtttctggaaacctgcagaatgtgaccaacgatgccgcaaatcctcgcggaagagcgctcgccaaagggagggtcactcctttcaatgacacgcttatcgaagtgaagaaagcgtaggtgatttagatgactcggttggccatcgccatcgatttgagccgttgcacgggctgcaacacatgcgccatggcgtgcaagatgcagaacaacgtacctatgggcatgacatggaatcgcgtgctcaacgaaaactgtgagtttgaggtgggcgtgcagggaacgtatcctagtatctcgcgttcgcatctgccgatagcttgccagcattgcgagaatcccgcgtgcctgcgcgtgtgcccgacgggcgccacgtacaaggacgacaagggacgcgtcgagatcgactacgagaagtgcatcggatgccgcatgtgcatggcggcctgtccgtacaatgcacgcgtgttcaactggaacgagccggtgcgcgatcctgacttcaactacggcgacaaggacgtgcccgtgcgcggcaagggcgtagtggagaagtgcacgctctgcaaggagcgcaccgaccgcggcgacgag

SEQ ID NO: 9395 - DNA, 1302 bp, Unknown
  gut microbiota DNA sequence
cgcacgcgtgttcaactggaacgagccggtgcgcgatcctgacttcaactacggcgacaaggatgtgcccgtgcgcggcaagggcgtagtggagaagtgcacgctctgcaaggagcgcaccgaccgcggcgacgagccgatgtgcgtgcgatgctgcctttccaaggctcgcacgttcggcgacctcgacgatccggacagcgagatctcgcgcgtcgtccgcgagcgcaaggccggcgtccttctcgaagagcagggaacccgcccgcaagtccgttacttcaactaaggaggaggtgcgaaccatgaaaacctcgacaacgttcaaagcgaccgcgggcgtgctcgcagcgctgaccgtggccggcgtcgccgcctggatctaccagctggtcaacggcctgggcgtcaccggcatgagcaactccacgtcgtggggcctctacatcacgtgcttcatgttcttcgtgggcctgtcggccggcggcctcatcgtggcttcgtcggccagcgtgttccacgtggccgagtacaagaaggtggcgcttcccgctgtcgtcctgtccacggtgtgcatctgctgcgccggcatgttcgtgctcatcgaccttggcggcatcgggcgcgtgtggcgcatcctcacgggaccgaacccgatgtctcctctgttctgggatatctgcgtcatcacgttgtacctggtcataaacgtcgtgtacctgtacttcatgaagtcgaaaaagccgggcgcgcagggcaaggtggccgtcgtgtcgcgcttcgccctgcctgtcgccatcctcgtgcactcggtgacggcgtggatcttcggcctggaaatggcgcgcgaaggctggtactcggcaatcatggcgccgctgttcgtggtatcagccatggactccggcctggccctgctgctgctctcgctcatgggtctcaacaagtccggccgtttcgccaccgacaagaagctgctgtcgaacctggccggcctgctggccgtgtgcgtcgccgtcgacgggttcctcgtgggctgcgaggcgctgactatggcgtacccgggcgccgccggcgccgagacgctcgccatcatggcgacgggcgcaactgccccgttcttctggttcgagatcgtcgtgggcatcctcatcccgttctgcatcctcgtgttcgcgaagaaccgcgcgcggatgggcttggtggccgtggccagcgtgtgcgtggtgaccggcgtgttcttcaagcgcgtgtggctgctgctcacctccttcgtcgggttcaacgtggcgggcgcgccgg

SEQ ID NO: 9396 - DNA, 859 bp, Unknown
  gut microbiota DNA sequence
tgcggatgggcttggtggccgtggccagcgtgtgcgtggtggccggcgtgttcttcaagcgcgtgtggctgctgctcacctccttcgtcgggttcaacgtggcgggcgcgccgggcgtctcgcttggcaccgcggcggcccagcagggcggctcgagcatgtgggcgctcacggggacgtacgctcccacctgggtggagatcgtcgtggtcatcggcgtggtgtccctcggcgcacttgcgttcctcgttctcgcgcagaagctgctgccgggacgcgcggcgccgcgcgatgccgaggccgctgccgtcgagcgcccggcgggcgaggcggcttagccgtcccaaccgcgtctcccgtccggtgatccttggcggcgctttccctcccgcggcgcagggatcccggctcgggtgcggtatgctatgcatcatcttggttcacgttgcgcgtcctgcgctgaaaggagcttttcgccatggccaaggagattccctggaagaccctgtccgaagcctatgcgttcatcggcaactcgctgctcaagccgatgacgatgacgtcgacggtggggttggatccggcgttttgggaagcgtttccctcgttcgacgacgaggccgtggcggaggccgtcgcggcatgcgcgcgctatgccgaaggagccgtccagcgcgcggaagcaggcgaagacgagcctcagcgcgcggccgtcgaatacacgaagctgttcgtgggcccgccgtcgcccgcggctgctccatgggagacgatgtaccgcggcgaaaacgtgacggtggggttcggtcaggccacgttcgagatgcgcgagttgctgcgtgaagcggggcttgaagtg

SEQ ID NO: 9397 - DNA, 762 bp, Unknown
  gut microbiota DNA sequence
tctcagcgcgcggccgtcgaatatacgaagctgttcgtgggcccgccgtcgcccgcggctgctccatgggagacgatgtaccgcggcgagaacgtgacggtggggttcggtcaggccacgttcgagatgcgcgagttgctgcgtgaagcggggcttgaagtgcggaacgtcaacaaccagtacgaagaccacctgggcatcgagctgctgtacctctcgtcgctgtgcgcccgcgcagacgcggacgccgccgatgctcccgcgctcgaatccgtggcggacttcatcgagaagcatccgctcagctgggtcgacgcgttccgcgcgcgcattgccgaggcggcgcccgacggctatttcgtctcgcttgcagggttggctcgagctctgctcgcctggcatgccgaagcgctgcgcgtgtaggaggctcgcatggattaccttgcaacgatcgattcgcccgtgggttcggtcaccgtcgccagcgacggtgaggcgatcgtcgggttgtggcttgaggggcagaagcacttcgaagcgacgctcgaagctgccgaggatcatcccgatctgccggtactcgtcgaggcgcgcgcatggctcgaacgctacttcgcaggcgacgaccccggcgcgcttccgcccgtgaacccgcgcggcaccgcgttccagcagcgtgtgtgggcgctgctcgccgagatcccgtacggccagctgaccacgtacggctggatcgcgcgtcgcatcgaagagcagacggga

SEQ ID NO: 9398 - DNA, 364 bp, Unknown
  gut microbiota DNA sequence
gccctcagtatgccgaagaaaggcgtggcgctgtagccgtccgccgcctgcgctcaggatgacgggcgaagcgtcttagaaaagcagcgctccgtcgatggtcatcgacgtcacgttgccgtcggcatcgcaaacgagcagcacgttcgtcacggtcgcattgccttcgccgtcgaggatcgaaacgtcgttggcgtactgatagccgccctccgtcggcgtgacgctcgccgtggcggggtcgaagctctggtacgtgtagtacgtgttgtcggcgatgagccccggcagcgccgcttccacggcggcgacggccttggcctgcggatcctcggcgggctcgggcgttgcgggctctgccggg

SEQ ID NO: 9399 - DNA, 461 bp, Unknown
  gut microbiota DNA sequence
tggggtcgaagctctggtacgtgtagtacgtgttgtcggcgatgagccccggcagtgccgcttccacggcggcgacggccttggcctgcggatcctcggcgggctcgggcgttgcgggctctgccgggggctcgggctgcggctccggctctgcggttaccggggtttgatcgagcagccaggtagcttcggtggcgccgtcgttccagaacaaacgctgcgaggagtagcggtcgtcgaacgtgagcgtgccggaggccgtctctcccgcgggcaccgagatggtgttgtttgcgaacgtcgagctgacgggaggcatgccgaacgaaagaaggcattcggtggaaagctcttgcgcgctcgaatgcgccttgacctcgatctgaacattgagctggtcgtttgcgcgatcgatcgacttcacggccacttcgtagtcgcgccacacggccgattcgcca

SEQ ID NO: 9400 - DNA, 316 bp, Unknown
  gut microbiota DNA sequence
cagaaggcattcggtggaaagctcttgcgcgctcgaatgcgccttgaactcgatctgtacgttgagctggtcgtttgcgcgatcgatcgacttcacggccacttcgtagtcgcgccacacggccgattcgccaaccgaaagcgacttgagtttggacgcgtcggtaacggtgtagccgctgctcgacgcgctggcgttcgggttcggcaggttcggttcttcggccttcgagccgcatccggttagcgcgagcgcaagaaccgcgcaggcggcggtcgcaatgatcttcttgttcaaagtggatccctccatacgg

SEQ ID NO: 9401 - DNA, 5585 bp, Unknown
  gut microbiota DNA sequence
ttcgacgcgctggcgttcgggttcggcaggttcggttcttcggccttcgagccgcatccggtcagcgcgagcgcaagaaccgcgcaggcggcggtcgcaatgatcttcttgttcaaagtggatccctccatacggtgcgcgggcgcgcgaacgcgacccgatagcgtttgggtagtatcataccagttcggtcaacatgtgtgagcatcctgttgcgacatgcgtcgaacattcgccctagcgcaaaacctgcaggtgtggtttcataagcgcagattccgaaaggggcgtatggacaccacatttctgcagcaagcgttctccgattcgcaggtgctcacggtgccgtggagcatcgattatttctccgtcgtcgttggcgtgttgacgggcgctctgttcgcgtgcgaccgcaagctcgacatcatcggcacggtggtgctgggcttggtcaccgggtacggtggcggcatcatccgcgacatgctgctgcagacccacggggtgtacttcacctcgcaccccgatctcatcctcatctgcatcgccatctgcgcgttcgtgttctacttccgcgggctgttccgccatctcgatgccacggtgttcttcgccgacgcgctgtcggtgggattgttcgcgctggccggcgccagcaaggcgttctcgctcgagcagggtttcgtgttgtcggtcatcctcggcgccatcacggcggtgggcggcggcgcggtgcgcgacatctgcgtgggggagacgcccggcattttccagcagtcgaacttctacgcggtggcaggcctcggcggatcgttcgcgttcgtggccctggcctatgcgggaagcccgttgccgcttgcgggtgtggcctgcgtgttcgtcgtcgtgttcctgcgctattggagcgtgtacttcgactggaagaccagcaacgaggccgacctcaccccccatgtggcgcgcggcgtgggcaaggtgcggcgcgtcgtgtccggtgtgttcctgcacggcggcgatgccaccgtggcgcagaaggagcgtcgccgccgcggccgctggcgccgcaaccacgagaaacgcgactgaggcaacgtgttcgaagccgtgtggcgctcgcgctccctccttcacgtggcgatacgctgaagatgcgcgcgggggcttccccgggcgcgttcctatctgccatactgtccgaattaacaatgtgccgtgcgatgccatgccaggatcgacgcggaagaatacgaaggatcgtggaacatggctgatttcatcgagggcaagcgccccgtcatcgaggcgctgcgcacgggcgtgcccattaagagcattctcatggccgacaacgtgcagcgcgatggcctcatcgaggacatcctgcgcaaggcgaagcgcgccggcgccaccgtggagatggtgccgcgcaaggtgctggacggcaagtccgaccgcggcagccaccagggcgtcatggcgaaggccgcgccgttcccgtacgtgggcatcggcgacgtgatcgacgcggcgggcaagtcggccgagcagcacgacggccgcgcgctcgtgatcatcctcgaccacatcaccgacgcgggcaacctgggcgccgtgtcgcgcagcgccgaagcggtgggcgcgtgcggcatcgtgatccccaacaagcgcagcgcgcacgtggaggcgtccacgtacaagagctcggccggcgccatcgcgcacgtgcccgtggctcaggtgtcgaacctcgtgcagaccatgagccgcctcaaggaggagggcttctggatcgccggggccaccgagcatgcgaaggacctcatctggaagtcgaacctcaagggcaagatcgcactggtgatgggcaacgagcaggagggcatctcgcgcctcgtgatggagcactgcgacttcctggtgaagctgcccatcgagggcgaagtggcgtccctcaacgtggcgcaagccgccaccgcctgcatgtacgagtggcttcgccagaaccagtaggacaacggcggacgcgcaggttgacgtaggtggatcatggccaagcaacgtaagaaactcctgatcgttgatggatacaacgtgctgcgctccggcagccgctaccgcaacgcgcccaatgaggactacaccgacgacacgttcaacgccgcgcgcgagatgctcatcaacgacgtggtgaactacgccggaggcgactacaaggccgtcatcgtgttcgatggcgcgaagaacgcgttctcgaacggcgaggcggaaaccgtcggcggcgtgcgcatcgtgttctcgccggcgggccagtcggccgacaaggtcatcgagaagctggcccacgacgcgcgcgagcgccaggtggaaaccctcgtggttaccagcgacgccaccatccaagacaccacgttcggcttcggcgtggatcgcatgagtgccgacggcttctcgcgcgaggtggggatgtactacgaggaggcgcgcctcgacgaaaccccgaaggtggctcagaagaatacggtggcctcccgcatcgaccccgtcaccctcgccaagctcaaagctctccgcgacggagcgggccggtaaccggacggcatactcgaaggtgacggtttcgtgaatctccgacacttggtcaaccgtgtgtcgggttacgggcagttctggcatcccttgttggttgtttcgctacacggtgttggttatcatgcatgatgtagggtaaccaagcgcgcgtatacgcgcaggcgaagcggacaggcgggcgggtatggatcgcatcatcgacggcatcatcgcgcgacgcaaagccgtcgtggcggcgtttttgaccgtcgccgtcgtgtgtgccgcgatgatcccgttcgtgggagtcaactacgacatggtggactacctgcccgacgaagcgcaatccaccacggccgtctccatcatgaacgacgagttcgcccaggccgtccccaacgccaatgtgctcgtccacgacgtgggcattgcccaggcgcttgcgctcaagcataagatcgccgaagtggaaggcgtcgagggcgtcatgtggctcgacggcgtcgtcgacgtcaccgtgcccctcgagatggccgacgcctccaccgtcgagacgtactatcgcgatggcgctgcgctgttccaggtcaccgtggccgaaggctccgaaagcacggccgtccccgcgctgcgcgccctcgtggacgaggcgggctcgggcaacgccgtgtcgggcgaggccgccgataccgcgcagaccacggccagcacgtcgaaggaggccggcggcgcggcgctcatcctcgtgcccgtcatcatcctgttgctcgtgctgtccaccacgtcgtggatcgagcctctgctgttcatcgccgccatcggcgtttccattctcatcaacatgggtacgaacatcgtgctggggcaggtttcgttcatcacgttctcggtgagccccatcctgcaattggcggtgtcgctggactacgccatcttcctgctgcacgcgttcgcggccgagcgtcagcgcacgccgaacgtggagcgtgccatggccttggctatgcgcaggtcgctgtccaccatcgccgccagcgccgtcaccacgctgttcggtttcgccgctcttgcgttcatgcagttccaaatcggcgccgatcttggcatcaacctggtgaagggcatcgtgttcagcttcttcaccgtcatggtgttcctgccggcggtcacgctttcgctgtacaagctcatcgacaagacgcggcatcggctgctcatgccctcgttcaagaacgtgggcaaggtgctgtcgaaggtgcgcgtcccggctctcgtcctcgtgttggcgctcgtcgttcccgcgtttttgggtcagagccacaccgtgttcacctaccagaacagcgagcccgacccgaacctgcgcgccggcgccgacacgcttatgatccaagacgagttcggccagcagaacgccgtggtggtgctggtgccgcgcggtgacgtggccgccgaggctgcgctttcgcgcgacctggccgaggtcgatcatgtaacgggcgtcatctcgtacgcgtccaccgtgggcgccgccatcccgcagggcttcctcgaccagagcgtgatcgaccagttctattcgccgaactacgcgcgcatcatcgcctacaccagcaccgatgtggaaagcgacgaggcgttctccacggtggaagccgtgcagcaggcggctgcgcgccattacgacacgtactacaccgccggccagtccgcgaatctctacgacatgaagaacatcgtggcggtggacaacgtggtggtcagcgccgtagccatcatcgccatcctcatcgtgttgctggtgacgttccgctcgctcacgctgccgctcgtgctgctgctcaccatcgagtcgggcatctggatcaacctgtctatcccgtacttcatgggcgagtcggtgaacttcatcggctacctcgtcatcaacacggtgcagctgggcgccaccatcgactacggcatcctgctgaccacgcattacctgcgtcaccgtcgacgcgtcccggcgcgcaaggccgcgcaccttgcgctgggcgaaacgttcccgtcgctgctcgtgtcggccggcatcctggctactgcgggcttcgcgctgggattctcgtccagcatgtcggcggtgtccagcctgggcttcctgctcgcccgcggagcgctgctgtcgctgacgctggtcacgtgcttcctgccggcgctgctcgtgctgcttgatcgcgttatccggcgcaccacctggcatgcgaacttcgcgcctgtcgcggctgccgagcccgcggtgcccgcagcgtctgaggttgtcgacgccgcatctcccgtagcggccgagggatccgaacccgccccgctccccgcgtccgaaggagacgaatcatgaaaaagcacccttgtctgcgcacctgcgtcgtcgcgctgctcaccgtgacgctgtccgtcgcctgcgtgccgagcgcgctcgcgctggccgagggcgatgcggcgagctcttcctctgcatctgccgcttccgcctcgtccgcggcgacgtacgagaagtccgaagtggtgtacgcgaccttggcggcgagcggcgcgccgaaagcggtgtacgtggtcaaccgcttcgacgtggaggtgccgggcaccgtcgtcgaccacggcgactacacgtccgtgcagaacctcacgaacgagaccgagctggcgcgcatcggcgacgccaccacgttcgaggccgaagagggcacgctgtactaccagggagacgccgcaaacgccgcattgccgtggaatgtgtcgctgtcctacgaactggacggtaagaaggtggaggccgaccagctggccggcgcttcgggcaacttggccgtccatgtgaccaccgcgcgcaacgaggccatcgatcccgcgttctacgacagcttcatgctgcagatcacgttcacgctgccgggcgacgtcgcctccgacgtggagggcgagggagccaccatcgcgcaatccggcgaagacgctacagctgccttcaccgtcct

SEQ ID NO: 9402 - DNA, 2759 bp, Unknown
  gut microbiota DNA sequence
gtcgaccccgcgttctacgacagcttcatgctgcagatcacgttcacgctgccgggcgacgtcgtctccgacgtggagggcgagggagccaccatcgcgcaatccggcgaagacgctacagctgccttcaccgtcctgcccggtcaggatgccgatttcacgctcacggccaaggtgcggaacttcaagatgccgggcgcgcagatcgccgcgctgccgtactcgtcggtcgtcgagatgcccgacacctcaagcatggtcagcggcatgacgaacctatcggacgcggtcagcgcgctggcggagggcacgtcgtcgctcgcctcgggcgtcgacgagctgaccggcggcgcgcagagcctgtcgtcgggcgctgcggcgttcggtcaggggttgaacaggctcaacggctcgtccggccagttggtgagcgcgtcgatccagatcaacgctgcgctgtcggctgtcgcgagcggtttgcagggtgctgatttgtcgcagctcgaccagctgaggcagctgccgggcgggctgaacgcgctcgcggacgggcttgcggagctgcgtcaacaggtcgttcgcgtccagcagggctacgcgcaggcgctcccggcgctcgagggcgctatcgaaggcattcccgccggcacgttgacagaagagcagatcggaagcttgatggcccttgcaagcacgtcgcaaaaccccgacgacctcgtcacggtgaatcagcttatcgcgaactaccaggccgcccaaaccgtcaagggcacgtacgccgcgacgaaggacgccttctccggcgccgaccagctgttgggcgcgttggcggccgatgcgcaaagcggcggcgccctcgcccagcaagaagccgctctccgctccatggcgtccgcactcgaaacggccgtgggcggcggccagctcgaccaactctcccagctcgtcgaaggcatcgcgcagctatctggcgagtatggccggttccacgaaggtcttgcgcagtacgcgtcgggtctgtcggcgctcgccgagaactacggccagctcgagtccggcgcgaaccagcttgccggcggcgcgggccagctggccggcggggcgggcgagctcagcagcggcatgaaccagctcaacgcgtccaccatcacgctgcccgaaaccatgaagcggcagatcgccgacatgactgccgagttcgacttcccgaagttcgacccggtgtcgttcgtgtcgccgcagaacgccaacgtggaagccgtgcagttcgtcatgaccacggccgcaatcgagcagcccgaaacgcccgagccggaagagcccgagcaagagcaaaccatctgggatcgcttcctcgccctgttccaggggtaagcggcaccccgcttctcggcaggagccgcgagatcctctggccgtgagcggagctcgtcgctcgacgcgctgcatcaggacgacaacctgcttcgcttcgctcagacagcctgggacgccgctcgttcacggcgacggctttcagctcgcgcgtatcccgatcgcctcgaacagctcggcgcgcagctcgaggtgcgcgcgcgtgaagcccgggtcgacgtagcgtaggcgttttcccaggcgcttcgccagctgatgcgccagccggttgaacgccccgctgtccatgacctgccccttcgacacggtgaccacggtgaagccgagcgtgataagggtgctgcgtcgtcgcgcatcgctttcccgtcgttcgaggtcggcatggtgcagctcgctgtcgtactccgcggccagcttcgattcgggccagcattggtcgcatgcgcagtgcttccggtcggccatggcgcggaagctgggcggcacgtcgacgcggtagttaagtcgcggttcgggtaatccgtacccgcccaagccgtacggcaggcacagcagcatggccagcgcggactccatcggcgaggccgatcggtccaacacgtagcgcaaagcccgcagcgccttcttcctcccgcgagcgttcgaggcgccttcgacgaacgttcgcagcttcgcgaccgtcgtcagcggcgcgtcgcgacgcggtgccggccccttgtctaccaggacgtacgttccgcacaactcgtatcccagcattatgagccgtgcgagcgacagccggttcgccatctgcaagaagcagaactccggcgtgctcatcaaaaagccctcgcccgcgtcgacgaacgacctctcggggaggacggagcaaaagctgctgagcacggcaggcgttctcgtccggacgtcgacgctgcccaccagcgtgcacaggggcagggtgcatccggcaggacgccgatttccctcggaaagggtcggtcgctcgcttgaagcgagcgcacgtcgcgcacgtcttgtcgccgcttgccgcgcatcgtagccgcgcaagtaattcggccccaccgttctccagtagtcgagcgccgattcgtatccaatgagtatatccataaggtcatcgtaacataatctggcagagaatcacggtttgggcgcagctgcatcgcgattcctgcatctgtgttggctgccgaaaaacctgacctggtgcttctttggatatctaggcttttggttggaggggagatattgattttgcgcctaaaccgtgattctctgccagaatgcgaaaccgcggccgaaaatccggtagcgtcccgaaagttggtgtatcaatccgtttctggagggcgggcgaagcctgcccgagaaaaacggac

SEQ ID NO: 9403 - DNA, 841 bp, Unknown
  gut microbiota DNA sequence
gttcgtcacggcgcgcggctgggacgacctctccgccatgatgaagctgtacgaggagcaaggcgtccccgtcgacgagctgctgatcgggcagtacgtgcagaacgccgagatcgcgaaacgcttcagcgtgtactacgacctgttcacgaagtatcgcgccgactaccagatcgagcgcatactggatggctccgccgagcagagcgtggtcgaacgcgcccgcgaggcggcgttcgacgaacgggtgtcgctcatggggctgatcacggacgcgctgggcggacggctgcgcgacgccgtgctggaagagcgcgcggtggagttcgcgcacggacggctggcggcgatgcgggatgcgctgaccgtcgacgacgcgaacgcgctgcccctcctgcgcgaagaagccgcctcgctccaagcacgcttggacaccgagcgcaaagcgggcctgctgtcggacgagaagtacgtggcctaccagcgcgcgcttgcgctgatcgaccgcgcgctgcgctgcgacgctgcgggcggcggggtgccgttctcgcaggtgaaagctttgttcggggaaatggtcgacgcgctggacgcgcgcatcgcggccgtgtcgagcgctttggacaacgccttccgcttcgtggaggacgcgttcggcaatggccaggagatgctgctgctggtcaccgacctgtccgtgaaccgctatggcatggccttcatcaacgaccacggctgcgagcgctacttcgcccacaacgaagacctcctgttctacgaacgaggagccgacctggccgaccgcatcaaccgtctggatctgacagaagaagaggcttga

SEQ ID NO: 9404 - DNA, 607 bp, Unknown
  gut microbiota DNA sequence
tgaagccgtctatcaatcggttcgcgccgcactcgaaaccgcgcgcacgaaagcggcggcggcagtcaacgacgcgatggtttccgcgtattgggagatcggccggcaaatcgtcgaagcgcagggcgaccgcgccgaatacggccagcatctgatggaatacctgtccgaacggctgacagccgaattcggaaaggggttcacggaacgaaaccttcgcgccatgcgccagctgtatcttgcatatccaattcggcacacactgtgtgccgaattaagctggtcgcattaccgcctgatcatccgcatagaagaccctgttcgtcgcgatttctacgcccgctccgccgtcgaagagcgctggacggtacgacaactcgaccggcagatccactcgttctactacgaacggcttttggccactcgcgcagaaagaaaagacgaggttcgacaagagatcctaaacctcgagccgtcaaccaaagctgacggcatcctcaaagatccttacgtgctcgacttcctcgatctgaacggcaactcgaactacctggaaacggatttagagcaagcgctcatggacaaactccagcaatttctattggag

SEQ ID NO: 9405 - DNA, 1890 bp, Unknown
  gut microbiota DNA sequence
ccgagttcgcgctccaggcgcacgacggacgcggggtcggccgctttgatcttgaactgggcagacatggctctcatacctcacatgcgcgaattcgaatagttcacatcccattgtcccacaatcgaacggcgaagtcaccgaagattgcgcgggcgggcggccccgccgggatcgaggcgcgagaacgcggcggcggacgaggccggggcggggcggagccgggcgaggccgggctggggccggacgaagccagggcaaggcttccgtgggcgcgaatcgactcccatgacaatcaaggccggcattcccttccaattccgaggcttgacgcaagcgaaaccccagatggcgaaaaaagcattcgcctcagtttcgacaaaatcaaccctcgaattgccatgggaagccatttgcgcccacgttaacagaaggccggcttcttccgtcgaaattgcaagccctctccgaatgggagcgcggaaatctagcagaaaactagcggaaaccttacgccgatctagcgcgaatccaatgcgattccaacgcggtttctacgtaaatctaacgcataaccccagttcaaaggcaatttttgcaccttccattcacgcacgtgccgtgatagcctatgcacatggaaatcgccctcggacatacggcctcgatgaaattctggcgcatcgagcgcccgcctttccacacccgcgcgctgctcgctcgccgcggcgagccgtcgtgtttccgctcgggctcgcacgacgaagccaagccgagcgtcaacgatctggaaagagccgagcgcatcggaatcgatctgggaacgaatccgacggacttcatcgtccccagcccgtcttcacgcacccgctccacgcgcataacctgcagcgtgttcgacaagaggatcccggcgaaggcgttcgtcaacgtaggcgacggggtgttcgtcgtctcgcccgagctatgcctgctccttgaagcccgcacggcagccttcgcgaacctcgtcgaaacgggctatgagttctgcggaagctaccgcctggcggcctcatcggacaccggcatgctgtccgaccagcttcccctgacgtccgtgtcgaaattgcagtcgttcctctctcgcgctcgaaacctcaacggggtcggtgccgcacgcgatgccgtcgcgcacatcctgccgaactccgaatcgcccaaggagtcgcagctatccatactcagcagctttccgggacgcctcggcggatacgggttcccgcaaccgacgctgaaccaccctgtgcgcatctcggaaaaggctcgagggcggagcgtaggagaaacgtgtcgttgcgatctgttctggcccgacgcgaaactcgatgtcgagtacgacagccggctccatcatacgggcgaggccgagcaggagaaggactcggcccgcaggaccgcgctggcgtacgcgggcatcctcgtcatcaccgtttcaagcgaccaactgcacacgaggtcggagatggacaaggtcgcccacgcgatggcaaagcggctgggaacgagatgtcgctcccgagcgcacgattgggaactcaagcagatcagactacgatctcagctgcttggcaccacgcgaccggaaatgctgggcgcaaaacggcacccatgacaataatcggacgcttaaagcgcgctcgcccgacgcgccgtcggcaaaaggcctggtcgcgtttcgcaacgaagccgaagcgacgcgccaaccgccaccaaaattgccatgggaagccattcgagcccacgaagcaagcatcctcccagctcggacgccgagctccctacatctggtcgatcaggaccagcagctcctgcttcttgtggatgtcgagcttggcgtagatgcgcttc

SEQ ID NO: 9406 - DNA, 413 bp, Unknown
  gut microbiota DNA sequence
tgcgcccacgaagcaagcatcctcccagctcggacgtcgcgcttcccctacatctggtcgatcaggaccagcagctcctgcttcttgtggatgtcgagcttggcgtagatgcgcttcgagtgggtccgcatggtgttctcggaaatgaacagcatctcggcgatggccgggcccgagtagccgcgcacgagcaactccatgacctcggcctcgcggctggacagaccgtacagctcgctcaggcgcttgcagcgcttcgacacgcgatcggcaagctgcggccccgtggcagcgccggccggcgctgccacgtcgcgggagcgcaccgcctgcgtcacggtgatctcggccgacgtctccttctgcggcgccttcggcgtgagcatgaggaactccaggcggttcgtgtgcag

SEQ ID NO: 9407 - DNA, 534 bp, Unknown
  gut microbiota DNA sequence
gcgcatggtgttctcggaaatgaacagcatctcggcgatggccgggcccgagtagccgcgcacgagcagctccatgacctcggcctcgcggctggacaggccgtacagctcgctcaggcgcttgcagcgcttcgacacgcgatcggcaagctgcggccccgtggcagcgtcggccggcgctgccacgtcgcgggagcgcaccgcctgcgtcacggcgatctcggccgacgtctccttctgcggcgccttcggcgtgagcatgaggaactccaggcggttcgtgtgcagcttgcccaccttgcgccccaccagcgcgatcagcagcatcacgtacagggccaccaacgccacgaacgacagctgctccacgccaagcgccgccgcactgcccgaggcgtaacccaccaggtagccgcacatctgcatgaagtaggtgatggtgccgtagaacgcgaagatgagcaccgggttgatgccgctatcgcgcgagatctggccgcaatgcatcatcatgagcacgcacgccagcatgaa

SEQ ID NO: 9408 - DNA, 383 bp, Unknown
  gut microbiota DNA sequence
gcccaccaggtagccgcacatctgcatgaagtaggtgatggtgccgtagaacgcgaagatgaacaccgggttgatgccgctatcgcgcgagatctggccgcaatgcatcatcatgagcacgcacgccagcatgaagcacgcatacgtcacgccgcttcccaccgtggtgaactcgcctcccgcgaacggcagcacgatgaggcacgtcgccgcgatgggaaacagcacgcggaacacgctcataaggtccacgtggatggtgcgccgcctccatgccccgtaaaacacggccaccacggccagcagcgcgaacatcgagaagatgttgatggtgctgagcagctcctggtgcgtgaccgcgatgaagcggatggcgcccgagc

SEQ ID NO: 9409 - DNA, 466 bp, Unknown
  gut microbiota DNA sequence
gaggtccacgtggatggtgcgccgcctccatgccccgtaaaacacggccaccacagccagcagcgcggacatcgagaagatgttgatggtgctgagcagctcctggtgcgtgaccgcgatgaagcggatggcgcccgagcagaacccgagcgcgcccaccgacagcgccggcaggaagctttcgcacagcgcgttcttgtacaccaccgcgtgctcgcgcggcacgtcgtcgaacatgggctgctgcgcgtccgtcgcgtgcgcggcgatccacaggcacagccccgccagcggcaccagcaccaggggtataaggtaggcggtgagcgccgtggggatgaagcacaagaagaagtagagcagcgccgagaacccggtgcccttgatgagcgcaaggttgccgcgcgcgctgtcgagcgaggcgaacacgcgctgccagctcatgaggtagcccgccgaccccacg

SEQ ID NO: 9410 - DNA, 256 bp, Unknown
  gut microbiota DNA sequence
tcccaccaacatgagcggtccgaacgcgagcggcatcgaaaacgccagcacgtgcgcaccgcgcgaaaaaccgggccgcgcccatgtgaaggccatggccgcgcagaacgccaaccagaacgcggcgatctgcaccgtgtagaatacgatggtggtgagcgacgtctggcagaacgcgggcaaataggggtagatgccgccccagatggacgttgcgttgatggacagaaacgtcgcgtacccgaagcttggcacg

SEQ ID NO: 9411 - DNA, 1109 bp, Unknown
  gut microbiota DNA sequence
agcggtgagagccgtggggatgaagcacaggaagaagtacagcagcgccgagaacccggtgcccttgatgagcgcgaggttgccgcgcgcgctgtcgagcgaggcgaacacgcgctgccagctcatgaggtagcccgccgaccccacgccgatgagcgccgccgcgcccaccaccaacgccagcgcaagcgattccaggtacatggcccccaccagcatgagcggcccgaacgcaagcggcgccgagaacgccagcacatgcgccccgcgggagaggccgggacgcgcccacgtgaaggccatggccgcgcagaacgccaaccagaacacggcgatctgcaccgtgtagaatacgatggtggtgagcgacgtctggcagaacgcaggcaagtaggggtagatgccgccccagatggacgttgcgttgatggacagaaacgtcgcgtacccgaagcttggcacgtccggtttcaatgctgatggagcgcgcatgtgcgagagtccccctccgtttgccgtagggtcattctagcagacgcaccggggacggccggcggacatggtgacacggtgatgcatttgaactgggaaaatagaaatatcacaacattctggtgacaacatcgcaagcggcgagcgcctatagttcaccgcagacggagaggccgcgccaccgcatgagcggcctcgcatgaaacgagaatggagggggttgcatgtcaacagatcgcactgcgctgacccgccgcacgttcgtcgcatcggccggagcgctgggagcgctggccgcctgcggcaccgcggcgaacacgctgtacgcgtcggcgccgcaggcgttcggcgacgagagcggcgacggcgagagcatcgatgagctgcgcgaggacaagcccgagctgcccacgcccgctcgtcgcgggatcgcgctttgtcacgttgcggccatccacgagataccgcacggtcacccattctcgaaatcatcctcatgcacatataatcttcgtctcagtataaaccctatcgggcgtggcgtaacgcacaagcttcatgacccctccacggattcgcatggtttcgtacacgagaatgcacgagcttgaacgaaa

SEQ ID NO: 9412 - DNA, 187 bp, Unknown
  gut microbiota DNA sequence
cacggccatgccggcgtagtccatcgggctgccaatgccgtagatgcacgacaccgacgccaccacgatgcaatcgcgccgcgacagcaaagccgacgtggccgcatgacgcagtttctccacctcttcgttgatggacgcgtccttctcgatgaacgtgtccgacgagggcacgtacgcctcgggc

SEQ ID NO: 9413 - DNA, 429 bp, Unknown
  gut microbiota DNA sequence
gctcttcgtccggctggcgagagaaagaggttcaccatgaagatcgttaccgactcttccgttatgttctcgatggaggagggcgcgcggcgcggcatggccgtgcttccgctcgtcgtggccatcgacggccaaagctggctcgaatacgaggacgtgtcggccgaggagttcttggcgaaggtacgcgcgggcgcgctgccgcagagcgcatcgcctcctccggcgctcaccctgaaggcttacgacaccgacgaagaggtgatccacctcgccatggccgacgggctgtcgggcgcctacgaggtggcgtgcggcctcgtcaagcaggcgcgccgtcccgatcgcgtgcacgtggtgaacacgcgcacgctgtgcgtgccccatcgggtgttggcctgcacggcggtgcggctggccgaacagggg

SEQ ID NO: 9414 - DNA, 1581 bp, Unknown
  gut microbiota DNA sequence
gttgaccatcggccctcggaaacgtgccggaaaaatgaactttcggttcaagtatggtaaagagttcaagaacctgctttaatgagttcaatttatccggagcgaaattgaacttacggagcgatgatgaccgagaagcaggaaacgttcgccgagcgtctggcccgcgcgatggcagccaaaggctacaagcaggccgatctcatccgcatcgcgggagatcgcggcatgaagcttgggaaaagccaggtcagccaatatgcgaacggcaaaacggtgccccgcaggcccgtgggggaggtgctggccgacgtgctgggcgtgcccgccgcatggctgatggagggcgcgggggaaattgaacctgaaaccgtgtcccgcggcaccgcggacggcgtgagcaggccggcaagcgcatcgcagggcgcagggggagcggcccccgcagccggggcgcacgcggacgcctccgcgacgccgatcatcgaccgtaccgaaccgaggagcgataccatgcgcgagatcaagaagtcgaccaagctggacaacgtactgtacgacgtgcgcggcccggtggtggaggaagccgagcgcatggaggaggccggcgcgcgcatcctgaagctcaacatcggcaatccggcgccgttcgacttccgcgcgcctgaggagatggtgttcgacatgagccgccagctggccgaatgcgagggctactcgtcggcgaagggcctgttctcggcgcgcaaggccatcatgcagtacgcgcagctcaagcacattcagggcgtggacatcgatgacgtgtacaccggcaacggcgtgagcgagctcatcaacctcagcatgctggcgctgctggacaacggcgacgaggtgctggttccctcgcccgactacccgctgtggacggcgtgcgtcacgcttgccggcggcacgccggtgcattacgtatgcgacgaacaggcggaatggtaccccgacatggacgacatccgcaagaagatcacgagccgcacgaaggctctcgtcatcatcaacccgaacaaccccaccggctcgctctacccgcgcgaggtgctgcaagagctcgtcgacatcgcgcgcgagcacgacctcatcatcttctcggacgagatctacgaccgcatcgtcatggacggtttggagcatatctccatcgcctcgatggcgcccgacgtgttctgcgtcacgttcagcggcctgtcgaagtcgcacatggtggcggggtaccgcatcggctggatggtgctttcgggagacaaggcgcgggcgcgcgactacatcctgggcgtcaacatgctgtgcaacatgcgcatgtgctcgaacgtccccgcgcagtccatcgtgcagacggctctcggcggacaccagagcgtgcagagctacatcgtgccgggcgggcgcgtgtacgagcagcgcgagtacgtgtacaacgcgctgaacgacatccccggcgtgaccgcggtgaagcccaaggcgggcttttacatcttcccgaagctcgacgtgaagaagttcaacatcacggacgacgagaagttcgcgctcgacctgctg

SEQ ID NO: 9415 - DNA, 974 bp, Unknown
  gut microbiota DNA sequence
tcccgcgcagtccatcgtgcagacggctctcggcggccaccagagcgtgcagagctacatcgtgccgggcggacgcgtgtacgagcagcgcgagtacgtgtacaacgcgctcaacgacatccccggcgtgaccgcggtgaagcccaaggcgggcttctacatcttcccgaagctcgacgtgaagaagttcaacatcacggacgacgagaagttcgcgctcgacctgctgcacgagaagcgcctgctcgtggtgcacggcggcggcttcaactggaagaagcccgaccacttccgcgtggtgtacctgccgcgcatcgaggtgctgggcgacgccatgcgcgacctgggcgacttcttgagccgctaccggcaagcgtgagggcgcgcgcctacgccttgcctttcaccatggacagcgagatcttgccgcgatccttgtcgatgcccgtcacccacaccgtgaccgtgtcgcccaccgtcgccacctcgctcgggtgcttgacgaagcggtcggccatcttggagacgtgcacgaggccgtcctgcttcacgccgacgtccacgaacgcgccgaagtcgacgacgttgcgcactgtgccgaccagctccatccccacggtcaggtcgtcgaagtcacgcacgccctcgctgaacacgacttccggggcgtcgtcgcgggggtcgcggcccggcttttccagctcggagacgatgtcgcgcagcgtgggtgcgccaacgcccagctcggccgccagcgcgtccacgtcgccgaggcggctcgcgatgtcggggacgccgccgtcggcgagcgcttcgggcttcaccttcgcgcgcttgagcagctcatttgcgacggcgtagctttcggggtgcacgctggtggcgtccaacgggttcttgccgtccgagatgcgcagaaagcccgcgcagttctggaaggccttcgcgcccagcttcggcaccttcttcagctg

SEQ ID NO: 9416 - DNA, 2267 bp, Unknown
  gut microbiota DNA sequence
ctggcggtgttgaggtccacgcccacgcggttcaccacgttctccaccacgcccgtcagcgcgcgctcgagcgccgcctggttgaggtcgtgctggtactggcccacgccgatggcctggggcgggatcttcacgagctcggccagcggatcctggaggcggcgccccaggctcatggcgccgcgcgtggtgacgtcgaggtcgggatactcctcgcttgccagcttggaggccgagtacaccgaggcgccggcctcgttcacgatggtgtagcgcacgggcgccttcgaccgggcgatgtagtcggccaccacctcctcggtttcgcggctgcccgtcccgttgccgatgacgatgacgttgatgcggtgcttctcgacgtactccgccagctgggcctgcgtttcctttacctgggagcgcggcggggtggggtagaccgtggcgtggtcgagcagcttgccgtactcgtccagcacggccaccttgcagcccgtgcggtagccggggtcgagcgcgatgatgcgcgccccgcgcacgggacgctgctgcaggaggctctcggtgttcttggcgaacacgcggatggcatcggtctcggcgcgctcggtgagctcggcgcgcaggtcgcgctccaccgacggcgcgatcaggcgcttgtagccgtccgcgattgcggctttcaaaggggctgcgaagggaccgtcgccgcgcaggatgcggcgttccagctggctgatggccgcatcggcgtcggtgcgcactttcaccttgagcttcttctccttctcgccgcggttgacggcgaggatgcggtggttggggatgcgcgacaggggttcggagaagtcgtagtacgcctcgtaggcggtcttctcggacgcgtcgacggcttcgacggaaagcgcgccgtttcgcttggcagccgcgcgcaggcaggcgacgtgctcggcgtcgtcggcgacgacctcggccacgatgtcctgcgcgccttgcagcgcatcctcaggcgtggggtatcccgcctccgggttcacgaggccggaggccacggccagcgggtccttggcgctgcggtcttgcgcgaggatgagcagcgcgagcggctcgagcccggcgtcgcgcgccttcgaggcgcgggtggcgcgcttcttccgataaggcttgtacaggtcctcgacgcgctgcatgaccgtggcctcgtcgatcttcgcgcgcaggtcggccgtgagcttgccctgctcctcgatggcgcgcagcacctcgtccttgcgagcctcgaggttgcgcaggtaggtcaggcgctcgtccagatcgcgcagcgtcgcatcgtcgatgccgccggtggcctccttgcggtagcgagcgatgaacgggatggtgttcccttggtctacgaggtcgatgacggccgcgacctgcgcggcggtcaggttcagctcccgggcgatggtggtttggatggatggcatgggtgaatatctcgcttttggcttcaggtggtgataacgtgttcagtcattatagacgagcggacggaaagcaggagcgcgatgaatatccaggtgttcggaacgaagaagagcttcgacacgaagaaggcgcagcgttacttcaaagagcggcgcgtgaagttccagttcatcgacctgaaggagaaggggatgagcaagggcgagctggagtcggtcgcccgcgcggtcggcggcatcgatgtgctggtcgatccgaaggcgaaggatgccgacacggtgtcgctgctcgcgtacctgtcgcccgatcagaagttcgacaagctgctggagaaccagcacgtgctggccgagcccgtggtgcgcaacggcaagcaggccacggtcggctacgctcccgacgtgtggaagacgtgggagtgatcgccatgcgtcttcgcgcatccggatgtcgccgagcgaacgctttgccgacggggcgcgccgatcggtttcttcgcggcattcgagcccgctcgggcgggatagtatagaatgagcgctatgctgtagaattcgacgaggaggttgtatcgtggacgcgaccgatatgcggtatctggaacttctatcccggctgtttccctctgcggacaaggcttcggcggagatcatcaacctcagcgccattttgaatctgccgaaagggaccgagttcttcgcctccgacatccacggcgagtacgaggcgttctcccacaccctgaggaacggctcgggctccatccggctcaagatcgacgacgtgttcggcga

SEQ ID NO: 9417 - DNA, 166 bp, Unknown
  gut microbiota DNA sequence
caccgatcgcggcggcgcgctcgtcgaggcgctgtgcctgctcatccagcgtttggccatcgagcgcctgcacatcgtcggcgacatctacgatcgcgggccgtatccgcacatcatcatggacgcgctcatggagcaccactccctcgacatccagtggggcaac

SEQ ID NO: 9418 - DNA, 1089 bp, Unknown
  gut microbiota DNA sequence
ttcgctgagcgagaacgagaagcgttcgctggccacgctcatctactatccgcgcgagaagatggagctcgtgctgtcgcaggtggacgatgccgaagcgtggtacgccgtcacgctgcagcgcctcgtcgccgtgtgcaagcgcgccgcgcagaagtacacgcgctcgcgcgtccgcaaggcgctgccgaaggatttcgcctacatcatcgaggagctgatgacggagaaccgccacggcgttgacaagcaggcctactacgccgccatcgtggacgccgtcatccgaaccgatcgcggcggcgcgctcgtcgaggcgctgtgcctgctcatccagcgcttggctatcgagcgcctgcacatcgtcggcgacatctacgaccgcgggccgtatccgcacatcatcatggacgcgctcatggagcaccactccctcgacatccagtggggcaaccacgacatcgtgtggatgggcgcctcgctaggccagcgcggctgcatcgcgcacgtcgtgcgcaactgcgcgcgctacggcaatctgtccatcctggaggacgcctacggcatcaacatcctgcccttggcctcgttcgcgctcgaggcgtacaaggacgacccgtgcgtcgccttcggcctcaagggcaacccggacctcccgccgcaggagctggagatgaacgtcaagatccagaaggccatggccatcatccagttcaaggtggaggcgcagctcatcgacgagaaccccggcttcggcctggaggatcgcaagctgctcgacaagatcgactacgagaacggcacggtgatgctggacggcgtcgcctacgagctgaccgacacggtgttccccacggtggatccggccgacccttaccggctgacgcccgaggaggaagaggtcatgcagcgcctcgagcaggcgttcacgggctgcgagaagctgcagcgccacatgcgcttcttcctggacgcgggcagcctgtacaaggtttgcaacggcaacctgctgttccacgcatgcgtgccgctgaacgccgacggctccctcatggagacggaggtgttcggcgagacgtacaagggccg

SEQ ID NO: 9419 - DNA, 3031 bp, Unknown
  gut microbiota DNA sequence
tgcctcgctcggccagcgcggctgcatcgcgcacgtcgtgcgcaactgcgcgcgctacggcaacctgtccatcctggaggacgcctacggcatcaacgtcctgcccttggcctcgttcgcgctcgaagcgtacaaggacgatccgtgcgtcgccttcggcctcaagggcaatccggatctcccgccgcaggagctggagatgaacgtcaagatccagaaggccatggccgtcatccagttcaaggtggaagcgcagctcatcgacgagaaccccggcttcggcctggaggatcgcaagctgctcgacaagatcgactacgagcgtggcacggtgatgctggacggcatcgaatacgagctgaccgacacggtgttccccacggtggatccggccgacccttatcggctgacgcccgaggaggaggacgtcatgcagcgcctcgagcaggcgttcacgggctgcgagaagctgcagcgccatatgcgcttcttcctggacgcgggcagcctgtacaagatatgcaacggcaacctgctgttccacgcgtgcgtgccgctgaacgccgacggctccctcatggagacggaggtgttcggcgagacgtacaagggccgcgcgctgtacgacgtcatggagcgctacgtgcgcgcggcgttcgacgacgccgaccctgagctcgccaagcgcgggcgcgaccttctgtggtatatgtggctgggcgagggatcgcccctgttcgccaagagcaagatggccacgttcgagctgtacctcatcgccgagaaggaagcgcgcaaggaggtcaagaacccgttctactcctatctcgacgacgagcgcgtgatgggcggcatcttcgaggacttcggcatggatcccgagacgtcgcgcatcgtgtgcgggcacgtgccggtgaaggtgaaggacggcgaggatccggtgaagtgcggcggccgcgtgctcaccatcgacggcggcttctcgaaggcctaccagcccaccaccggcatcgccggctacacgctgatctcgaactcctacggcttcgtgctggcggctcacgagccgctcgagtcgatgcgcgccgccgtggtgaacgagctggacatccattcgtcgcgcaaggtggtcgagctggtggacaagcgcacgctggtggccgacaccgacaacggcgcggtgctcaagcagcagatagcggacttggaagagctgctggaagcctaccggtgcggcgcgatttccgagaaggaataggctgtttcgtgaaaagccttctcaagcgcgataatgcgtttcctgcttgagaaggcttgcgctttcgaaacgaaggagtgccaatgaggaagttgccgacatgcgtgctggagaacgatgcgctgtccgtgcgcgtttcgcccgtgggcgcggagctgcagagcgtcgtgtgcggcggcgtcgagcgcatgtggtcgggcgaccctgcggtgtggggtcgtcgggctccgttgctgttcccgctgatcgggcgcttgcgcgacggttggtacgcgaacgggggccgacgggtggatgcgctgatgcacggtttctgccgcgaccgcttgttttccgccgagcaggtttcggatgtgcgcgtccgtttcgagacggcttccgacgagcggatccgggccgtctatcccttcgatttccgattgaccgtcgacttcacgctcgagggttcctcgatcgtcaagtcgcacaccgttgagaacctgggcgacgttcccctgccgttcgagctgggcggccacgaagcgtacgcgacgcgcttgatgccgggagagcgcatggtggattgcttcgtgcgcttcgaggacatcgataagctcgagatgttcgggatggacgaggcggggatactgacgctgccgaagatcgaagtgccgctggaagacggccgcttgaccaggacgcccgagcagctgggcatcgataccgtcgtgctggagaacgttcccggcagcgtcgcgacgctaggcagctcgaagagcggctacgaggtgacggtggagttccccgatttcccctatctggggatttggacgaaagccggccaaggcgatgcccgctacctgtgcatcgagccctggtccgcgctgcccgacgcacgcttctccccacgtgagctgtccgagaagcccggcgtgcgcacgcttgcgcccggggagcgtgccgtgctggaataccggatgacgtttcgctaggaggcgccatggaggagaagtgcaggtgctcgtgggcgggcgacgtgcccgtgtacgtcgactaccacgataacgagtggggaaggcccacccatgacgatcgcatgctgttcgagctgttggttttggagggcgcgcaggcgggcctctcgtggttgaccatcttgaagaagcgcgaggcgtaccgcgaagcgttcgacggcttcgaccctgccaaggtggcgctctacgacgaggccaaggtcgaagagctcatggcgaacgaggggatcgtgcgcaaccgcctcaagatcaacgcggccataaccaacgcgaagctgtttctggacgtggcccgcgagttcggaagcttcgatgcgttcatctggggctatgtggatggcgaacccatcgtgaaccgctggaaaacccaggccgacgtgccggcgaccacgccgctttccgaccgcatcagcaaggatctcaagaagcgcggcttcaagttcgtcggctccaccatcgtgtatgcctacctgcaatccatcggcatcgtgaacgaccacgtggtcgattgctatgcgtaccgggagcttacgtcgtaaggatggttcggcctccgtcgtcgtggcgggcatttgaaagctaggccgatgccgtttccccctcttcgtccagcagcttgcgcgcgtatgcaattgcatcgtcgatattgctgcggaaatggtcttctcccaccatgtccacgaaacccgcgcggcgcatggttttcatcggctgctcgttggcgtgcgagaagatgaggctgacgccgttctcgcggcag

SEQ ID NO: 9420 - DNA, 520 bp, Unknown
  gut microbiota DNA sequence
agcgattgcatcgtcgatattgctgcggaaatggtcttctcccaccatgtccacgaaaccagcgcggcgcatggttttcatcggctgctcgttggcgtgcgagaagatgaggctgacgccgttctcgcggcagtacccgtagaggttctccagcgcgttcatgcccgtcgaatcgagcgatggcacgcctcgcatgcggatgatcaggtacttcgtgaaggatttcaccgatatgtcggatatgcggtcggtcatgccgaagaacatgggtccgttgatctcgtacacgcgcacgctttcagggagttcgcgcaggtgcgtgacctcggaatcctcgtcgcagtagtatttccagccgcgaacctcggtctcctcgctcaccatcttcatgaacaggacgaccgtgatcaacatgcccacggcaatcgccaccaccaggtcgaacacgacggtcagcgcgaaggtgagcagcagcgtggccaccgctcctcgggaggccgtcttgcacaagtgtgcgaaa

SEQ ID NO: 9421 - DNA, 925 bp, Unknown
  gut microbiota DNA sequence
aaccgtgatcaacatgcccacggcaatcgccaccaccaggtcgaacactacggtcagcgcgaaggtgagcagcagcgtggccaccgctcctcgggaggccgtcttgcacaagtgtgcgaaattgcgccatcccgacatgttgtaggcgacgtgcagcaagatggccgcgatggtcggcatggggatgagagccgcgtagggcatgaagaacacgaggacgatcagcagcacgagcgcatgggtcatgccggcgacgggcgttctgcctccgttcttcacgttcgcggcggtgcgcgcgatggcgccggttgcggggattccgccgaatagtaccgagccgatgttgcccacgccctgcgcaaccagctccatgttgctgcggtggtgcgagctgatcatgctgtcggcgacgacgcaggacaggagcgattcgatcgcggccaggatggcgatggtgatgccgttgggaagctggtcggccagcaggtcgacgttgagttggggaatgcggaattcgggcaggtcgctgctgatgacgtacaggtcgccgatggtgctcacctgcatgccgaagccgctgaccagggcgattcccacgatgagcgcgacaagggatccggggatgcgttcgctgaccttaggccaggcgaacaggatggcgaggcagaccgctcccacgacgaacgcttgccagttggccgttccgatgctttgggcgacggcctgcagcttgtccatagtctcgaccgtgggcgcgccggcggggaaggcgaggccgaggaagtctttgacttggccgatgacgagggtcacggcgatgcctgccgtaaagcccgtggtgatggtgtagggaacgaaccggatgagcgatcccagcttgaagaagcccatcagcatgagcagcacgccggcgatgacggtggct

SEQ ID NO: 9422 - DNA, 7292 bp, Unknown
  gut microbiota DNA sequence
attgcccaatgacgagggtcacggcgatgcccgccgtaaagcccgtggtgatggtgtaggggacgaaccggatgagcgatcccagcttgaagaagcccatcagcatgagcagcacgccggcgatgacggtggctgcgacgaggccgtccatgccgtcggttgccacgatgcctgcaacgatggtggcgaacgccgccgtggggcccgagatttgcacgcggctgccgccgaggaacgcgatgaggaacccggcgacgatggccgtgtaaaggccttgctcagggctcacgcccgaagcgatggccagcgcgatggaaagaggcagcgccaccacggccaccatgacgcccgaaacaacgtctttgggaagctgtcgtttgagctcttcgctgtcggtgtgcttgatgatgctgaaaagtatcggtttgatcttgtcgcgttgcaatgctctgctcttccatgtcgtcgtttctgctcagtgcgcgcgaaaaagcgttccgcccggatcgaccgggcggaacgcaagcgaatactatgcggttggattcgattttgcgcctcgccattatactgcaagattacaagagggcaacaaatcggggaaatgcgaagcatcgacaagggctgaagcgctgtgtcgacagatgctcggagtctcgtatgatactcggggcgatgagcattccgtggcgaacgggcggtgttctgatattgtccgcgagttcgtaagcttcgatgcgttccgttggagcgcatcacccagaggcttcggcttacaacctgatggacagaatacccatcgagcttgctagaagaacgagaacgacgactgctgccaagacgatcagggctgctgttgcgggtttgcctagtttcatcgattctccctccggatgttcttcgtcaggcgctctgtgtgctgatagaattataccgaacctgaaaactgattattcgagcgagggtttattttggaagaacgcaaacggggtggggcaagcggcttcgacgcgagcgaagcggaggagcgcgagattcgcctagagcaagcgcgcaccgcgagaatcgaggcggaagaacgtagtcggaagaaggaatctcgcagggcttccaggaaagcgttgggacgatttgcaaagcgctttcccctgaaagtgatattgccgatcgcagcggttgcgttggttgcgatcttcggcttcgtcctgccttacgtcatggacgacgatgagacccaatacgttacagagtccgatctgaagtccgccgtcgacatcgacaacctctcgaccatcgactacgtgtaccacggcatcgcggagaagcacagcacgttcctttggcaggatcgggtggactatcgcgtcaagtaccaggcgcacgttcgcgcgagctacaagcttgtcgatatcgagtttcgcgtcgatagggacaacggggttgcgactgcgtaccttcccgaggcggagatcggcgagccgcagctcgatcacaaggagttcggctatctccccgagaacgcaaccgcggacatgaaggacgtcatcgccctgtgccgcgaggatgcagcgtcggacgtggacagggacgagatcagaagagaggccgacgcgagcctgcgggataccgtgtcggctctcacgaagcatttgctcggcgacgatctgaagcttgaattcaagcctatttccgagtacagcgaggaggttgcggctgatgaataggaaacgcttcgtttgccttgcgcttgtcggcgtgctcgcttttgcgggccttgccggatgcggcaaggaggaagagtcccctgatttctccgggtattcgaagatcgccgagcttgctacgatcaagtgcgtgtaccacaacgtcgccgagatttacaacgacggaaccaacatgctgttcggcatcaacgtcggctacaagaaggcgtggttcgagtacgatggaaccatgcagcttggcgtcgacgtgtcgaaggtccgtatcgagggccccgacgagaacaacgtggtgacgatcgttattccgcaggctcaggttcttggcgttccagacgcggacgagagcacgttttccgatgtctacagcgacacgggcctgctgacctcgatcacctccgtcgatcaggccgaggcgtacgctgcggcgcaagacaagatgagggaaagcgccgagggcaacgagatgctgataagggaagcgcgcgatcgggcggagatgcttttgttccaatacgtggaaggagttggcaagaagctcggcgtcgaatacgagattcgcgtcaaggatgccgagtagcgttcgacgggcggggcatgcgcctgcggctgccttcgccccgtcgaacgccgcggtgtccttctccttttgtgtgcttgtcgctgcgccttcgcattgccgctgttcagagggcgattcccttttcatggaggactctcgtcacgtttgttgcggtcgcttccgattcgtcggtcagcaggccatcgtcggtaagcatcggcgtgtctaaaacggtcttgattgccacggcgactcctgcgcacgatgcaacgatgcgctttgcctcgtcgtcgtacgagctgaaatcgtcgccttgcttcgagaagttgtcttccatctcgaagacaagcggcaaaaagcgagcatcaagtctcgcgatcaggttgtagaacaagtaggttctgcctcggatggcctcgcattgcaggatcgctgtttccagttgcgaagcgatctgcatcgcctctgccctgttcgtgcgagctttatcaagctccttgtcagctgtgcgccctgtaacgagaccgaggacgagtagagcggggccggcaaccaggccgcctagaacggctgtgcctccagccattcccaggccgcccgcagcaatcgatccgccgccgaaaaacgcgagcgtggcgttggttgccgctgctccgctcaacgatgcgatggcggtgcctgttgatgcacaggcgagagcctgtgctgcgccgtacgctccgaaggcaacgagtgcgccgccggctgttccggcaactgcgccgccggtaagcgatgccgcgaaattcaccatggacttgagctcgtcgaactctttctcatcaatgcgcatcttagagagctctgaaagaccctctgtttccttgaagtcgacgttcttcaatttcgtgaatgtgtccaggaatgtcttcatgctgttctcgaggacgaacaccttttcttcgcctaggttggacaacgcggttccgcatgattcgcgatgcgcgttaagccgagccgtggtcgactcgacgagggcgtttgcatcttcgttcatttttgtcgcggtacgggcgtcgatgcctgctttaactgatttgacgactccggctccaccggttgccaccgcggctccgatgaagaacactggcaaaggcatggtatcctccttagagagcgatgaggtcgcgaatgcttttgaatatgatttcttgacgcttctcgacttcggccacgagaggggcaacttgcgaatacggcctgccggatgtcttgagccagcaagcctcgcgctcgagatcggaaagcgcgaatgcgctgttttcgagttcggcgaaccggtctcgcctaatcccgagagatgtggcggcatggctggcaatttcgatttccggctcggcgtaatcttgatcgctcattgcggtgacaagcatgttccagacaagaagggatggatccatgagatcgtcgtccgatgattccgctgtttctatctccttgtcgacaaggtcgttgatcgcgtcggttcgactatcgttttcgttgattttggaagtcgcatcttcgcattgctgcaggagcgaatccctgatctgcgcgtagttctgcagcagggcatttccgatcaggtcgaatttctccaattcctccggcttgacatctccgtcggcggccatgaggtagtacaggatccgcgttgccccgatcttcgagatgcggtcatcctgaagggctatgccgttgatcctttcgttttcgtcgctcgttgtgcgagctaccagatcagaaactgcagcccccgcgttctcggcgaagtcggaagccgtatttttggcgctctgcagggcggcggcggccttttcctgaacctttttcgcatcgctgatgtcaatgctttggatgctctttttagcaatagaggtcgcatcgctcgcggcgttcgccgctgccgtaattgccccgtcgaagctttttttcaggtcctcaagacccatgtccacctcctgaagattagaggatcagagcgtcgtccgatcccattaacgtttcgaactctcttttgtttgcaaattgggtatccctgcccaaagctttctgtatcgcgacgctgcccttgatgacgaagtcggcatttttctctgcaatgccgcgatccatgtcgttcatgccgtttgcaaacgcttcgagatcgtcgattatgtagtcgccgacttgctgctctaggtttttctcgaacttccggagctgctcgatgaagattgccgccttcgtttctgacagaaccatcttttcgtggagaagcttcgtctctttcgattcgttgtcgatctcctttgcgatcgctattgtagcgcgacccgctccgacatagttgatgcgagccgtcattcttcccgctagcagaatccagttcgcccctgattccatagccgcgcgagtggcggcatccgctgtgtccgcaatactgaaagtcatagacgagatggcgagcattcggtcgaccgtcctgttcccaatgggaacgatatggctccagtcgatgtcggcaagatcgtcgtgggaggatgcttccctggccagtcggctgagaaaaaagcccgtgcgcacaaacgcctcgttcaacagcacgggaagcgtttgctttgcggcggccttgtacagcggaatctcgcgacgtaagtcgattctttgcttcgtgtaaagctgatcgaccattccgggcaacccgctgtcctttaggccgggaagcgaagatacctcatgtaagagcgaaacgagaactccgggtacgcccatgcctccgccgggagtgttcttggagcctcccatgtcgcttacgagatgcccgaaccacctagtcgcgcatctcgccacttcggcaagtatcggtgcggaggccgcaagtcttgccagtctgcgaacggcctcgggcatttgctccgctgcttcttcctcgtaggcgtgctcggccagcgagactatccagttcagcattcccgtgatcgcgacaggaatcagaatctgcgcaacgtcctttgccgctgttccaaccatcacgaagtgccatttgccgtttctgtccacaaacgttccgaccctcaagaactggacggccatcgcggccagaaggccgattggagtggggtggtgcgcgagatccgccaggtggtggttgctagcagaaacgcttatgctcttgcctttccagatgttgtcttgagggacctcgtaactcgattcgaggttttttatggcatcgacgagcctgcccccgtcgccctctttctgtcctgcgaactgctggatgaactggttcacctggcgatgcgaaaggctgatgtccgcagcttcgattttggtttctccgacgatcggcgagtccatagctcccgccaatagtccgctgaataccgcgaatgcgtaatcgtctctgttcgcggtgcatgtgtagcgcttgaggttttcttcgacatccgagagcttccggttgattaagtccagagactcgcattcggcgagtccttcggtgctgagagatatctcggcggagacaagttccgtcatcccgaaccctttcgtttacagtttgcgcccgcaaagttctcgcttttgcgcttttgcaaggtatcgttaaagtatatcttcttctatcgactttgatcctgcgctcttccatgagtctgcgcgaagaagcccgatatcgatgattcgtggtcttgcaatggtcgttctcttaattgatctgattctcgcatctggctatttaatcgatgcggcgggatcgttatattcgagtcgaggaaacttgagggttgagcgaaggagtgaaagcggtggagcgaaatgctccgcgtaagaagaacggaggcttatgatggtggaaaacgcggttatcgaaagcctgaagactcggcgtgcggtgaggggttatgcggacaggcccgtggagcgcgagaagcttgacgcgatcctggaggctgcgacctatgcgcctacgggaatgggagcccagtcgcccgtgatcgtgctggtggaaagcaaggaggtcagggacaaggtggccgccctcaacgcaggggtgatgggacgtgacatcgatcccttctacggggctcctgcggttgctatcgttttcggccataggggtgctgcgcctacctggttcgaagatgcctgtcttgtggcgggcaaccttctgaatgcggcgcatgccgtcggggtcgactcgtgcttcatctatcgtgccaaggaggtcttcgagaccgacgagggtcgagcgcttttgaaggattggggtctcgacggcgattacgtgggcgttgccaactgtatcctgggttacggcgacggccctgcgcccgagccgaagcctcgcaaggacgggtacgtgaggatcgtctagtcggagagcgttggggatcggttccgaggggtgagagggtagtcatgttcaaaagccctttcagccgctggtgcgaagcatcttgttcgattgatgtctgaaaaaagaacaattcatacagatttgtatagcatatagatgtcatacggcatcactttgcgctcagtggtataatcgttccaaaaaggaagggagacacggcatggccactgcagttaaaccgacaacggttcgcgtcgatgagaacctcaaggcccaggcgaacgagatcctcggatctgtcgggttgagctacaacacttacgttgtcatggcgacgcaccagctggtgaaccagcgcaggatccctttcgagatcgttccggcgggcggggtcccgaacgaggagacccgccgcgctctggtcgccgcggaggcgaaggagctcggcctcatccccgacgatgcgcccgcctttgacgatatcgacggactcgtggcgttcctcgaggaggagtagcccgtgtacgagatcaaggtcgagccggccttcaaggcggactacgcccgcgtcatgaaacggcacccccgcttgaggggcgaattcaaggaggcggtctcggagctcatgaggaccggcgcggtgccg

SEQ ID NO: 9423 - DNA, 244 bp, Unknown
  gut microbiota DNA sequence
cgtcatcttgacgatcggctccaacaacgtcgagaaccaccccgtttcgtcgaagtgggtgcagagggcgctcgacaacggcgcgacgtggatcgtcgtcgacccgcgctacacgcgctcggccgagatggcggacatctactgtcctatccgctcgggcaccgacatcgccttctacggcggtctgttcaactacattctcgagcacgacctgtggcagcacgagtacgtgctgaactacacg

SEQ ID NO: 9424 - DNA, 283 bp, Unknown
  gut microbiota DNA sequence
tccgcgaggcgcgccaggccgtcgcgtcccatgatcagttccagtttcgaggtggcggtgtcgccggttgccatcatgcgcgtcctttctgtcggcgatcatggtagcacggccgccggatcggccgcgcgagaagcccgccgcattgtcgcccgaagcggtcggtttccgagtccggaccgtccgtttcgaacgacggcggtcgcggcggcatggcgcctgcgatgcgcgtcgacgcatcatcatcgctccgaaaacacgcctcacgcgctgtggcgtgttt

SEQ ID NO: 9425 - DNA, 1028 bp, Unknown
  gut microbiota DNA sequence
cacgagcttccagtcggctgcgggctcgacggccagcgcctccgactgtgaggacagctcgaacgccatggtggtggcgaacgctgcgccggcggctttgaagaagcccctgcgtgacaggttcatgtcctcgttctccttccttctcgtccgttgagaatcatgcgccgaaaccagcgggggacgtcgccgagggcatgggagacgtcgtcctgctcgtggtaccggtacgcgcatgccttggccgagccggcagccctccaccgcccgaccgccgcgatcttagcaagcgccttgcgacgcggcgtaattagtttctgatgatatgggtgtttttatgcgcaaactctcaagattccttcgtggaatattcggtaaacgtcattccgcgccgaacgccgcagggcgaacggcctgtttccgccgatgggcggggatacggttccggtaggcggtacgtttacggcggcggtgcggtatcgacgagcggcgcggataacgcgcaggcggcaggttgctcaggacgcggacgggactgctatactgctgatgacgaccgatccggcttacgcgaaaggaatcccatgagcgagaccgagcgcatacggctcacccgcctcaccgagaagggcggttgagcggcgaagtggggtccgggagacctcgaagagatactgaaggacatcgcgccgccgcccgacgccgatctgctgctgggcttcgacacgtccgacgacgccgccgtctaccgcctgaacgacgacacggccgcggtgctgacgctcgacttcttcacgccggtggcggacgacccctacgagttcggcgccatcgccgcggcgaacgcgctgtccgacgtgttcgccatgggggcgaagcctctgacggcgctcaacatcctcgcgttcccgtgcagtctgggcaccgacgtggtgggcgaggtgctgcgcggcggggccgacaaggtgcgcgaggcgggcgcgttcgtggtgggcggccactccatcgaggacgacgagccgaagtac

SEQ ID NO: 9426 - DNA, 2119 bp, Unknown
  gut microbiota DNA sequence
ggcgtgtttttggggcgatgatgcttcccggggaacttgcgggtttgcaatcgcacgcccttcgcctagaatggacgcatggaattcgcgaacgacaacgacatcctctccttcccagccgtggtttcggcgggtcgatggctttagcttcaagactcgcgcccgcgggcttgaagcatcctcatatccggtagaagaccatcgtcccagaaggggatcatcatgcagcttaccaacgaccagttcgccctcatcaagcagcagttcgccacgctgaaggagcgctcggcgttttacgccgccaagttcgagggcatcgacctctccgatgtgcaaacccaggaggacttcgagaagcttccgttctccgagaaggacgacctgcgcaacgcctatccgctgggcttgcaggccgtgcccgacgaggagatcgtgcgcatccacagctccagcggcaccacgggcacgccggtcatcatcccctacacgcagcaggacgtcaccgactgggccatccagttcgcacgctgctacgagacggcgggcatcacgaaccgcgaccgcatccatatcacccccggctacggcctgtggacggcgggcatcggcttccagctgggcgccgagcgcctgggcgccatgactatccccatggggccgggcaataccgagaagcagctgcgcatgatgcaggacctcaaatccaccgtgctgtgcgccaccagctcctacgcgctgctgctggccgaggagatcgccgagcgcggcatccgcgaccgcatctgcctgcgcaagggcgtcatcggcagcgagcggtggggcgacaagatgcgccagcgcatcgccggcgagctgggcgtggagatctacgacatctacggcctgaccgaggtgtacggccctggcatcggcatatcgtgcgacgagcatcacggcatgcacatttgggacgattacgtgtacgtggaagtggtcgatcccgacaccggtgcgcccgtgcccgacggcgaggtgggcgagctcgtgctgaccacgctgcgcaagcagggcgccccgctcatccgctaccgcacgcacgacctcacgcgcatcatcccgggcgactgcaagtgcggcttcggccatcgccacccgcgcatcgacacgctgaccggccgcaccgacgacatgttcaaggtgaagggctgcaacatcttccccgcccaggtggaggaagtcatcgccgccaccgacggcacgtccagcgagtaccaggtgatgatcgagaacatcagcggcaaggatgtgctcaccgtgctgttcgaaaccccgctgcaagacgaggcgaaggcgcgcgccgaggaggagctggccctcatcttcaaggcgaagtgcggctgcactcccgatgccaagggtgttcccatgggcgagttgccccgctccgagaagaaaacgaagcgcatcttcgacagccgatactagtcgcaaagcggagctttctcgtacgtggagggaggcaccctgacgggctgcctccctctttttgcgcgcgaaccgccttcttttgtgcaagctagatgatgcggaagcttcggatgccttccggatgtttcacgtgaaacatccgttcggcggcggagggggatttgcgaattttttgcatgatgggggcgctccactatggtagagtatgcgcatgcattccgcgaagggacataccgccgtcgaacagcgctggcagcttcagctcgccgtcgcggctgtgtgccgctccctcgctccgcgtcccgcggactcgcttgtaacggtattcgctgcgcagccggcttcgccccacgcgtccgatgtcgccgcgacgaccggcgcaatcgacgcggtcagcgctgtcgcccatcgtgcggccgatgcctctgacgcgcccctggccggtcgaaccgcctaccgtgccgtttcctattattcctatcgatacctctagcacatgggtttgcccgtggtgcttcgtcggcgtcgtgccgacgggcgttgcgttccggcaaagtcatgtgcgccaccgcgcgggcctttcccgacgcgatgttccacgtgaaacaattcatcgcattgcagtgcgacaaaggaacaaatgtttcacgtg

SEQ ID NO: 9427 - DNA, 178 bp, Unknown
  gut microbiota DNA sequence
cttcgtgcgagccggcacgccgagcgcccacagctcgttgtccagttccttcatgaactcgttgacggtgggacggatggcgccgaagtaatgctcgtcgagctcttggcccttgcagggggcgtaaccgaacagggtgcggcccgtcatgatgagatcctggcgcttggcataggcc

SEQ ID NO: 9428 - DNA, 601 bp, Unknown
  gut microbiota DNA sequence
cccgcgcacgtggacgtgcccgcctacatcgcgctcacggcggcgggcgactacgccggtgccgtcaacatggtgcgcaaggataacccgtttcccacggcttgcgcgttcgtgtgcgagcatccttgcgagacgcggtgccgccgcacgctcatcgatgcgcccatcaacatccgcgggatcaagaagttcgcggtcgaccagatgccagccgaccaggtggcgcccccgccgcgcagcgtggacaccgcgcgcaccgtcgccgtcatcggcggcgggcccagcgggctcacctgcgcgtacttcctcgcccttatggggcatcgcgtgacggtgttcgaggaacgcgcccagctgggcggcatgctgcgctacggcatccccgcgtatcgctttccgcgcgagcgcttggacgaggatatccgcggcatcctgaacgcgggcaccatcacggcgcggtgcggcgagcgcatcggcgcgcacgagatggccgagatcgccgacacgtaccatgcggtgtacgtggccgtcggcgcgcagacgggcaagtcgctgcgcatcgacggcgtggatgccgaaggcgtcgtctcggcagtggatt

SEQ ID NO: 9429 - DNA, 699 bp, Unknown
  gut microbiota DNA sequence
aacgaggacatccgcggcattctgaacgccggcaccatcacggcccgctgcggcgaagcggtgggcgcgcatgaaatggccgagatcgccgacacgtaccatgcggtgtacgtttccatcggcgcgcagacgggcaagtcgctgcgcatcgacggcgtggatgccgaaggcgtcgtctcggcagtggatttgctgggggccatcggcgacggcgactatcccgacttcacgggcaagcgcgtggtggtggtgggcggcggcaacgtggccatggactgcgcgcgcacgtcggtgcgcgccggggcggacgaggtctcggtggtgtaccggcgccgcaaggacgacatgacggcgctgccggctgaggtggagagcgccatcgccgagggcgtggagatgatcgtgctggaggcgcccgtcagcatcgaggcggacgagcgcgggcattgcacggcgctcatcacgcagccgcagatgatcggtcccgtgcgcggcggccgtccggcgccggtcgccgccgacaagccgaagcggcgcatcgaggccgacgtcatcctcattgccgtgggccagaacgtggtgtccggcccgttcgaggagttcggcttgcagaccacctggggctgtttcaatgccgacgatcatcttgcggccgaagggtacgaccatgtgttcgtgggcggcgactgccagaccggc

SEQ ID NO: 9430 - DNA, 469 bp, Unknown
  gut microbiota DNA sequence
ccagcatcgaggtggacgagcgcggacattgcacggcgctcatcacgcagccgcagatgatcggtcccgtgcgcggcggccgtccggcgccgatggcggccgacaagccgacgcgccgcatagaagccgacatcatcctcatcgccgtggggcaggatgtggtgtcgggcccgttcgaggagttcggcatgagcaccacctggggttgcttcaatgccgacgatcatcttgcggccgaagggtacgaccatgtgttcgtgggcggcgactgccagaccggcccctctacggtgatccgcgccatcggggcgggaaaggtggctgcgcgcaacatcgacgagttcctgggttaccatcacaagctgccgtgtgacatcgaggtgcccgaaccgctgccgaacgaccgcacgcccaaggggcgcgtggagataaccgagcgtcccgcgcgcgagcggcggctcgatttcga

SEQ ID NO: 9431 - DNA, 2312 bp, Unknown
  gut microbiota DNA sequence
cacggtgatccgcgccatcggggcggggaaggttgccgcgcgcaatatcgacgagttcttgggataccatcacaagctgccgtgcgacatcgacgtgcccgaaccgttgcagaacgaccgcacgcccaaggggcgcgtggagataaccgagcgtcccgcgcgcgagcggcggctcgatttcgatggcgtcgagaacggaatgagccgcgaagaggtcgtgcaggagtgcgggcgctgcctgcgctgcgatcgtttcggctgcggcgttatggaaggaggcaggcaccagtatgcctagcatcacgatagacgggatcgccctcgacgttgccgaagggtccaccatcctcgatgccgcgcgcgttgccggcatccgcatccccacgctgtgcttcctgaaagagcgcagcgccatcgcctcgtgccgcgtgtgcgtcgtggacgtggaagggttcgaccaaccggttccctcgtgcgctacgtccgtgcaagacggcatgaaggtgaccacctcctcgccgcgcgtcgaggcgtaccgacgcatcgcgctggagctcatcattgccgatcacggccttgactccacgaactactgcttctcgtgcgacaagaacggcgcctgcgagctgcaggccgtttgccgcgaatacggcgtgttggagtcgccctacgaggtcgcgcagaagcgcgagccggtgcgcgacgagaacccgttcctctcctacgatccgaacctgtgcatccgctgtcagcgctgcgtgggcgcctgcaacgacgccgcgcgcaaccattcgctgcatgcggcgaagcgcggcgtgcgcacgctgatcgaggcgccgttcggcgcgagctggcgcgccaccgactgcgagtcgtgcggcacctgcgcgcaggcgtgccccaccggcgcgctcaccgagaagcgccgagcggcgtatcgctcgtgggagaccgggcgcgtgcgcaccacatgcccgcattgcggcgtgggctgtcaactggacctcgtggtgaaggacggcgccatcgtggatgccgaagcggcgcccggtccgtcgaaccaagggcttctgtgcgtgaagggacgctcggcaagcttcgatttcgtcgacgcgcccgaccgcatccgcacgccgctcgtaaagaatcgcgagacgggcgagttcgagcctgctacctgggacgaagcgctcgacctcgtggcgaggcgcttcaccgagctgcgcgatgcccacggcggcgagtcgctggcggcgtttgcgtgctcgcgttccacgaatgaggacatctacctgttccagaagatggcgcgcatcgtgctccaaacgaacaacgtggactgttgcgcgcgtgtttgacacgcccccacggtcgccggtctggcgaccatgcttggttccggcgcgatgacgaactccatcgaagacgtcacgcgcaaggcggaggtcatcatgctcgtggggtcgaaccccgaggaggcgcaccccgtcatcggcatgcagatccgcgcggcggtcgaacgcggctgccggctcatcgtggtcgacccgcgcgatatcgggctggccgcgcatgccgacatccatttgaagctgaggccgggaacgaacgtcgcgttcgcaaacggcatcgtgaactacctgatccagcacgagctgtacgacgaggacttcgtgcgcgagcgcaccgagggcttcgagatcttggccgcgacggtgcgcgactatacgcccgagctggtggaggatatctgcggcatcgatcggcgcgatctcgtggccgcggcgaagatgtacgcggcggccgatgcggctgccatcatgtactgcctcggcgtgacggagcattccacgggaaccgacggcgtcatggcgctgtcgaacatcgcgatgatctccggcaacctgggcaagccgggcggcggcgtgaacccgctgcgcggccagaacaacgtgcagggcgcttgcgacatgggcgccggtcccgacgatctgcccggctaccagaaggtggccgaccccgaggtggtgcgccgcttcgaaaaggcgtggggggttgcgctcccgcgtgcgcgcggcattaaggcgactgaatgcttcccggccatgatcgagggcggcatcaagggcctgttcctgttcggcgaggatcccgtgcgcaccgaccccgacacccaccacgtgatccgctcgctcgaggcgctcgagttcttcgtggtggacgacctgttcatgaccgagacggccaagtacgccgacgtcatcctgcccgggcgcagctacgccgagaaggagggcacgttcacgaacacc

SEQ ID NO: 9432 - DNA, 202 bp, Unknown
  gut microbiota DNA sequence
ggattccacctcggaaacaagacttacaaacaaatgttctgcttgataaaatgaactcgtacacgagccagtgcaagcgctgcgcataagcacagtccgaagaggcgaaggtgtttcccttccgcctgacgcaacgcttgcaagatcctcgcagccagggaacgagggggccgacttaggaactcgcgcccgcaaggtagga

SEQ ID NO: 9433 - DNA, 277 bp, Unknown
  gut microbiota DNA sequence
tccttcggcctcgtacacggtatagcccgaccccgcctcgatgaacagcgggatggcgatatccttcgcctcgtccatggtgagctcctgcttgccggtgtctttgtcggtgaggccgaagtacaggcagtacaccacttcctgtcgatcggtcacaccgttgacgagcggctgcgcagcatcgtcggacgccttcgaagcgcagcccgcgcacagcgcggcgacaagcgctccggcgcacaggcacgcgcccagcttcttccacgttcttgcgttc

SEQ ID NO: 9434 - DNA, 248 bp, Unknown
  gut microbiota DNA sequence
cctacgccatcacggtgcaggacgaggcggcggccgttgccgaccaggacagtgcggcctacgtcatgaacagcctcaacttcgacggcgataccatcatcgacacgaagtacgtcctgaaaggcggcacccagacggtcacggtgaaggacggcgaatggctggagctgttcgccgccgtcgccacgccggcggaataggaggcgcgcgatgctttccgacgatcccacgctcgaggagatcgaggc

SEQ ID NO: 9435 - DNA, 160 bp, Unknown
  gut microbiota DNA sequence
gtattcgcctgatccgcttcatcgtggaagatgacggcataggcatgtcgaaagagttcatgtcgcgtttgttcgacccgttcgagcgcgaggaggtgcctacgcgcttatcggtggaggggactggtctgggcttgtccatcgttaagaacctcgccga

SEQ ID NO: 9436 - DNA, 497 bp, Unknown
  gut microbiota DNA sequence
tttgcccatgcgctggaggagcgcggctaccggaacaccggcgagctggacggccccggcaccttcgccgtgcgcggcggcacgatcgacgtgttccccggcaacctcgtgtacccggtgcggctggacttcttcggcgacgagctggaggagatccgccgcatcgtgcccaccaccgggcagaccatccaggcgctgccggatgtgagcatctaccccgtggtggagttctcgtgctccaagcgggggctcgcccgcgcgcgccagaagctggagcgaccggccgcgacgaaccccgtgctgcgcgacgtgctggagaagctggacggcggcctgcgcttcgacggttccgacatgctgctgccgtacctgtacgcgaccacgtccacgttgggcgattacgtgcgccccggcgcgctgagcgtgcttttggagccgcgctcgctgttcgacgacatgagccacgcctacgacgacgcggcgggacgcgcgaaggg

SEQ ID NO: 9437 - DNA, 238 bp, Unknown
  gut microbiota DNA sequence
agctgccggtgaagcgcgtggaggtggcggggcatcccgacaagctgttcggtcggctgcgcagcctcgtggacaccgactacacggtggtgttcagcgcgtcgaacttccgtgcgcgccaggacatgaagctggctttcgtcgaccacggtctgccgatccaagagacgctggacgcggaagaggacgccgacgaactggaaggtatcgccaagcgccgtctgcggcggggcgtggt

SEQ ID NO: 9438 - DNA, 587 bp, Unknown
  gut microbiota DNA sequence
gaagccggcgatgaggctcctcacttccttcgcggcgaagcgctggctgacggacgcgcccaagcgtccctgtttcagctcgccgaacgccgcgtgcatgccgcccaacggccgcagcacgaacacagtggtcaccaccaagatgaccaagccgatgaacacggtgatcaacaggaagtacgccatgtctcggatgacgttgccgcgcatggccgcctgctgctgatcgagggggatcacgatgctgatggccccgccgaccgactcgagcgtccaaccttccttcgcgtggtcggtgatgtcgagctcgccgaccggctcgccgtggcattcgaggcagctgtcgtccacttcgagcgcttgcaggtagcggaaccgatcctcgccgtcgaacggggccacgccgtagtactcggtcaccgaacgatcggcgttgaacgcctcgagcgccttcgtctcgaactcgtcgggaatatcctgctcgctgcgcgggtcgaagttcgtgtaccggatgtggtagtcgctgcccgccgagaacagccggccgacgctcttgcccaccaccgagcagtgcaggcccttgaact

SEQ ID NO: 9439 - DNA, 346 bp, Unknown
  gut microbiota DNA sequence
cacgatggcctgatccacgcatagctctggccgctcgcggtcgcaacgtgcgctcaccgacagcgcgaaggttcggtcggcgtgcgcagcaagccccgttccggcgtcctccaccatgcccgccacgctgtcgaacccggtcggacgcgcgaccacggcgcggtcttccagcttttgcagcccgctcatagcggcgacgtagcgctcaaggcgctccacctgcgcggccagcgaggcgacggaggcagccagacgctcggcgggcacgttgcccgactgcacgtgcgcgtccagcagctcgatcttgcccttgaggatggtgagcggcgtgcgcaggtcgtgcgcg

SEQ ID NO: 9440 - DNA, 178 bp, Unknown
  gut microbiota DNA sequence
cgccttcacgttcttctcgtacatctcgggctcgcgctcgcgccattcctcgagcgccttcgtcatgacgatggggcatacgatgttcacgttgatgttgtcgggaccccactccgatgcggccacgcggctcatgcctcggatgccctctttcgccgcagcgtaggagctctgtcct

SEQ ID NO: 9441 - DNA, 18749 bp, Unknown
  gut microbiota DNA sequence
gacactcccggccacgtggacttcacggccgaggtcgagcgttcgcttcgcgtgctcgacggcgctgtcgcggtgttcgacgccgtcgccggcgtgcagccgcagtccgagacggtgtggcgccaggcaagccgctacggcgtgccccgcatcgcctacatcaacaagtacgaccgcgtgggcgccgacttcttccatgcgatcgagaccatgaaggatcgcctgggcgcgccggctgtcgccgcgcagatgcccatgggcgccgaggacaacttctggggcgtcatcgacctggtcaccatgaccgcgtgggacttcaaggccgacgacaagggcatgacctaccccgaggccatggacgccatcccggccgagttcgccgaagaggccgagctgcgccaccaggagctggtggaagccgccgccgactgcgacgacgctctcatggagaaggtcctcatggaggaagaggtgacggttgacgagctgaaggccgccatccgcaagggcaccatcgcctgccagatccaccccgtgttcgtgggctcgtcctacaagaacaagggcgtgcaggagctcctcgatgccgtggtcgactacatgccgtccccgatcgacgtgccggccatcaagggcacgaacccggacacgggcgaggaagacgagcgtccctccgacgtgaaggcgccgttctccgctctggccttcaagatcatgacggatccgttcgtgggcaagctcacctacctccgcgtgtactcgggccagctcgattccggctcctacgtgtccaacgcctcgaagggcaagaaggagcgcatcggccgtttgctgcagatgcactcgaaccagcgcgtcgatatcgacggctgcgccgcgggcgacatcgtcgccgtcgtgggcttgaaggacacgtcgaccggcgacacgctgtgcgacgctgatcatccgatcatcctcgagtccatggagttcgccgagccggtcatcgacatcgccgtcgagccgaagacgaaggccgagcaggacaagatgggcatcgcgctgcagaagctggccgaggaggacccgacgttccgcgtgtccaccaaccaggagaccggccagaccatcatcgccggcatgggcgagctgcacctcgagatcatcgtcgaccgcctgctgcgcgagttcaaggtcgaggcgaacgtgggcaagcctcaggtcgcctaccgcgagacggccacgcaggaagctcgcaacgtcgagggcaagttcgtgcgccagtccggcggtcgcggccagtacggccatgcggtcatcaacctgatcccgcaggaagccggcaagggctacgagttcgagaacaagatcgtgggcggcgtgatccccaaggagtacatcaccccgatcgacaagggcatccaggaagccatcaactcgggcgtgcttgcgggctacccggtcgtggacatcaagatcgagctcatcgacggttcgtaccacgacgtcgactcctccgaggcggcgttcaaggtcgccggttcgatggcggtcaaggctgcgctcaagaaggccgctccggtcattctcgagccgatgatggccgtcgaggtcgagacgcccgaggagtacatgggcgacgtcatgggcaacctgtccagccgtcgcggccagatccagggcatgggcgatcgcggcaacgccaagaccatcaaggcgaaggttccgctgtccgagatgttcggttacgccaccgacctgcgttcgacgacgcagggccgcgcttcgtacacgatgcagttcgattcgtacgaggcagtgccgaagaacgtggcggaggaaattatcagcaaggccggcggcaacgcctagggcgtgcgcgcgagcataacggaggtaaagtaagtggctaatcaaaagattcgcatccgcttgaaggggtacgatcatgagatcgtggaccagtccacgaagctcatcgtcgataccgcgcagaagacgggtgccaaggtgtccggtcctatcccgctgccgacggagcgcaacctgtactgcgtcgtcaagggcccgcacgtcgacaaggattcgcgcgagcagttcgagatgcgcacgcacaagcgcctcatcgacatcctggaaccgaccccgaacacggtcgattccctgatgcgcctcgatctccctgccggcgtcgacatcgagatcaagctgtaaagggggatgtgcgatatgatcaacgccatctatggtaagaaaatcggcatgacccagatcttcaacgaggacgaccgtgtcgtgcccgtgacggtgatccaggccgagccgaacacgatctgccaggtcaagacgaaggacagcgacggctacgaggccgtgcagctgggcttcggcgccatcaaggagaagaaggtcaacaagcccatggcgggtcacttcgccaagcagggcacggctcctacgcgctacctgcgcgaggtgcgcgtcgagaacgccggcgagtacaaggtgggcgatcagcagacggtggccgccttcgctgagacgaagaaggtcgacgtgaccggcacgtccaagggcaagggcttcgccggcgtcatgaagcgctacggcttccgcggcggcccgggcggccacggcgcgcacttccatcgcgctcccggttcggtgggccagtgcgccacgccgtcccgcgtgttcaaggggctcaagctcccgggccacatgggcgtcgacaccgtgaccgtgaagaacctggaagtcgtccgcatcgacgaggagcagaacctcatcctcgtcaagggcgccatccccggcggcaagaacggcgtcgttcgcgtccgcatggcgtagttgaagtaacctataaggagcttgtatatcatgacgactatcgagatcaaagacgcgagcgggaagaaggccggcaccgccgacctcgccgcttccgtgttcggcatcgagccgaacgtgcccgtcatgcaccaggtcgtgcgcgcgcagcgcgcgtcttggcgccagggcacgcatgacacgaagacgcgcggccaggtgcgcggcggcggcaagaagccgtggcgccagaagggcaccggccgtgcccgtcagggcaccatccgcgcccctcagtgggccggcggcggtaccgtgttcggcccgcatccgcgttcctacgcgttccgcgtgaacaacaaggaggtcaagctggccatgcgctccgcgctgtccgccaagctggccgacggcgagctgttcgtggtcgacgcgttcaacttcgagaagccctcgacgaaggcggctgtggccgcgctcaaggccctcggcttggagcgtcgcaccaccctcgtcatcgacgacgaggacgtgaacacctatctgtcgttccgcaacatccccacggtgaacatcctgcccgtgtccgcggcgaacacctacgagctgatcgacaacaaggctctcgtgttcacggccgacgccctgaagcgcatcgaggaggtgcttgcataatgaaggatccccgcgaggtcatcatccgccccgtcatcacggagcacagctacgaccagatggagggcaacacctttaccttcgaggtggccaaggacgccaacaaggttgagatccgccaggccatcgaagccatcttcgatgtgacggtggtcaaggtgaacacgctcaacgtgaagccgaagccgaagcgcgttcgctaccagctgggcaagacccgcacctggaagaaggccatggtcacgctcaaggaaggcgacaccatcgagctgttcgcgtaagcgacgtttccacgtgctgcctcggcgcccctgcaatcgcgggggcgccttttttgttggaggagggtgcgaaaagcgaaccgcgacgccttctttgacgtgccgtatcgccttggagtcgttacttcaccacgcggacgcggcggacgccctcgatggcgctcaggcgctcgatggcgtcatcgggatgccccggagtgccggcgtccaggtcgagcatcgtgtaggcgttctcgccgcgggccttgttcatcatgttctcgatgttcacgccggcatcgccgaacacgttcgtgatgcgagcgatggcgttcgggacgttcgcgtgcagcacggccacgcggcgcaggccgtcgggcacgggacccatgtcgcaggcggggtagttcacggagttcgcgatattgccgttctccaggtagtccatgagctcccgcacggccatcatcgcgcagttgtcctcggcctcggcggtagaggcgcccaggtggggcagcacgatggcgcgctccatcttcatgacctcgggcgtggcgaagtcggtgatgtaggcatgcaccttgccggagtccagcgcggcggccatggcagcgttgtccacgagcgtgtcgcgcgagaagttcaggaacacggcgccgtctttcatgagcgagcaggcgcgctcgtcgatcatgccgatggtgccgtccatggccggcacgtggatggtcatgtagccgcaggtgcggaagatgtcgtcgaggttcgtcacgtgatggacagcgctcgagatgcgccacgcggcgcccaccgacacgtacggatcgtaaccgtacacgtccatgcccaggtcgatagcgatgttggccacttcggccccgatggcgcccaggccgatgacgcccagcttcttgcccttcacctcgcgtccggcgaacgccttcttcgccttctcggccgccttcgcgatgttctcgtcgtcggcgttgtgccggcaccaggcgatgccgccggcgatgtcgcggctgcccagcatgaggccgcacaccacgatctccttcacggcgttcgcgttcgcgccgggggtgttgaacactacgatgccctcctcggcgcagcggtcgagcgggatgttgttcacgccggcgccggcgcgggcgatggccagcaggctatcggggaacgcggtgtcgtgcagcgcggcgctgcgcaccagaacgccctcggcctggtcgagggcgtcgatgagctcgtagtcgtcggtgaagagatcggtgccgtacgccgagatgttgttgaggcagtggatgttgcgcatgaggtctccttcgaggatggcgggcggctccgttgaagcgcggctcgtcgccgttgcttgctgcatcctcctatagtgctcaggccgcaacccgttgtcaaccaccgttcagccggtgcgcgctttatctcggtaaagtgcgaacccgcttcgtcctcgcgtcgccgttcggtgctagttctgcgtggaaaggaaggtgggcagcgtcatctgctcgatctgatcctgcagctcttccagctcgtcgaggtgcgtgtcctcgtcgcgaaggatggcttcgaggatgtcgcgcgtggcatagtccagcacctggccggccagcacgatggcctcgttgtactgcctgatcgcatcgagctccaaggcgtggtcgttgttcacctgctgggggatctccgcgccgatgtgcatgtcgttgaggtgggatacgatgggcgtgccctccaggaacaggatgcgctcgatgaggcgctcggcatgcttcatctcggtgatcgagcgcttcttgaaattctcgctcaggcgggtgtagccccagtcctcggccatctcggcatgtaccatgtactggttgatggaggtcagctcgctggcaagcagaccgttcagcgcgtcgacaagttcttggtttcccttcatggcagtgctccttccatacgcacgatgatagggaggatccgccctttgtaagatcctcgacctcagcattgtacggacaagggaccggcttgttcgcttgcttaccgactcgcatccgtcccgtgttcttctcgaaacctgtcgttctggtttttgaagaccgtgcgaagggttatcggggatttgacaggtgtgctagaataatcggctggtattgctatgttggaagggacgtatatgtctgggcattcaaagtgggctacaacgaaacatcgcaaggcggcgcaggatgcgaagcgctcggccttgttctccaagctgtcgcgcaacatcacggtggctgcgaaagaaggcggcgacccgaatcccgacaacaacgcatcgcttgcggccgccatcgaaaaggccaagggctactccctgccgaaagataagatcaaagtcgccatcgacaaggcgttcggctccggcaaggactccgctaactacgagaccgtcgtgtacgagggctacggtccggccggcgtcgccgtgctgtgcgaggctctgaccgacaaccgcaaccgcaccgccgccgacgtgcgcgcggccttcagccatgcgggcggcaacctgggcacgtccggctccgttgcgttccagttcgagcgcaaaggccagatcatggttcccaaagaggtcgagaccggcgacaagaagaaccccgtgaagccgaacggcgccgccgccgacgaggaagagttcatgctcgctgtggccgaggccggcggcgacgattacgaggacgccgaggacgagtggatcgtctacacgtcgcccaccgatctcatggccgtgaagaaggcgctcgaggaagccgacgtcgtcacgaagggcgccgaaatgaccatggtgcccactacgcccgcgacggtgagcgtgtccgatgcgaagaaggtcatgcgccttgtcgaccgcctcgaagagctggaagacctccagaacgtctaccacgtcatggatatcactgacgagattgcagaagctctggacgaataggctctctcgaaaccaagcgaacgcgaagccgccgcaagcacgaagcttgcggcggctttctcatgcggggttggacgaagggcgtaagcgccggagcgtccggtatcgccgacgccttgtcgctcgaaagccgcgttttcggcctcgattccgcggctttcgagcgacaacggcgcggcatgcgaccgtgggctccgagtctcgcctgcccagcctgcggtctcccgttcttcgctgccgccgttgtgtataatagctggttgcttgcttgattatcaattgccgcgcttttcgcgcgaaggggattcaggattacggatatgctagaagcactcgctcgtcttttctcgtacatcgttcagccttgctacgatctgacaggaagctggtggatggctattttgctgttcaccgtgatcatcaagatcgttctcatgccgctgtcgctttggtgccagtggaacagcatcgtcatggtcaagatcatgccggagctcaaccgcatcaaagtgaagtacttcggcgacgccgaaaccatcggcgagaagcagaccttgctgaacaagaagcaccactatcatcctctgctgtcgctcattccgttggcggcgcagattctcgtgctgttcgggctggtggaagtgattcacggcatcaccgaccacggcgctccgggaaccgagttcttgggcatggtgccgattgaagacggagggctttcttggatcatgccgcttctggccggtttgtccgcggtggtgatgggcttcgcgcagaacaggatcaacccgctgcagcgcgagcagtcgaagatggagaagaacaccaccaacgggctgtccatcgtgttgtccctcgtcctgggcgtgtacgtggccgccggcatggccttctactggatatgctcgaacctgatggccatcgttgtacaggccctgtgcaacctgatcatgcggccagcgaagtatatcgactatgccgaactcgctgcaagtcgtgtggagctggacgagctcaacgctttcacggcgcgtaaaacgccttggtacaagcgcgatccgctggcgaagcgcgagaaggaggactacaggcgcttcatgagcgtggtcggcaagcatatcgtgttctactccgagcgcagcggcttctacaagtactttcagggcgccgtcgaatggctgctggcgaactccgatgcgtgcgttcactacgttaccagcgatcccaacgaccaggtgttcaagctgcatgaggcaaatccccgcctcatgccgtactacatcggcgacaagcgcctgatcacgctcatgatgaaactcgattgcgacgttgccgtgatgacgctggacgatctggagaatttctacatcaagcgttcgtatattcgcaaagacatcgagtacgtgtacgcgttccatcatatgacgtccacgcacttggtgtgcacgaaggaggctttcgaccactacgacaccgttctgtgcgtgggcccgcatcagaaggcggagctcgaacgggccggggagatgcgggatatccctcgtcgcaatctcgtggaatgcggctacgacctgctcgatcggcagatcgcggcctacgagtcgcgcaaggccgcgaaagctgccgagggcgccgggtcgcgtcgtcccgtcgtgctcgtcgctccgtcgtggcaggaggactgcctgctcgacctgtgcgccgacgaggtgctcgagcccttgctgggacgcgggttcagcgtgatcgtgcgtccgcatcccgagtacaccaagcgctatcacgcccggtgggagtcgctgcagcagcgctacgcgtcgtggtcgcgcgacgacatctacttcgagcaggacttcagcacgtccgattcggtctacgatgccgacgtgctggtcaccgactggtcctccatcgcctgcgagttctccttcaccacgatgaagccgtgcgtgttcgtggacacgcccatgaaggtgaccaaccccgattgggaagagctgggcatcgagcccgccgatctggccatccgcaatcaaatcggcgcgtcgctggccatggaggagctgccgcggttgggcgatgtcgtggaggacatggttgcccgccccgaagcctggcggaaccgtatcgaggaggtgcgttcgcgcatgatctaccataagggtcgcgggggcgagatcgccggcgcatatctgcttgaccgcatgctggcgaagcagggcgaccgggccgtcgaggcgtccggagcatcccggctggatagggctggcgtagccggctggatcgacgaggaggtgcgtcatgcgggatagcagcctgccgcgcttcgctgcgcgcatcggccttgtggcgtccgacgtcgcgttcccccttgtcatcgctctggttttgacgctgggtttcgcctcgccggcctacgcctacgtcgacccttcggtcatgacctacaccatacaggcgctggcgggcgtcgcggtggcgctttcggctgtgctcggcgtcgtttggcgccgcatgcgcagacatcttctgcatattctgcgcatcgacgagaacgagggaaaacaggttgaaggcgcggtacacgcgctcgatccgcttgcgttcgattaccgagaccgcctcgatagggcggaatcggaagcgcgcaggatgaaggccaagcaagcgtcgaacaagcctgagacgctgtgctggcgtgcgcgcttcctgttctcgctggtggcttcgctgatgctggtctacactttcgcagtggtggctccgctggaaatcgtcgccagcagcgttaacagcctgcttttcacggtgacggacgtctgggttcccttcgccgtcgtcgggctcgcgggcactgtcgtgctagccttagcgttgtcgctgttgcggggaagggcgttcaacgtgtgcttcgcggttgtggcggccgtgggcgtggccggctttgtgcaggccctgttcctgaacggatcgcttcccgcagccgacggcacgcaggtggtttgggacgactacaccacggccaccgtggtgagcgccgtcgtgtggatcgtcctcatcgggtcggcggtgttcctgtcgctgaggaagtcgctggcgttcaagggcacggccgccgcgctgtgcctggtgggcgtcgtcgcgcaatcggtgagcctgggagtcctgctcaccgcgccggcgcccgacggcctaccccctgtcgcggcgaggcactccgtcaccaccgacggcgtctcggaggtttcgtcgaacggcaacataatcatgttcgtacttgatacgtacgacacgctgtttttggaggagggcctggaggaagagcccggctgcctcgacgagttcaccgggttcacctggttcgacaactccacaggctcgatgatccccacgcgctacgccatggcctcgattctgacggggcacgctctcgacgaggacgacaagggcttctccacgtcgttgatcatcgactggtacgagcagcatggcctgatcgacgacatcaacgcgcagggatacgagacgtgcttgtatgccaccgacatcaacgatgccatcggctccctgtccgagcgggtggagaacatcaagcttcgcgagaaccagctggactacccgtcggcggttgcgatgctggtgaagtgttcgctgtaccgcggtctgccctgggcgctgaagccgccgttctggttctacaccgacgaggtgaacagcgctgcgttgggcagcggtgccgagagcgccgtgaacgcgctgtggaccatgaacgacgcgcgatactacgcaaccctcaaagagcaggggctgagcgctgccgacctgggcgagaaggggagcttccgcgtcattcacctggcgggcccccatccgccgtacacgctgaaccgcaacgccgagacggtggaggacggaaccggcgccatcgagcaaggcctcggatctctccacatcgtgagcgcgtacctggaggagctcaagcggttgggcttgtacgacgaggccaccatcgtggtgaccgccgaccatggcgagtggtacatcgccgaagacatagtgcgtgcgaccagccctatcatgctggtgaagccctcgacgcagccgggcggctcggacgagcccgtgaagcgctcttcggtgccgacgggacacgtcgatctcgcggcgacgctgctcgaggccgccgggggcgatgcctccgcgtacggcgggatgagcgtgttcgacgtgcccgacgccccgcgcccccgctactacaacgcctcgtcggtggtgggtcccgagcacgtgtacacgtctatcatccagtgggagatcgacggcgatgcgatgaactgggacgattggcgcgaaacgggagtgagatggcccatcggctgatcggcgacgatggctgcgaggtgcagggatgattgtcgctttcgcagatctttcgagctggtgaacgcgaagccgccgcaagcacgaagcttgcggcggctttctcatgcgggagactggttacccctcgtacacgatatcgccgttcgagacggtgcagaccaccttcgcctccgagatctgcttggggtcgacgtcgaggatgttgcgatcgatcacgacgaggtctgccttcttgcctgtttcgattgtgcccacgatgtcgtccatgaagttctcgtacgccacgttcttcgtgtacatctcgagcatctggtaggcggtcagtccttgctccttccaccggtagtggtcttcgtcctcttcgacggggaaggggctgttgcgcgtgatgcccacttcgatttcaagcaggggatcgtaggcggtcacggctccgtcgctgccgccgctgatgaggcagcctgcttccagcatgtccttagccgggtacatggcgaacgcgcgctccttgccgataaatgcggcttccagttgacacagagggtcgttgtacatccacaggaactgcaggttgctgatcgctttgagatccgcgcagcgtttgatgtcctcgggagtgatggcgcatacgtgcaccatcgtgtgacgcgcgtcacgcttgccgttcgccgcttcggcgcgctcgtaggcgtcgagcgaggcgcgcacggctccgtcgccgatggcgtgaatatgcgcctggtacccgttcttgtcgagatcggctaccacctggtcgagctcttctgtggaccagtcgcttgtggcggtccagccttctcccttgccggctgcgggcaggtacggctccagcataacggccgttgcgccttcggtcacgccgtcgtagacgatcttcaccgtgccggtttggaacatgtcggaatcgtaggcggctacggcatcgagcttcttcttgatgccttcgtagcccatgcccggctgtccccacacgaggaagcgctggcgcagatgcagatcgccccgtgcgtccatgttgtggagcgcctcggcgtggatgagctcgatgcccgacaggttgatgttcgtgaggccggtgatgcccagcgaatgacagtactcctggaacgcttcgtaggctttcgccatgttctcggtcgagtagggaacttcgatcttggacgtgacaaggcctttcgctgcgtcggtcagcagaccgcttggctggccagcggcgttgtgcacgatggagcctccgtcggggtcgggcgtgtcggccgtgattccggcgatttccagcgccttgctgttcacccaataggaatggtgcgatacgtcgcggatcatgatgggcttgtcggagcagatggcgtcgaggtcctctttctgcgggcccgggttcgatccgtcgggttgcagataggcgttctgcatgaacggtccgccgtagtacacttcgtcgtcgggatgcgcttccacgaactcgcggatgatgcgcagatactcctcgttgtccatggtgccttcggggatggcgatttggaacagttcttcgtaataaggctgtgggccgtgcaggtggccgtccatgaagcccgggcacaagaacttgccgccgaggtcgatgaccttggtcgcgtcgcctacgaacgcctcgatgccggcatcgtctcctacgtacacgatgtcgccgccgcgcacggcgacggcctgcgctacgtctccttcgtttacgagcgtctgcacgtggccgttcttgaatacgaggtcggccgccttgccggttgcctgcgcttcggcttcgatgctcgtgtccgccgccccttcttctgcgggcgcgctgcatccgaacggtcctcccagcagcatccctgctgcaagcaccgatgctcccgctacgaacgaacggcgcgtgagcgcgctttgccgtcccagtccctggttcgtgctatgcgtcatgacgatcccttccttcccttgttcgacgatacgcttgccggatcccttgtgccgacggcaccttgcccgacgttatggccgaagggggcctgcgacaatcaacgcgaagatggatgcctgctcgaaagagggtttatttttctctaccttgtagcaaacatgctggtggagggcgagggtgcttgttttgcggaagggcgcgctcccgagcgggaattcgcgcgtgctataatccgccgcaggggaaaggggtgcgatggtttacttgctgttcttctacgatatgggtatgaccatggcgaacgcggcgctctgtatcgtgttcgctgcgttgttcgtgcggaacagaagccctctccatctttggctcgctatcttgttcggattgtgcacggctgacatcgtgctcatgtacctgttcgatttcgtgcccgatttccagctgctgttcagcgcttttcccggatcgtcgccgtttttgtacggttacctgcatctcggtattctgctgacgttcaggttcattgcgggctttatcttcgaccagccgccggcggcgcgggaaagtgcgttgtggattttatgttgcacgtatctcgcggttgccgggtcgttgtcggaagccgtggtagaggaattcgccgagaacttgtgcatcggcgtgctgcagctttatatcatgggcatcggtattcgagggttgcgcaagggcgatgtagggggtcgcgtgctggactcgaaggccgtcgttgcgctcgtggcgtcgttcgcgttttgctcggttggttatttggcgtggtcgataggctcgttcgcggctggatgggagagcccgcgcaacgtgttcgtcgaattgtctggtggaattaatttcgtgttcgcctgtctttacctggttgcgtacgcccgcaaactccgcgaggcatcggttccagccgtggtgccttttgttgccaagcgctacgatctcaccaagcgcgaggaggagatgcttgaaatgctggtggaggggttgagcaaccagcagatcagctcgcaggcgtacatctcggtcggaacggtgaaaacgcacgcgcacaacatctacgcgaaattgggcattaaggggcgtgcggatctgcccgcgtttctcgaatgcgagctcgccgcctcccttgatcatcggagttgatcgcgccgcgccgcttccgtcgtcggcctctgacgagggtgtgaaaaaagcgcgtcttccgcgggttgttcccgagctttgtgctaggatggtaacgaacaaacgtttgcaactgaggcaaaccctcggcatgacgacgaaaaggaaccgatgacgcgcatcgaacgaaccatcttggggatcgatcccggcctggccaacaccggctggggcatcgtggagcagcgcgggccgcgcctggcgtgcacggcatacgggtgcgtgtccacgccgaaggagctgccgctggctcagcgtctgcggaagatccacgagcagatggctgcggtcatcgcgcggttccagccgacgtgcgcgggaatcgagaccgtgtggttcggcgtgaacgtgcaaagcgcgttcgccacggggcaggcgcggggcgctgcgctcgtggcatgcgccgaatgcgacctcgaggtgctggaattctcgcccagccagatcaagctggcggtggtgggaaccggctcggccgagaaggaccaggtgcagtacatggtgcgccagctgcttgccctcgaggacgtcccgcgacccgaccatgccgccgacgcgttggccgccgccatctgctataccactcatgagggtttcgcgcgccgcacgggcgcggcatgcatggcgtacgacgcgcccgtttgcaacgtacccgtcggaaaggacaggctatgatcgcgtttctcaaggggacgctggcggggaagaccgccacgaccgcctacatcgaagtgaacggcgtgggctatgccgtgggcatgtcccaggccagcctgtcgaagctgcccgaagcgggggcaccggttgaggtgcacacgttcttgcaggtgcgcgacgatgcgctggcgctgtacggatttctcgcgctggaggagaaggctctgttcgagcggctcatcggcgtgggcggcgtggggccgaaggtggcgcttgccgcgctgtcggcgttctcgcccgcgggtcttgtggccgccgtgcaggcgcaggacgtggcggcggtgcagcgcattcccggcgtggggaagaagacggcctcgcgcatcatcctggagctgaagggctcgttcgacgaggggctggcaagcctgttcgacggggcggcgcccgcagcggcgtcggctgcgaatcttgccggcacgcgcgaggcgctgctgtcgatgggcttcacgtccgaagaggccgacgtcgccctcaagggcgcccccgaaggcgcgtccgagggcgtgctgctacaatatgcgctgaagcgattaggttccgccggtctgccgaccggcggaacggcttgacgctgcggctttccgcagcacccgatcttggcgctccaagccctcctcgcgtacgaagtacgcttcgtcgggctttcacgtcaatctcgggcaccgcgaaaagcctcgctgacattgtcggaccggcgagggggacaatgttagactggcgagaaagatgaaaaggcggctatggctgacaacggcattcaaatagaagggctcgtgttcgaggcgggcgccggagcggggcgggatggcggctcgtcgcccgtcgacgcacgctcgcgcgcggtggcgccgacgctcaccgaggacgatctcgcgctcgatcgcagtctgcgccctaagcgcctgggcgactacctggggcagacgaagatcaaggagtcgctcgccatcctcatcgaggcggctcaggcgcgcggcgacgtggtggatcatatcttgttctcaggacctccgggcctcggcaagaccacgcttgcgacggtcgtcgccaacgagctgggcgcgaacatcaagacgacgagcggccccgccatcgagcgcacgggcgatctggcggccatcctcacgaacctcgaggagggcgatgtcctgttcatcgacgagatccatcgcctgaaccgcatggtcgaagaggtgctgtaccctgcgctcgaggacttcgccctcgacatcgtggtggggaaggggccggcggcacgctccattcgcctcgacctgccgcgcttcaccctggtcggcgccaccacgcgaacgggcctgctcaccggtcctttgcgcgaccgcttcggcatcgtgttccgcctgcagtactactcgcccgaggagctggcctccatcgtgcgccgttccgcctccatcctggacgtcgcaatcgaggaggacggggcgctggagatcgcgcgccgtagccgcggcaccccgcgtctggcgaaccgcctgctcaagcgcgtgcgcgattgggcgcaggtgcgcggggacggcatcatcgacgaggacgtggccgcccaagcgctcagcttcttcgaagtcgacgcgttgggcttggacatgatggacaaccgcatcctcgagcttctggccgtgcagttcggcggccgccccgtggggctgaccacgctggcgtccgccctgtcggaggacaccgacacgctggaagacgtctacgagccttacctcatgcagcagggcctgctggtgcgcacgccgaagggccgcatctgcaccgagcgggcctacgaccatctggggattccggttccgccgttctcgtgatcacgaccgtccggggcgtcccgggcttacgaagggagcttccatgctcgaacaggattacctgatgcgcatcctcctgcaattcgcggaggccatccgccgcagctgggcgcgatcggtggaggatcgcgatccgcgcgatgccgccaacatgctggagcgcgccataggcgacgccaccgacatcgacggcgccacgctgctgtcgctgtcgcccgagtcgatagccagcgtcatgcaggtgtcgggcgtcgacccgcgcgtgtccgagtacatcgcccggagcctgcttctggcctcgggttatctggcagaggcgggcgagggcgatctgtccgccctgcgcgccgagcaggctcgcgccttggccgaggcgtacgatctcgatctgcccgacacgcccgaagagctagccacccttttggatgaggccgatgccgcgctggcgaaagacgccgagtccaccatggacgtgctaggctacggcaccgagcccgtcatcccggcgaacacgatcgaggcgcccctcgattccgaccggtaggagcccgctcgatcaacggatcggtaaaatacgggcgaaaaagagaatcccgagcttttttgttgccgcatagcgtatagtaagcatgtgccctcgaggtgagggcgagtgttgcggccatgcagcacacagtgttacctcctcggggacgaggagaggaaagaggatttaaaatggcggaaggtactgttaagtggttcaacccggaaaagggctacggcttcatctctcagaaggatggcgaagacctcttcgtgcatttctctgagatcaagatggacggcttcaagacgcttgacgaaggtgctgcggtgcagttcgacgtcacgaccggtcagaacggcaagcttcaggcaagcaacgtgacgaaggcataagcagactaacatatagaatgctgaaatgaccccgcaaagtgcggggtcatttttttaatgcgtatcggttcggcagtgtctctttgcggggcttgggtcgcgggccgatgagccgaaaaccctcttttaggcgtaaaaatgcgtaaactccgtcccgagggttgccagccttgcggcgttcgcgacgctgttgattttgcgatgcctcagtgctgcgatgataatgcggttctctttggtgagatgttcgacgttcggatggtgtgccatgcggtgtagcagttaaaagcagcgcgctacgccggccgactccgtcttctaagacgaaggaggcgaggccggcttactgctatcgacgcgaacccggacgtgtcgaaagtatactgattatggtgcgaactcggttggggcctttgatcctcgggctctcacgccggcacgctgcccgattcactcttatccaggctgactgacttttgggtattggattttgcgtcttcgttgcgtcgcaagttgtttggcatgctgtgggcggggggcggagggtctgaatgtttcacgtgaaaacattcgtacgtgtcgaatcgaagtcatgatggggctgatccgttcccgttgagtaggcgggagcagcaaaggagtcgagcgctttacgagacgggcttgcgggttcgtgtgaaaccccagagaccatagagtttcttgctatttgatagttaatatgtatcatttaagaaataattaccaaaaaggtattaacaaaacgcgtgcatggtgcttaaataaaagaaaagagggtatcgggaaaacggtcgacggtcggaaatagcgagggagtgcgcttttcacgcatcgttcggtcgacaatcgacaagcaacacatatgcacagcacgctcacacgccatatagggcgctgcgtctgcataacgggggagcacatgattacgatttcgcatcgcaaactttgtcgcgggggggggg

SEQ ID NO: 9442 - DNA, 6092 bp, Unknown
  gut microbiota DNA sequence
cgtaggactgaccccgtacgccgttctctcgggcagcatggagcccgaatatcccgttggctcgctggtgtacgtcaaagcggtcgatccgcttgacgtcgaagtgggcgacgccatcacgttcagcctgccctcgggcacgctggtgacccatcaggtgtatcagatcgatgccgaatcccgtgcgttccgcacgcagggcatcgccaacatcgccagcgacgggtccatttcccccgacgccgcgccggtgccgtacgagaacctcgtgggcaaacccgtggcgtgcatcccgtatctgggctacatcaacaaattcctcacttctccgctgggtcttgtgattgcagggacggctatcgccgttttcatcatagcatcgattgctgccgggaagcttgccgccctcgatagcggccaagcggcatcgcaccgagggggtggtggcaagcacagccgatgcgcctgagcattgagcgacagcgtgcgcccctgcaagcggacgcaagaaacgaacgagagagaggagcgcttcatggaagcggaagtaaaacgtagaaagcgccgtgtggtgttggttgccctggcggcctgtttggtggtggccggcatcggcggaaccctagcctggttcagcgcgcaaagcagtctgacgaacacgttcaaggtgggcaacatcaccgatccgacgacgaagccggataagccctctgaaaaccttcccagtgacacaacgaaggtgagcgggaatatctatgagcccagctgggttgaccagtctgcgatcgctccgggtgcgagcgtggctaaggatccgtacgtgggcatcggcaaggacagcgagtctgcctatgtgtacgtgtacgtgaagaacaatctgccggaaggtgcatacttcacgatcgagcagggttgggaagcggttgaagcaactttggtttcgggatcgcaagaccagtacacgggcggtctgttcgcctatgcctccaactaccagaatggagctggtctcaccgagcttaaaccgactggtacccctgctgccgatgcttggacgaaaaaccccctgttcaaaagcattatgacgagcgatacgtttgtggcgaacgacaccaacaaaacggttgaggtgtatgcatatgttgcagccaaatcgaacaacagcgagtctacgaccgatctcgacgctgctgccgatgcttgggcggctgagatcaaaatgaagcagtagcttccagcgtcgcaacttgcgcatgctcagcctttgagctgccctttgcccatcccggcgctccctcgggcgccgggatgggcgcatccgcacccgtttacccaaggacctggatccctatgactgaacacgcacatcacaacatcgccagcgccgcatcgcccgacgatgccgcgcgcgaggctgcgccgcccgacgagctccgctcgagctcgaccggccagccctctgcaccggaggcccgtgcgaaggcctcccgcgcgcagcgcttcgccgcggtcgctgcggcgctgacgctgttgttcgctgccgcggttttggcgacccaggcgttcaacgtcgagctgttcgacgcgcatcaccccttctcgttcggcgcgcccgacatcgaggtggtcgaaaccatgttggacgcctcgggaaacgaggttccggcgcttgtggacgaccgtatcaaccccggctccggcgccgtgagccgcatcgtgcgtgtgcagaacctcggcacgcatccgatgttcgtgcgcgtgatgctgagcgtggaaggcgtgcggcccaacggcgacgcgctgtcgctcgaccacgccgtgacgtacgacttcggcgacgcgtccgcgtggcagcgggggcaggacggccggtactacctggccgtcgcgctggaacccgaccaaaccacgcccgtgctgatcgactcgttcgaggtggaggcgggcgcgctggccggcatcgatcagctgaagctggtgatcaaggccgacggcgtgcaaagcgagcacaacgcaaccagttccctgactgctgaaggatggccggcatgatgaatactcgggtttcgatatggcggaatgcgctgcgcatgctgctggcgcttgctttggccgcgacggcggtgcccttcgtcgcacccgacaaggcgcatgccgaacaggccgccgatggggcgtatcatatttccaccgcagccgatttgctgtacacggtcagcttgacgcgtgcggccatcggtcagagtgtcgatatcgttctggacaacgatctgactttgaccgaagccgaccttacggttgcgaagcagtacggcggcttgatcttcggcaccatcgacttgccgttcaagggcacgttcgacggtcagggtcacaccatcaagggcttgaagtacgaccgcgaattgttcaccccgaaggcgaacaccggcctgttcgccagcaccgacggcgccatcatcaagaacctcacgttggaggacgcctatatcggcgcagacttccgcggcggcgtgttggtgggccgcgcggacaacacgcgcatcgagaacgtcaccctcatcaactgcacatccagcatcacgcccgccaacaacgccgtcagcctgatcaccaacgccggcgtgctgggcggcatcctcgccggcgagacgaacggaggcgtcatctacaactgcgaggtgcgcggcggcaggtgcgtgtcgaactcgacgtccgccgtcgccgcgctgggcggcgaagggctgtacatgggcgcgttggtaggtgcagcaagcggaaccgtcatcgagtattcgcgtgtgacgccgattcgcgaggttgcggccgatggcaccgtgacctaccagcatgcaagcgtcaagaacagctacgacaaggcggtgggcgccctgggcggcttcaccgtgtacgcgggcggcgtgacggggcagctttcgaacggcgcccagatgatcgactgcttctctacggcggactgctacgcctactgcggcacgtacgtgagcgtcggcgcgggcgccacggtgagcgtcggcggcctgacggcgtcggcgtacgacagcaactgcagcatcgagcgctcccattacgccggcaacctgagctcgaagcagtataacgcgctgatcgtcattcccatcatcgagtacaacgtgtatctggccggccttgcgaggagggccgatggcctgtcggtaagcgagtcgtacttcaagccttctgcaagcgcagaggagggtacgaacaagaagatccccgcgttgaatgacgccgcgacggggccgtcgttcgggccgttggacgatgacgtgtacgtcgaccgcgatttctgggaggggtgcggctacgacttcgcgggcggcatcgagcgcagcagcgcatattccgccagccatatcaacaagtgggtcatagattatgacttgggcattcccgtgcacgggtcgtccatcaaggcgacgttcgatttcccaggcgcggccagcgtgagcatcgggacgaccgggctttcgccgacgcaggcgcagacgaccgacaacgcctggaagttcgccgtgcagggcgttcttgctgcggacaatacggtgaagctgagtgcgacgacgacccatgctcccatggcgaacggggcggatggctaccgcttcgtggggtggtatcgcgagtccaacgtcacggtgaacgaggtggccgaggatcccgcgtacttcaagccgatggtgacggcgggcaagcaggtgtcgaacgaaccggtgtacgaggcttcgaatgccgaccctgctaacaggcaattcgaggacaacgacctgttcatcgcgcatcaccaagcgcaggtgctgttccacgacgtgaaaggcaacgtgatcgacaaaggcaccggcaaggtggatccgaccaccgacgacgactggtacgactacttcggctcgctgccctcggtgcgtccggcgaacgctcctgcagatgcgaccttcgtcggctggacgacgactgcgaatccgggtacgggagcaggctacgatggcatcacgtcttcggatcttgttgcgatcatgaacagcggggcgttgtacaaagcggacgatccggtaactaagcctatggatctgtaccccatctacattaactattcggtgaacatcatcactgaaatcgagggttacagcgccgatgcagacaagacggtgcgcaacggcgtgggctcgacgcatgtggagaaggtgacgaacgctgacggagccgcgtcgtatcgcgtgtttgtgaaaggcgtagaagccgatggatcgcttcccgacggctatcggttcctggggtggtacaagaatgtggacggcgttgaagtgcgcgtgagctccgacctcagctacaccatccccgccgacaccgacctcacccaacagcaaacctacatagcccgcttcgagtatcgggttgattactattccgttgcagctgggaaaaagatcgacgattatacggaacccgatcttcatgctcagaggtggcagcggtacaattccgcttttgtcgatctgccggcgccttcctactacaaggggacattcgagtattgggcgacgtacaattccgatgcctcgtctgcaggggatgcctattctgggaatgtgatcgatcccataaaggttataacgaagatgaaagagaaggcgggagtgatcgactgctccattaaagtaatttcgaactatcctaattcgggcacgttgtcacaagagggcctggcaagctcatcgcattctgttaaattcgctccgattagtggtgactactcgtttcgcttctgggcggctgagcgcaacggtagcgacgtgagcaagccagttggagacagcagttctggcctttggctgaacgaaggagcagagtggaagacaggggctcatctcactgcatcttcttacgtttacgaagcgcatgttaccgcgaaaataaggttcaataaggttggcggagccttttccgacgttcagcgcgagtacgagtctgccgtgttccagcagaagaaaaaagatcttacttcgtatgatgtgaatggggcagatggcagcaagtacaacgtgtacccttattgggggtcgaacgagatcaagcagaacgatctgcggagtacattgggtactgcggccggtgcgttctgcgaggacgcttctcccacggatgctgagatgcagcgtgacgggtatcggttcttggggtggattgacaagtctgccatcgctgcggatgagatgacccagcatgaatgggactacgttttcgacgtgacgggtgaccagtactgcacctcgcaggcttctaaggcggttccctacctgctggctgccgatgcggtttgcacgcggcctatggacctgtatccggtgtatgtgaagtacgacgtgaccgtcactacgaacatcgcgcaggcgggcgtgccctccggcgctggcgtgaacatcccggccgcgccgacagtagccgatgggggtgcggcggccagcttcaatctgccgtacaacacgtatacgcgcgataccgggcaaggtggcactacctctgcaacggacaacgtaagcgtgaccgtgaaagacgaccagaccatcgacctctccctgacggccgaaaacaacgcaacgccagtggtagcggacggtcaggcgacgtatctgctgaagtcgtggacgatcgagaagacgttccaggggcagacgcataccgagacgattcccgccggggtcgctgccgacgcaactgcgaaccctttgagctacaccatcgagtcgggcccctcgtacaggttcgtcgcgaactacgagccgttggtggtggtgtaccacgtgaacgacggagtcaccgaaaccgtggtgcgcaacaacggtcagcagctggggaaggggcctgatccgacgttcgacatcgctaacatcgatacagcgaatgctggaatccacgtgttcgtgggctggacggcgacgcgtccggcgacggggcagtacgcgatttggagcgagggtactgcgatggtgtcttcgagcacgatcgtgcatcggtcgatggagctgtggccggtgtatcgcgcggctacggtg

SEQ ID NO: 9443 - DNA, 176 bp, Unknown
  gut microbiota DNA sequence
ggcgcgcgcccagctcgtcgcaggcgttcgagaagcgttctagaagatcgggatcggctttgaacagcgacctgacgacgttcagctcgttcatgcgttgttcggtgagatcctcgatggccaccagcgctttctgtttcgccgcgtcgttttctgcgttaagcagctgctcgacg

SEQ ID NO: 9444 - DNA, 294 bp, Unknown
  gut microbiota DNA sequence
gagcgcgatctggcgcttctgcggcgcggcatcgagctggacgacggcccgacgcagccggccgacgtgcgcgtggtggagggcggggcggctcgccatgccgagcgtctgctggagatccccgccgccgtgccgccgcgctcctcgaaggagtatgcggccgtgtgcgaagggcgcgcgacgcggcgctccatcgtgcgcttgggcatccgcgagggccgtaagcgccaggtgaagcgcatgctggccgccgtcggccatccggtgctggcgcttcatcgcgattcgttcggc

SEQ ID NO: 9445 - DNA, 1039 bp, Unknown
  gut microbiota DNA sequence
tgacggcggggcgcgtgaccgtgaacggcaaggtggtgaccgagctgggaagcaaggtggatccgctcgtggacgaggtggcggtggacggcgcggtcgtgcgcttggccgacgggcccgtcaccatcatgctgcacaagccggccgggttcgtcaccaccatgtccgatccgcagggacggcgtaccgtggccgagctcgtgccgaccgagcgctatccggggctgttccccatcgggcggctggacttcgatacgacgggcctgctgctgttctccaccgacggcgagctgggcaacggcctgctgcatccgaagcatcatgtgacgaagcgctacctggcctgcgtcgagggtcgtccgaccgagcgcgatctggcgcttctgcggcgcggcatcgagctggacgacggcccgacgcagccggccgacgtgcgcatggtggagggcggggcggctcgccatgccgagcgtctgctggagattcccgccgccgtgccgccgcgctcctcgaaggagtatgcggccgtgtgcgaagggcgcgcgacgcggcgctctatcgtgcgcttgggcatccgcgaaggtcgcaagcgccaggtgaagcgcatgctggccgccgtcggccatccggtgctggcgcttcatcgcgattcgttcggcccgctcgagctgggcgatctgccgcgcggggcgtggcgcgcgctcgatgccgaagaagtggcggcgctccaccaggccatcggacgtgccgaataatgctagaatgaaacccgcaggagaccgcgcagcgggagcctgcggaacacggaatgaacccctatgctagaaaggcgctcccgtttcatggcacaccagcatacaacgcaacctgatcaggcgtttcgccgtatagcggtggtaggtttcggactggtgggcgcctcgttcgccgccgctgtgcgcgcggcgtatcccgacacgcgagtgctggctgtcgacatcgacgaacgcacgctggccgaagccgtcgagcgcggctgggccacggacggcgcgctgcc

SEQ ID NO: 9446 - DNA, 563 bp, Unknown
  gut microbiota DNA sequence
ggctccgaggtgaacggcatcgaaggcgcgcgacccgacctgttcaagggcgcgcactggatcctctgtcctgacgccgacacgcccgccgagcacttcccgcgcctgcacgagctggtcacctccatcggcgcgcgcgtcatcgcgctgccgcgcgaggaccacgacgaggcggtggccgtggtcagccacgtgccgcatattatggcgtcctcgctcgtgcagctggccagccgccacgccgacgaccagcaggcgctcatgcgcctggccgccggaggcttcaaggactccacgcgcatcgcggccggttcgcccgagctgtggtgcggcatcgccttcgacaacaaggacgcgctgtccgacgggctcgacgagatccagggcatcatcggcgcgttcgccgacgcgctggcatccgacgaccgcgcgtcgctcactacgcttttggccgacgcggcggccgcgcgccgcgcgctgccggccgcctgggtgccctcgacggagcgtctgctggaagtgcgcatccccatggaggaccgtccgggcgtcgtggccgaggt

SEQ ID NO: 9447 - DNA, 564 bp, Unknown
  gut microbiota DNA sequence
gacgcatcgtcggccgcgacgttggccgcctcgagcgcctgctcgcacacgatgaccggatggcctttcgtctccacgatggagtgcttgagctgcgccgtcagctcggcatccgtcgggttgcgcagctcgatggcgcaagtggggcacgccgtggcgcacgtaccgcatccgatgcagcgctcgggctctacgagcagctcgcccgcgcggtacgccagcgcgcccgacgtgcacgcctccacgcagcgcaggcaatcggcattgcggttgcgcaccgagatgcagcgcccctcgtgcacggcgatggcatcgctctcgatctcgcccagcagggccagcaggccgttgatcagggacatggcctaccccctttccgggatctcgtcgtcgacgggctgcggcgtcgcctgcgcctgcttcttcggcagcaacgggaacgtgatggcatgctcggggcacacgtcggcacacgcgcggcacttgctgcaatcgttgagcgtggtctcgcccgccgcgacatcgtgcaggttgatgccctcggggcatgcctgctcgcacagg

SEQ ID NO: 9448 - DNA, 693 bp, Unknown
  gut microbiota DNA sequence
gccatgcgcacgcgccgacggcgagcagcacgagcaacggcaacccgcgctgcagcgccggcatcgacgccgtgttcggatcccatatcaacgcgaagaacagccagacgagcatcacgacgagcgtcgtcgcacgcgtcgacccggaaagcgccgccgcatacgcgaccaacaccatgagagctgccccgcccgccggcgaaagcgcgccgacccagccggcgtcgccgtagatcgcacctgcgagatgcaacgacgcgaacagcgcgaagcctccgacagccgccgcgaccagcagcacggccgcgcgcatggtctgcaccgtgcggaactccatcggcgtcgacgcatgcagctccacgagcgtgtcgcccgtgaacacggccgcggcgcacatgcccgcggcggcggcgtagaacggcatgatccccagcatggcgagcgcggccgacgccggtcccgccgccagcgcccagcacgaacccgcgatcgcgacaagcgccgccgtcgcgagcggcaccgcgatccccacgaccctgacgcgccgcgcctgcgcgtccaacagcgcccaccatgcgcccgatgccgagccgccgcgagcggccctatccgaagcacccatgcgaaacctcctagaatacgtctctcgcccaccgagcatcatgccgactccaagcgggcgatcgtcgcccg

SEQ ID NO: 9449 - DNA, 2649 bp, Unknown
  gut microbiota DNA sequence
ttcggctacgaggggcttcccgtgtacgaggagccggtgcacaccccctacgcgcccaccgaggaggacaagcgctacccgctcgttctgaacgcaggctcgcgcctgccctattacacgcattccaagctgcgcgagatcccttggctcaaccaattcatgcctgaacccgtcgtacgcctgcaccctcaagacgcgcgcgatcgctccatcagcgacggcgacatggtacgcgtgttcaaccatcagaacgagatagagatgaaggccgaggtgacgaacctcgtgcacgccgggatggtggacatctttcacggatggcaccaggcgaacgtgaacctcctgaccacgcgggacttcgatcccatcaccggctttccgccgttcaggtgcgggttgtgcgaagtcgaggccaccggcaagggacgcctcgtcagccaatagccagccaacggaaacggccccgcctgtaccgcgttccgtgcgggcggggctccaaggaggaaccatggaagaacggaaaaagagccgcaaggggctcgttgcgctcggcgtcgcggcggtggtcatcgttgcggccggcacgggattctggatatggcacgagcagcccagcttctgcaacgccgtctgccacacgccgatggactcgtacatggaagcctactacgccgacgatgcgacgctgctggcgacctcgcatcgcgttgcagacgtcagctgcctcgactgccatgtgcccacgctcggcgaacagctggccgaaggcgctgcatgggtggcaggaggctacgaactgccgctcgaacagcggcagttcgacgacgaattctgcatgaacggttcatgccacgctatcggacagggcagcctcgcgcagatcaccgcgcaacgggagtacaacccgcatagcaactaccacgaggaactggcgtgcggcacgtgccacaagtcgcacaccgcatcggtcatgcagtgcgcgcagtgccacagcgacgccgacgtccctgccggctgggtcgttcgatagcggccgcaaggctggaaaggaggttctcatggaggtgttgctggcgatcgtcatcagcgtgctgttcgctttcgcgctgcgcaagcagatcaagcgctacgccgtgtcgttctacatcgtagccgcagccgccgacgtgctgttcctgtcgggagtgctgttcggcgtgtcgagagagttcgccgccgcggtgtacccgtacctcacgcgctgcctgctcgggttctccctgttcgcgctcgtcatgtacgtcggagcgctgcccgagggatcgaaggcgcgccaaatgctcatgcccatccgaggcgaactgtccatcatcgccgccattttcaccatcgggcatgtggcgaactacctgggcacgtacctggccgacatcctgtcggggttcgcggggatgtcggcgggcatgatcgcgtcgttcatcgtgtccagcctgctcatcgtgttgttggcggcgctcaccgtcacgtcgttcaacacggtgaaaacccgtatgaactcggatgcgtggaagcgcttgcagaaaaccgcctacgcgttcttcgggctgacgtacgtgcacctcgtgctggtgctggcgcctaccgtttcctcgagcgggcagaaagccgcgttcagcatcgccgcgtacacggcggtcatgctggtctacgttgtgctgcgcacggcaacgcacctgcgtgcgaagcgaacgcgaccctcaacgtcgtaacacttcgaacgcccggcttcgagcgcgctcgaagccgggcgcgaaaggacggctctcgcacatccatgcaggagggccgcgctgccaacctgggcgcgaatcggcactcatggcaatttctgcatccgcttcgcacggcatcaggcaacgatagggttcaaaaccccagatggcgagatttcttcaggcgacgtatcgcgaaacgtatcggcgcacattgccatagatgccgattcgcgcccaaaaaaaggaggggggatgcgccaccgagcctcggctgagctacttcccttccagctgcgggatgggcgcgtcatcgggctcgtcaaggttgccgtcgtagacatagtggcgcgtctcgcgcgcgatcatgccgctgagcagcagcacgaccacgatgttgggaatggccatcagcgcattgccgatgtccgagatcgtccacactatgtcgcccacgccgatggcgccgaggaaagccacggccacgtaaaccacctggtaggggcggatggcgtaacggccgaacagatacgtgatgcaccggtttccatagtacgaccaacccaggatggtggtatagctgaacgccaccatgcccagcaccaggatgggcgtgccgatgtaggggatcttcgagaacgcctcgctggccagcatcgcgccggagtagacggtgggattcgccaggatgtcggaggcgatatcggggttcgccagcatcgtggacaccagcacgatgcccgtgagcgcgcagatgaccacggtggaccagaaggtgccggtcatcgccacaagcgcctgctgcgccgggttgcgcgtggaagccgcggacgccacgatgggcgccgagcccaggcccgactcgttggagaacaggccgcgcgcgcagccgaactgc

SEQ ID NO: 9450 - DNA, 1671 bp, Unknown
  gut microbiota DNA sequence
tgccacgaggaagcgaatcccgacaaggataggaagtggatacgcatcacttcccatttcgtggaggacgatacgggcaaacccatctcggtaatcgggaaaatcactaacatcgacgatgagatgcgcgagaagatggacttgtccgaacgcgcccaccacgacggcctcaccggattgctgaactggcagacgttccaagaaacggcgggggagctgctgtcaaacggcaacgccggagccgtgctggtggtggacaccgacgacttcaagggcgtgaacgatacgtacggccaccttgccggcgatcgagcgctgtaacagacggccgcggcgctggcggccgcgttcaggccgcaagacctgatcggacgcctgggcggcgacgagttcgccatctgcgtaaacggacgcatcgacgatgagcgtttggccatcgcttgcgccggcatcgtaaaacgcggcgtgacgttcaccgaccagtacggcaccgaacacgaagtgacgctcagcatcggcggcgtagaactgcacggtaaaatcgcctcgtaccagagcgcctatcgccaagccgacaaagctctctaccgtgcgaaagccgccggcaagaaccgcttcgtcatcggtagctaccaagcggaatagatcgccaggatgacagaagatcctgcgactctaagctttttctacttggctttttctacttggctttttcaacgaggccggcggtggttgcggcgccgttcgtggtttccagataggtgacagtcagcacagcatcgacgctgtccacggtaccgtcggccaacatgtcgccgatcacggagaagtcggtgatctcgcaacggtacgtaccgttctccagcttgcgcaccacgtccagcgcagccgcgtaatcgggcaccgtgaacgacacggtcacctcgcggcgcaccagcttgtcctccacggtgggctgcgcgaacgagaggttgtacgtggtcgcgcctcccatcagcgcgttcagttcgttcaactcgttgcggatgttgtcgtacacggccaccacgggcagcgtgccgtcttcgcccaacgcctccagctcggccttcatgcgcgcgcgatcggccgccagcatctcctgcgcgttgatgctgatctcgatgtccgccagccggtcttcattggcagctatcgtgtcggccacgttcttcaccaccaggaagtagtagcacgccaccaccagcagcaccgccagcaccagcatgagcaccttctcgctggtggagaacgagcggttcaacacgctacgccgcgccatcgccggctcccttctccttcgagccgccgtcgccttcgacgtccagcggccccgcgaacacgatctggatcgtagccgacgtggagctatcgttctcgccctgagccgtggataccgtcacatgcgctacgcgctgatcgctttccaaactttccaccagggcggacacctcgttcaaatcggctcccaaacaggtaaccgtggccgtgttcttctccatgcgcagcgacgacaggtgacccacgcccatcaccttctgctgcagcaagttcagaaccacatcgcgatcgaccaggttttgctcttcttcggacaaccccggcaccacataacgatcgtattgcgcgttcagctctgcgtagtcggcgttc

SEQ ID NO: 9451 - DNA, 577 bp, Unknown
  gut microbiota DNA sequence
tacgcccatcaccttctgctgcagcaagttcagaaccacatcgcgatcgaccaggttctgctcttcttcggacaaccccggcaccacataacgatcgtattgcgcgttcagctctgcgtagtcggcgttctcggccgccagcacgtccaggcgcgcctgagctgcggaaacctcgttgctgcttgccgcgctcgccgccaagggatccaccacggcgaacttcgcgaatacgccgatcagcaccagggcgatggtgaacagacccagctgcgccagcaggttgccacgttgctgctgggtgtctaccaagttgatggacgtcttgacggggtacgccggcgccttgccgcgcttcagcgcgctcagcgacacctcctgcttcaaatccatggctaccgccccgccttcatggtggcgccgatggcaaccggacagcgaagggcctcgcccaacggcgcgctcatcggcggcagcacgtcgacgatggacgacacgcgcaagtcggcatgggcagccaccgcctctaccagcggatccagaagcagcccgccaccgcagcagtacgccacctcgatga

SEQ ID NO: 9452 - DNA, 2767 bp, Unknown
  gut microbiota DNA sequence
agcctcgcccaaaggcgcgctcatcggcggcagcacgtcgacgatggacgacacgcgcaagtcgacatgggcagccaccgcctctaccagcggatccagaagcagcccgccaccgcagcagtacgccacctcgatgacagcgtcggggttgttgaagccgtagaagttcagcgcgcgcccgatttcaatcgcgatggactggtacaccgcgcgggcggcctcggagcgctgcgcgccctggtagtcggtgcgcttgtactggtcggcaacgtgctcgtcgacgccgtattcgttcgcgatggcacgatcgatgtcgatgccgccgatctctatgacgcgggccacgtcgtaggcgccgtcgaggaagaaatgcagcttggtcatatgatgggagaagtctatcacgcagcagttagccagcgcgcgaggattgcctcccacgaggttctggtacgccgcctgttcgggcagcgccaccttcagcttcaagcctgcgcgacggaacatctcggtatagtcggcgatggcctgcttaggcgccgcaaccgccagcagatccatgccttcgggctggccgtcggcgtcgttgcgcatgcccaacatcgcataatcgtacacgtagcggtctttgccttgcgatatgtaatcgcggaactcgtacggcaggttcagccgcagctctttctcggtcatggcgggaagcgacagacgccggaacaggctgtcggagcccggaaccacgaacgctacgtccttcgaaacaccgccgatgcttcttaccacgcttttgatgaagtcggccatcgcgtcgtggctgacgatgcgtccgtcggccaccaggccctcgggcagcatctcgatggcaaccttgctcaccgactggccgtcggaaaccgccagcttgatgctgctgtccccgatatcgacacccgtgtacgttttgcccatgcggcgcgttttcctttcagcccgctgcatatcctgtcagaacaaccccgcgtaccacgtgaggatggtcggccccgccaacagcgtgaacgccgtggccgcggcaatggccggcccgaacggaatcgcccttgttcggacgctttccccctcgccttcgccctcgcccggcgaagaaggaacggaaagcccctgagcaaacgcgaacgccaaccccataaggcacgccatcagcagattcagcatagaacccgccaacccgaggaacaaccccaccatgaacagcagtttgacgtcgccgccgccgagcgaccggcgtttcgtcaccttgtcgaacgccacggacaataccagcacgccgcccgcgacgaccgccgcgcctacgatgccgtccagcgccaccgcgccgcccggatgcacccaacccgagaacaggctgcccaccgagaacgcgtccacgcgcggcgcgggcatgaaccagatagacaccagccacagcacgcagcccgccaccacaaacccgttcggaatgatgaacgtgtccaggtccaccaacgccacagccatgaggatgcacacgagcaccaggtaggcggccgtttgcaccgacaatccgtagcgcgcgacgacggcagcgaacaacgcggccacgagcgcttccacgatgacgtagcgcgggctcacccgctgcccgcagtggcggcagcggccgcgaagcgcgagccacgatgccacgggaacgaggtccaatgctcccagcacgtggccgcacgacgtgcaatggctgcggccggccaacacgctctcgccgttggccagccgccatgccaggcagttcacgaaactccccaggcaagcacccagcacggcggcgatccccaaaagaaacgccgcctgcgccggattgaagatgccaaggggaatggtcatgcgttagctagcgggattctcttcgtttcctttaccggtctcatccgtaatcgtaatcgtcggcttggtcttatcggtggcatcgtcgatcgccaccttgtacacatacttggcatcggtaggagccgatgccaacggaccggtcaggtcgcccttgtcgttagcgctataaaacttctgatcgtacttggtcttatctaagccgtcggcgaggtaacccgtcgtcacttcagctttcaccgagcgctcgttcgccttcttcaccgcgtcctcggcgctggtgagcgagctggagaacagcggcacggcgatggccaccagcacggccacgatggccacgacgaccagcagctcggccagcgtgaagccgccgcgctcttcgcgcatcttcttgatcatctctttcatatcggttcctttctccttatccgagccattcgggcaccggaaatatccccatacatttttctgcataaagtaacggctgtgacacgaaacggtgtcagaacggttacattgcagcatacaatgaaaacatcggcaaatacaacgcgatgacgatgaaacccgcgaacaacgccatcaaaacaagcagggcgggctccatgatggaaatcgccttgttggtcacgcgctgcgtctcgtcgtcgtagaacgcgcccatggtttccagcgtctcctccagctcgccggtgtgctcgcccacggcgaccatctcgaccagcgtgcgcggcaggtacgtgctggcctccaggccctcgcccagcgtgcgcccttcctccaaaccggcctccaagcgccccacctcgcgcgacagcacatagttgctcatcacgcgcgacgtgatggccaccgcccgcgtggcaggaaggccggccgtcaccagcat

SEQ ID NO: 9453 - DNA, 1791 bp, Unknown
  gut microbiota DNA sequence
agcctccaagcgccccacctcgcgcgacaacacatagttgctcatcacgcgcgacgtgatggccaccgcccgcgtggcaggaaggccggccgtcaccagcatggccatcgtgttcgcgaactgagccgcgcccgagcacacgcccaccgcgcccagcaccggcagcctcagcttcaagacggcgaacgtcgtcttgccgcgctccgtggtgccgaacagcttcacgcccacgacgatcagcgccagcaccaccgcgatcagcaggaagttgtcggtgacgaagttcgaagcgtcgatcaaaaactgggtcatggccggcgtatccgcccccagcgatgcgatcatgcccgtcatcgaggggatcaccatcaccatcatgatggccagcaccaccacggcgatcaccgccacgaagatggggtaggtcacggcgctttgcaccttggccgacaccttcgcgcgcttgtcgaagtacccgtgcaggcgttggaagctctcgggcagatgcccgctctcctcgccggcgcgcaccgtctcgatgaacacgcgcggcaggttctcgcccttgctttggaaactctcggccaggctgtggcccgacgccacgtcggcggccacgtcggccagcacgcgtttcagatacttgtcggtcacctggtcggccaccagcgacgtggcgcgcgcggcgggcacgcccgcgttcaggatggtggcgaactgggcgcacatgacggcaaggttcttctgcttggccttcggcttcgtgatgtccatggacagtaggtttttgccctcgcgcacggggaccacgctttggacgacgcggcactgctcgcgcgcgcgttccatggcctcgatctcgtcgaacgcctcgaccacgccgtcgatctgctggccggcggccgttatcccggtgtaagtgaaggttggcatcagcgaacgctctttctcacgtagtcgacgtcgtgcgcggcgtcgatagcggtttgggacgtgatgtcgcggttgcgggccagggcgatcagcgcgttgtccatggtcacgctgcccgccgaggccgacgtggccagcgagccggctatctgcggcgtcttgccctcgcggatgaggttgcggatggcgggcgtcaccatcatcagctcgcacgccagcgcacgtcccgtgccgtcgcggcgcggcagcagctgctgcgacagcacggccaccagcgtggttgacagctgcatgcgcacctggcgctgcaagccctcggggaacacgtccaccatgcggtcgatggagtcggcggcgctcttcgtgtgcagcgtggccagcacgaagtggcccgtctcggcggcggtcagcgccgtttggatggtgtcgaggtcgcgcatctcgccgataaggacgacgtcggggtcttcgcgcagcacggcgcgcaaggcgttgctgtagctttcggtgtcttggccgatctcgcgctgcgagatgacggactggtcgggcgtgtacacgtactcgatggggtcttccatggtgatgatgttctcggcgcgcgtgtggttgatgctgtcgatgagcgccgccagcgtggttgacttgccgctgccggtttcgcccgtcaccaccacgatgccgcgctggatgcgcgggaagtccatgaccgcaggcggcaaacccaacgtctccaacgcggggatgcggtcggacagcaggcgcaaagccgcgctcgcgtggccctgctggcggaacaggttgatgcgcacgcgcacgcccccgatggtctcggcgcgatccagctcgccgatgcgc

SEQ ID NO: 9454 - DNA, 958 bp, Unknown
  gut microbiota DNA sequence
atcgtctccggccaaacggcgggccagctgctcgcaatcgtcgtgcgacaacggtgcgtcgccgtccacgcccgcgttctcaaggcgcccggccaggcggaacttcacgggcagaccgcacaccaggtgcacgtcggaagcgcctgcctggcgcgccatgtctatgatgtgctcaacgttcatgcgtggtccttctctttcagtttgctgctatcgccgcacttttggcatccgccttcctcttccttactccagcgcggtgatggttttgcgggcttcctcgacggtggtcgcgccagtcagcaccagctcgcggcagctgtcctccatcgtcttgaacgagcccgtgcgctcgatggcgtccttcagctcctcgcgcgtggcgccgcccgtgatgcggctgcgcagcgcgcggtcgatcaccaggatttcgaacacgcccgtgcgcccgcgataccccgtgccgaagcacatgggacagcccgatccgcggtagaacctcacgccggggtcgtagggcaggccgacggcctcgaattcctcggggtcgggacggtactcctcgcggcaatgggggcacaccttgcgcacgaggcgctgcgagatgacgccgcgcacgccgctggcgatgaggtacggctccacgccgatgtcgatgagacggtcgatggtggacgccgcgtcgtaggtgtgcacggtggacagcaccaggtggccggtgatggcggcgcgcatggcgatctcggccgtctcgccgtcgcgaatctcgcccaccgccacgatgtcggggtcctggcgcaggatggcgcgcaggccgctggcgaaggtcatgcccgtcttctcgttgatctgcacctggttcacgccgtcgatgttgtactccacggggtcttccagcgtgacgaggttcaccgaatcggtgttcagctggcggatcatcgtgtacatggtggagctt

SEQ ID NO: 9455 - DNA, 464 bp, Unknown
  gut microbiota DNA sequence
gctgctggtcatcggcgcctgcacgtggctggcctacgacatcatgcgccagagccgcggcatcgaggcgtaagcgcgagcggcccaggtgcccctgcacaggtttccgagcctgttgccgtagttgccaaaagagcaattgcaacaagaagtatatgcggtcacgagagaagggacgcggcgatggacgaaacgataaagcaggggaagggcgcgcttcgcttgctgctggcgactatgttggcggcaatgctgatcccctgggctccccgagcggcttgggccgatgaaaacgaagcagctgcccagacgcagacgagcgagatcgccgatctgctggccgccggagactacgtcgagggcgaggctctcgtcgtcgttgacaacgcggtatctcgaaacagcctccgttcgcgcagcgtcgacccgctctcctcggccgaaccgctcatggacgcgtcggc

SEQ ID NO: 9456 - DNA, 2379 bp, Unknown
  gut microbiota DNA sequence
cgagggcggcgacatcctcaacatcaacgacaaggtgctggccatcggcatttcccagcgcaccgagcccgacgccatcgacgccatcgcgaagaacatcttcgaggacgagaccagcccggtcgagaccatcctggcgttcaacatcccgaacaaccgcgcgatgatgcaccttgacacggtgttcacccagatcgacgtcgacaagttcaccatccatcccggcatcatgggcccgctgaccgtcttcgagatcaccgccgagggcgacggtatcaaggtcaaggagatgagcggcaagctcgaggacatcctcgagaagtacgtcggcaaccccgtggagctcattccctgcggcggcggcgaccgcatcgcggccgagcgcgagcagtggaacgacggctcgaacacgctgtgcatcgcgccgggcaccatcgtggtgtacgagcgcaacgacgtgacgaacgcgctgctcaaggagaagggcctcaaggttctcgagatgccctccgccgagctgtctcgcggccgtggcggcccgcgctgcatgagcatgccgcttgtgcgcgaggactaaggtaccaagctcgtgcgcagctgcatgcgcacgagtgctatgagagctacccttgccttttccggattgccggggccgtgcaacgcggccctggcgttcgaaaaggggcggacggaaacttggctctatccgccggtgcgtattttgttttgttctgtaagcaacgttgaaaggaatgatctatgcctactagcctgagcggtcgcgacttcctgcgcctcctcgacttcaccaccgaggaaatcgagtacctgctgaagttgtcccgcgaattcaagaacctgaaattgaccggtaccccccatcgttacctcgagggcaagaacatcgtcctgctgttccagaagacgtccacccgcacgcgctgcgcgttcgaggtcggcgccatggatctcggcatgggcgtgacctacctcgatccgggcagctcccagatgggcaagaaggagtccatcgaggacaccgcccgcgtgctcgaccgtttctacgacggcatcgaattccgcggcttcgcgcagtccgacgtggaagagctggctgccggcgcttccgtgccggtgtggaacggcctgaccaccgagtggcatcccacccagatgctcgctgacatcctgacggttcaggagaacttcaactacgacatcaagggcaagacgctggtgttcatgggcgatgctgccaacaacgtggctcgttcgctcatggtcgtgtgcgccaagctgggcctgaacttcgtcgcctgcggccccaaggagaacatgccggccgccgacctcgtggagacctgcgaggccatcgccgccgagaacggctgcacgatcaagctgaccgaagacgtgaaggatgcctgcacgggcgccgacgtcatctacaccgacgtgtgggtgtccatgggcgagcccgacgaggtgtgggccgagcgcatcaagctcctcgagccttaccgcgtgacggaggaagtcatggccatggccagcaaggacgccatcttcctgcactgcctgccgtcgttccacgacaccaacaccaccaccggtgccgacatcgccgagcgcttcggcgtcacggagatggaagtcaccgacggcgtgttcgagtccaagcagtccaaggtgttcgacgaggccgagaaccgcatgcacaccatcaaggccgtcatgtacgcgacgctctcctaactcagaaagactaggtgaacaaacatgccttatcagaagggtgaaggtaagtcggttgtcatcgcgctcggcggcaacgctctgggcaacacgccccaggagcagctcgagctcgtgaaggcgacggcgaagaacatcgtcgacatggtcgaagagggcatcaacgtcgtggtctcccacggcaacggcccccaggtcggcatgatcaacaacgcgttcgcgtacgcgtccgccaacgacggcaagacgcccgagatgccgttccccgaggccggcgccatgagccagggctacatcggctaccagctgtcccaggccatcctgaacgacatgaagctgcgcggcatcgaccgctcgacggcctgcgtcgtgacgcagaccgtggtagacccggccgacccggcgttccagaaccccaccaagcccgtcggcgccttcctctccgaggaggaggccaaggccaaggccgccgagaccggctggaccttcaaggaggacgcgggccgcggctggcgccaggtcgtcgcctccccgaagccggtgcgcatcgtggagttcgacgcggtgaaggacctcatggacgccggctacatcgtggtgtccacgggcggcggcggggtgccg

SEQ ID NO: 9457 - DNA, 590 bp, Unknown
  gut microbiota DNA sequence
acacggcaacggcccccaagtcggcatgatcaacaacgcgttcgcgtacgcgtccgccgacgacggcaagaccccggagatgccgttccccgaggccggcgccatgagccagggctacatcggctaccagctgtcccaggccatcctgaacgacatgaagctgcgcggcatcgaccgctcgacggcctgcgtcgtgacgcagaccgtggtggatccgtccgacccggcgttccagaaccccaccaagccggtcggcgccttcctctccgaggaggaggccaaggccaaggccgccgagaccggctggacgttcaaggaggacgcgggccgcggctggcgccaggtcgtcgcctccccgaagccggtgcgcatcgtcgagttcgacgcggtcaaggacctcatggacggcggttacgtggtcgtgtccacgggcggcggcggcgtgccggtgttcgagaaggaaggcctgtacgagggcgttcccgcggtcatcgacaaggaccgttcttccgccaagctggccgccgacttcggcgccgacatgctggtcatcctgacggctgtcgagaaggtttgcgtgaacttcggca

SEQ ID NO: 9458 - DNA, 2305 bp, Unknown
  gut microbiota DNA sequence
gaaggacctcatggacgccggctacatcgtggtgtccacgggcggcggcggggtgccggtgttcgagaaggagggcctgtacgagggcgtcccggcggtcatcgacaaggaccgctcctcggccaagttggccgccgacttcggcgccgacatgctggtcatcctgacggctgtcgagaaggtttgcgtgaacttcggcaagcccgaccaggccgagatcgacacgatgaccattgccgaggctgaggagttcatcgcccagggccagttcgcccccggctccatgctcccgaaggtggaggcgtgcatcgagtacgtgcgcgcgttccccgagggcaaggctctcatcacgtcgctcgagtgcgccgctgccggtatcgaaggcaagacgggcaccgtcatcacggcgtaaagcttttttgcgtgtgagcggaaggcttcccccagcttccgcacgatgggcggtggcatgcgtttcggcgcatgccaccgcaacaggggtacagcggtctgcggttacgcttccactgatccgcttgaaaatttctcgttcgccaaaatatccgactcgatcctcataattaggaggggttgttatgaccgagaaggcaaaagaaaagagcaagaaaaagcgatctatatcatcgtttaccatcctgctgatcatcctgatcgtgctggcgctggtcacggtagtgatgtcgctggccggtgtggaaggggtccaaggcgccacggtcgccaatgtggccacggctcccgtcaagggctttaccgacgccctgcctgtttgtctgttcgtgttgatcctgggcggtttcctgggtatcgtcacggaaacgggcgcgctggacgccggtatcgcagcgctggtgaagaagctcaagggcaatgagctcatcctcattcccattctgatgttcatcttctccatcggcggtacgacgtacggtatgtgcgaggaaacggttccgttctacctgctgctcgcggccaccatggtcgccgcaggcttcgacagcgttgtcggtgccgcggtcgtgctgttgggtgccggttgcggcgtgctcggttcgacggtcaacccgtttgccgtcggtgctgccgtggactctttgagctcttccggcatcgtgatcaaccagggcaccatcatcctgctgggcgtggtgctgtggctcgtgacgctggcgatctccatcgtcttcgtcatgcgctacgcgaagaaggtcaaggccaacaagggttccaccatcctgtccttgcaggaacaggaaaccatgaaggccgagttcggcgaggctcagcaggaagctgaaaccgctgaggcgaacccgaacgagaagcttatgacgggtcgtcagaagtggacgctcatcgtgttcgccctgacgttcgtagtcatgatcgtcggcttcatcccttggggcgacttcggcgtcgaggtgttcgatgccggtgcggcgacggaagaggtcaccacgcaggttagcggcgacgacatctccgcggcttggaccgacaagaaggttggtggcgagattacgttcgacggcgatgtgaccggcacggtcacggccgaagaagagatctcccagggttggtccgcgttcctgacgggtctgccgttgggtcaatggtacttcgatgaggcttccacctggttcctcatcatggctatcatcatcggtatcgtgggtggcgtgtccgagagccgtttcgtcaaggcattcatcaacggcaccgccgatatgatgagcgtcgtgctgatcatcgccatggctcgttctatcaccgtgcttatgggcgagaccggtctcgacatgtggatcctgaacaacgcggcgaacgctctgaacggtttgtcggcggtcatcttcgcgccgatgtcgttcttgctgtacatcgtgctgtcgttcttgatcccgtcgtcgtccggcatggccacggtgtccatgcccatcatgggcccgctggcgaactcgctgggcttctcgaccgacgtcatgatcatgatcttcagcgccggcaacggcctggtgaacctgttcaccccgacgagcggtgctatcatgggcggtttggcgctggccaaggtggaatactccacatggctgaagttcggcggcaagctgttcgtggtgctgggcgtcgcctgcgtgatcatcttgacggttgcgatgatggttatcccgggcaccgcgtaagcgtgcaacccgcggcatagccgcaatgaaccgacgcgtttcgaggatcccctgcttcggcgggggatcctttttcgcgtgcgggaatgagacggggg

SEQ ID NO: 9459 - DNA, 9013 bp, Unknown
  gut microbiota DNA sequence
gaatgaggcactaacctcgtccccctgtctcatccaggagtttctccatccagatgtgctcgacgtgctcgtccagctcgacgggaccgtactgcgcgtagcccatacgcccgtagaacggcgtgacgcggcattgggcgtgcaggtgcatttcggtcgcgccggcctcgcgcgccaggcgctcggactcggccagcagcgcggccccgaagccgccgcggcgcgcctcgggaagcacggccaggcggccgaacacccagcgacccggctgatcggggcggtcgggatcggggaaggtgcgtgcgcagccgacaagggcgtttgcgtcgtaaagcgttacgtggatggtgcgcggatcgtcgtcgatgtcgtcgaactcgtcctggaaaccctgttcctccatgaacacgcgtgtgcgtacgatgcgcgcgtcatcgaagttcccatgctcgaatcgcaattccatgccggtcctttctctcgtcggttgctgggtcactgtaccatatgtgcgcaacgaaacggagattatccgaggtcgtgtgtatgttttctgcataacgggcgttcgagtgaaacgcgtgggggctgcgtgccccaaacgctcgggaacatggtagaatcgtgagacgtgtaaacgaaagacccatccgctaaggaaagatgcgtaccatgcaaattcgcgaacaacttgaacagctgatcgacgcggccgtcgcggccgcgtgcgaggacggaacgctcacgctcgagcaggctcccgaggcggctctcgagcgcccgcgcgacgagagcaacggcgactgggcgtccaccgtcgccatgcgttcggcaaagcttgccaagaagaatcctcgcgagatcgctcagatcatcgtcgaccacctgcccgagaacgacatgatcgcttccgtcgacatcgccggccccggcttcatcaacattcgtctggcgaacgccgtcctgcagggcgttgtggcggcggctcgcgccgagaaggacgacttcggcaagggcgagattcccgagggcgagcgcaagatcaacctggagtacatctcggcgaaccccaccggccccttgcacgtgggccatggccgctgggccgcgctgggcgatgccacggcgcgcgtcatgcgccatgcgggctacgacgtgttcgaagagttctacatcaacgatgccggcacgcagatggacaacttcggcgagtcggtggccgtgcgctaccagcagctgctgggccgcgacgtggagatgcccgaggcgtgctatgcaggctcttacgtgaaggatatcgcgcagaccatcatcgatgaggacggcgacaagtggctcgatgccgacccgaaggagcgcatggagaacttccgcgagcgcgcctatgcctacgagttggccgagcagcaccgcgtcaccgagcggttcggcaccaccttcggatgctggttctccgagcgctcgctgtacgtgcccgatgaggacggcttgagcgcggtggaccgcagcctcaaggccatggacgagaagggctacatctacgtcgaggacggcgccacctggttcaggtccagcgcgttcgacgacgagaaggatcgcgtgctcatcaaggccaacggcgagatgacgtacttcatgagcgacgtggcgtaccactacaacaagatggagcgcggcttcgaccacctcatcaacatctggggcgccgaccaccacggctacatcgcccgctgcgaggccatgctggccgcgtggggctggcccggcgcgctcgagatcatgctcggccagctggtgaacctgttccgcgacggcgaggccgtgcgcatgtcgaagcgcacgggcgagatgatcacgttcgaggagctcatcgacgaggtgggcgtggacgccacccgctacctcatgctggcgaagtcctccgaccagcccatcgacttcgacatcgaggtggcgaagaagaaggacgcgtcgaacccggtgtactacgtgcagtacgcgcacgcgcgcatctgctcgatcctgcgcaaggcggccgacccggccgatgccgaagcggccgcgaacggcgacatgtcgatggacgagctggcctcgaaggtgatcccggcgaacgtggacctctcgccgctcacgcacgagtccgagctggcgctgatgcgcaagatggacgacttcggcccgctcgtggctcaggcggctcgcgaccgcgcggcgttccgtttgacgcactacgctcaggatctggcctcgctgttccattcgttctacacgaactgccacgtcatcggcgaggaggaggctgtgacgaacgcgcgtcttgccctcgtggacgccacgcgcatcgtgctggccaagacgctggacctgctgggcgtttccgctccggccaagatgtaggtttcgttcgaaggaaggccgcccgatgggcggccttttttatacgttgtcctccaggtcgacctgcatcagggcgacattctcgcgcaggcgcttgtacgaggatcggcacaggtcgccgtcttcgtagcgcgcttggatctgctcgagctcgaggcgcaagccgtagcgttcgatgtcttgggccttgcttgccgtgttcgtgagggcggtgatggacgggttggcattgcgcaaggccgtgatggaacgctggtattccagcaagagcgtgctgacgtcctcggccggttcgtccgattcgggggaggccagcttctgctgcaggcgctccaccacgtgctcggcgcattgcatctgcagatcgcggatggcctgcacgcgttccgtgacgttgatgccgggcagtccggcgacgatgcggtgccatcccgagcgcgctatggctcgcaggcgcagcatgaagttctgagccgaccagcggcctcgatgatgcttcagcatgttctcgatgcgggcgaggcggctgaggtactggtagccgatgatggggtagatctcctcgtcgtcgatgagcttgagcgcgagctcctgctcccagcgcaccgcttgcaggcgcagggccgtgttcggctcgtcctcgatgtcgttgcggcttttgatgcgcgcgatgcggtcgttgtaggagcggatcaccatctgcgtggccgcacggttctcggcggtctggcgcgcggccaagtcctcgatgacggtgcgcagtatctcgatgctcacctcggtctcgtcgcagcgcaggtcctcgtcggtgggcggcttcttcggtgccagcaggggcacgacgaacgtggccagaagcagggttactacgatcacgccgcaggccatgaatatcatgaggtcgcgctgcggcaccgcgtaggatatggtgaacgccacggccagcgtgatggctcctttcgggccgcccagggtcatgacggcagccgtgcgcacgttctccaacccgaacgggcgatctgcgcgttcggcgcggctgtgcacccattccatggccatcacccaaacgaatcgtgcgaagatcacgatgaaggcgagacccagcacgtacgcgatgagcttgtcgttcgaaacggccgtgctttcccatgttccttgaaaggcgagcggcagctgcgtgcccagcaacacgaacaccacgccgttgagcgcgaaggacagcacccgccagacgcttgtcgagacgatgttcatgcgcgagatggacggcccgatgatgcgcggcgagatgacgttcacgagacctgccgccaccacggccaggatgccgctcgtgtgcagcgcgttggccacaaggtacacgatgaacggcgtgaacacctcgaacaacacgtggaaggtcgtgttctccaggccccacgagcgaaccttgcgcactaggaagttgcccaggtagcccagggcgatgcccatgaggataccgccgaagaagctgaacaggaagtcggctgtggcgtcgacgagggagaacgtgccggtgacggcggctgcgatggcgaattggaacgccacgatgcccgaggcgtcgttgatgagcgactcgccttcgagaatgctcttggaacgtgaggagatgctcgtttccttggaaagcgacgctaccgccacggcatcggtcgggccgagcgccgcgcccagcgcgaaagcggcgaacaagctgatggacggcacgagccagtggacggcgaaccccacgacgagcgccgtggcaagcaccagtccgatggccagcgacagcacgggcttgcggttgcgccacagcgatgccttgtcgatgttcttggcctcgtcgtagagcaaaggagcgatgaacagcacgaggaacagcttgtcatcgagttcgatcttgatttgcgaggaagcgagaagcgcgatgccgaggccaagcaggatctgtatgaggggcgaggagatcttgggcaccagctggtcgatgaccgacgagacgaggacggccgccagcaagagcagggcgagcatgagcgcttccaagggctcctccattcgttgggatgggatcaacccttttattgtaaccgagccggtcgcatccgctcggctttgcgcacgaaatgagcggaaggcgttatttgggccgcccgcccgctacggcgatgctcgctttgatgtagagcgtgtaggcgacagccgccgtggaagccagcaccagatcccgctcgaaatccccctcattttctccgctcatcaggcctttcgggctggttggaagggctgcgaacaacgctcgcagcgcggcttcgaacgcatcgcagtagtagtcgtaggccacgcgcgtgtcgaagctggcgatttgcatgcggatgagccggtcgatttccgctatggagaacgtctgcttaagggtgcagatgacgatgaggtatgcgatgtgggagcgcgtgtacttcttgcctgcggccgatgccagcacgccctgcttcacgtagttgttcaccatggaacgcgtgatgatcttctcgccgggctggtacagcggagccagcgtgtcttcgagaaaacccaccagttggtccatgtacaggtcgatggagggtatctcgtcgtagcgagggaggtgcagggagacgagatgctcggcataggtcgatgtgctgacggatgcgtcgttcatgaaggagcctttcgcgcgcgtgcggaggaaacaaaacgagcatagcaaggcgaccgtttggagtcaatctttagaactgcttgacatagtacgtttcaaccaataatctagttattgatactagatagtaacccgggcgatgcccggacgaacgaaagcaggtcgcatggacacctctcgcatcgctctcgtcatcgactcgtgcaccgacgtgccgccggcggacgtcgagcggtacggcatgtacgtcgtgccgttgcaggtgaactacgaacgcgagagctttctcgataaagtgaccatcacgccgcaacaggtatacgaccgcttctccgaggagatccccactacgtccacgccgactcctgcgattgcgcgcgaggtgctgcagcgcgtcgtggacgacggttacgagcaggccgtcatcgtcactatctcgagcggcctgtcggccacatgcgagctcatgcgatcgatcaccgtcgggatgcccgagctggactgctgcatcgtggacacgaagaacatcggcatgggcgcgggcttggtcgcgcttgcggtggcgcgcaggctggccgacggcgccacgctcgacgacctgcgacgcgacagcgagcgcatcgtggagagcacgaaggtgttcttctgcgtggacacgctggaatacctgcataagggcggccgcataggcaacgtgacgtacgcggtgggcagtctgctggacatgcgcccggtgatcacctgcaacgagaagggcgtgtactgcaccgtggcgaaggccaagggtcgccgtcaatcgctgaagaaggccatgcgctgcgccgaggaggcagcggcgcggtatccgcgttgcacgatggccgtggtgaacggcgatgccgctgcggaggcggccgaagtaaagcacgagctggagcagcgcgtgcacaacgtggacgcctggtacgaagggcagatcagccccgtgctcgtggtgcataccggccccggcctcatcggcatcggcgtctgcggagcgtaaacccttccgtcgctacgccagcgggagggcgagggtcacggagaagccttcgcccggcgcgccgtcgagggagagcgatccctcgtgcgcgcgggcgatgcggtcgaccagaacgagccccaggccgtgatcgcggttgaacgacccagccgcgctgcgcgccgtgcgcgagcgcgcgaggcgcgcttcgagcgcggcgaggtcggcagccgcgattccagcaccgtcgtcgctcacgcggatcgtgcagtacgcgttgtctcgcagcgccagttcgacgctgatcgtgcatccctgctcgttgtgcagccgcgcgttggagatggcgttctccaccgcgcgcgtgagcagcctctcgtcccccagcaccaccgcgttcagcgcgtcctctgcgatgtcgagctcgataggatgcgcttcgtccagcccgctgttcgcatgcgcggccgccacggtgcgcagcaggcgcgccgcatgcacgcgttccaggcgcatcggctgcatgtcgtagtccagctgcgaggcggtgttgagatcggtgacgaggtccttgatcttgagcccctgcgctctgatgacccgcgcgcttgcgcgcgcctcttcggctgcgccctcgtcctgcacgagcgcgtcggcgtagccgagaatcatcgacagcggcgtgcggatgtcgtgggagatgccgcgaatccagcttgcgcgcgcggcgtccttctgctcgatgaccgcgctcgtctcggtgatctggtcgccgatgtcgcgcagatcccctttgaggtgcagctcggccgcgcgcccgtcagacagcgcgtcgagcgcttcggcgatgggagccacggcgttttgcgtccggcgacgcgacaccgcgtagatggtgtacaagatcccgaggtcgactgcgaatatcagcagcacgtacagcgggaagttgcgcacggtcgacgcggggtaggtgagcgtcatcgtccagaactcgttcttcgggaaacccacgaccagcaggccgtcgtcccgatcccagaaaaacgccggatagtcggcgacggccgcataatgcgctgccatcgccacgtcgttcacgctgaaccggtcgggcacgtcctccggcttgtcctgcgaccaggccaccgcgccgtccgtcccgatgacgagcgcccaggcgtcctgctggctgagcgcctccaggccgttctccccaagcgtccatgagccgtcggcatcctgctcgagagcttggtcgactgcgcgcgtcgtggacgcgggcgtgccgtcgttgaagttcgagttcgattcccggtaggcgatgacggcgtacaggaagaagtcgatgaccacgatgagcagcgccagcgccacgaacagcagcagctgcttggtgaagaagcgcgcgaagcccgccggtcgccttgtgcgacggtctcgagcagatgtgcgaggggcgcggcccatgagctagccgcgctcgaccagcttgtagcccagtccgcgcgccgtgacgagcgaaaccggcgccgacgggtctgcctcgatcttctcgcgcaggcgacggatgtgcgccatgagcgagttctcgtagccgaacgacgtgccccagcacgcctcgcacagggaatcgatggtgacgatgcgcccggcgttgcgcgcgagtacgctcaggatctcgtgttctttggcggtgagcggcaccgtctgcccgtcggcgcgctccacctcggcggtggcgaagttcacgcggctcgcagccagctccaacagcgggttctcggcggcatagcagcggcgcagcacggcggcgatgcgcagcaccagctcttggggcagaaacggcttcgcgatgtaatcgtcggcgcccaacgtgagtcccgacacgcgatcgaaaggctcgtctttcgccgtgaggaacagcgcgggcgtcgaggtgtgcgcgggcagctgacggatgcgtccgagcagctcgaagccgtccatgccgggcatcatcacgtcgagcacgaacagctggtacgcgtgctcgggggaggcgctgcgcgccgcgatcgaggagagcgcttcggcgctggaattcgcgatgtcgacggaggcgaaccccgcgccgtgcaagatggtggccaccatgtcggccagctcgcgctcgtcgtccaccagcaggatgcgcttgccgcgcaagtgcgtctccaccatgccgaatgcgccggtcatcgtcgaacccctttctctttcgtgcttgccagtatgacacatgcggccgagcgcggtaatccgcttcttcgtatcgtaaggcagccgcaaggtgcggtaaggaagccgcaaggcgtgctgcaaggcgctgtaaggagcggctcgtaacctgggagcaggagcaaaacgagaagaaggagctgaatatggatgcaagggacgtcggcgcgtcgacggtggtggaggtgcgcgctctcagcaagcgctacggcgccgaggggcgcaagcacgacggcagcgtgacgcaggcgctcgaccgcgtgagcttcgcggtggcgtgcggcgagttcaccggcatcatggggcccagcgggtcgggcaagtcgacgctgctgaactgcctggccaccatcgacaagccgtcgagcggcaccatcgtcgtcggcgggcgcgacgtgaccgcgctcgcgggcaaggagctggcgaagttccggcgcgaggacctgggcttcatcttccaggactcgaacctgctggacacgctcacggcgtacgagaacatcgcgctggcgctgaccatccagaaggcgcccgtgcgcgagatcgacccgcgcgtgcgtgaggcggcgcgcacgctgggcatcgaggatgtgctgcagaagtacccctaccagatgtccggcggccagaagcagcgcgtggccgcggcgcgcgccacggtg

SEQ ID NO: 9460 - DNA, 889 bp, Unknown
  gut microbiota DNA sequence
aacgcccgtgcgcgagatcgacccgcgcgtgcgtgaggcggcgcgcacgctgggcatcgaggacgtgctgcagaagtacccctaccagatgtccggcggccagaagcagcgcgtggccgcggcgcgcgccacggtgacccgcccgcatcttgtgctggccgacgagcccaccggcgcgctcgattcgaaatcggcgcgccagctgctcgaatcgcttgcgcacctcaacgagcggggatccaccatcctcatggtcacgcacgactcgttctcggccagctactgcaaccgcatcgtgttcatcaaggatggcggcctgtacggcgagctgcgccgtaacggcacggagcgttcggcgttctaccgccgcatcgtggacgtggtctccagcatgggcggcgcgggcgaggacgatgccgcggacgaggtgacgcgccatgcttgctaggctcgcgctcggcaatgtgcgcaagtcgctggcggacttcggcatctacttcctcacggtcatgctgggcgtggcggtgttctacgcgttcaactccatgacggcccagcagggcgtgctcgcgttctccgagacgcaaagcaagatgttcgatctgctgggcatggtcatcggcggcgtgtcggtgttcattgcgttcgtgctcgtgttcctcgtggtgtacgcgaacagtttcctcatcaagcggcgcaagcgcgagttcggggtgtacctcgccttgggcatgagcacgggcgacgtggtgaagatcgtggcgctggaatcgctgatcgcgggcgcggcctcgcttgcggcggggctcgtcgtgggcatcgggctgtcgcagcttctcttgcagctgacgagcgcgctgttccaggccgacgtggccgaggcgggcgg

SEQ ID NO: 9461 - DNA, 326 bp, Unknown
  gut microbiota DNA sequence
ttcgcggcgtcgctcgtgctgataggcgtgtcgtacaagctgctcatcgacaacgggctgatggagccctcgcccgaattcgcggcggccacgttgctcgtgtgcgcaggcacggtgctgttcttctacgcgctgtcgggcttcctgttgaagctggtgcagctgatcaagccgctgtacctgcgcgggctcaacatgttcgcgctgcggcagctgaacgcgaaggtgaacaccgcgttcgcgtcgctgtcggtggtgtgcctcgtgctgttcctggccatcaccagcgtgtgcggcggcatcggcatccgcaacgccatcgacgg

SEQ ID NO: 9462 - DNA, 13690 bp, Unknown
  gut microbiota DNA sequence
gccgcggggctgcgcgcgagcgtggcggccgtgggcgcgggcgacttcgatgcggcggcgtcccgcacggcgcagatcgactttttggtcgatccggccgacggcctcgtgatggacgacgtggagcgcgcgagcggcctcaagctgtccgactacgcgggcgcgtccgtcaacagcggttacggcgcgtaccccgtgtacctggcgaagctgtcgcaggtgaacgccgcgctcgagctggcgggtcgaccggcgctcgagctgggcgcgggggagtgcgcggttttcagcgactccgacatcacgagcgggttctaccgcgacgcggtggatcgcggcaccgtgctgtccgtgggcgggcgcgacctgcgcgtggccgaattccggggcgagagcctgcagaccacgccgtttccgatgaacacgggcacgctcgtggtgcccgacgaggcggtgccggcaggatcggcgatcctccagtccgtcctcgacgtgcagtgcgcaagcgacgaggacgaggccgcgttcggcgagatgatggacgccgtggcggacaccgacaaccccgacacctggccgatcacgctgtccatgacgcgcgccgaggtgatcgaccagagcatcagcctgtccaccattgtggcgtacctggccatctacctgggcttcgtgctggtcatcgcctgtgcggccatactcgccatccagcagctgtccgacgcttccgataacgcgcagcgctacgggctgctgcgaaagctgggggctcccgagggcatgatcagcagcgcgctgttcgttcaggtgctcgtgtacttcctgttcccgctgctgctggccgtcgcgcacgccgcgtgcgcgctcgtggtggtcaccgacgtcgtggccgtgttcgggcacctcgacatcacgtcgatggcgttggcctgcgccggcgcgttcctggcggtgtacggcgcctacttcgcggtgacgtacgtcggcgcccggaagctcgtgcgcgaataggggggggagcgaaggagcccccgcaggccgagtctgcgggggctccgcgatgaagcggcggggcagctagatctgcccgccgagggagaaggcctgggagaacgggctgccgtcgtcggtcggcacgagcaccaggtttccgctctccaggacgtacgtgggcaggacgcgcaccacggtcagctgcactgtgccgcccggcgcgatgacgacgtgctgggggtcgtcggagggcacggtgtcgcccgttgcctcgaagtccagatcgtaacccgtccgcaccatgtcgagcgttccgtcatcgttgcgcagggcgaaatcgtagagcacgggcgtccaaacggggacggccgtatcttcaaggttgcgcagcgtcaccgtcgtggacgcgtaacggtagtcgtcgctcgtaagcgtgccgtcgtcgttgtagccgtagccccacacctcgcgcgagcatttgtccatgtagcgcgcgttgcccagccatccgtccacgacaaagaggcagtcgtcgagcgcctttccgcccggaagagtgtcggagagcgagatggaaggggagctcatggccaagcgcgcggtcggctgttgcgagctttcggagtccgggtgagaggagccggtgctttcgtatccgaagtcgaacgcgacttcgccgtcggacggtgtgagcgcgttttcgggcagggtcgcgtcgacgcgcgcgccgttctcctcgacggttgcccgccaggtatcgtcctggcgctcgatggtcgacgcgggcagcacttcgtcggcgcggtcgttcgcgtcgtcgagcgggaaggggaacgggccgcttcccgctttcaccacgatgccgtagagcgatttcgctgccgagggggcttcggcgtcgtctgcggcgagacgggtggtcaggcggggggtgccgtcgaccatttcggtctcgaagttggccgcgtgcagctcgatggcctgggtggacgtgcgcccgtcctcgaacgtcacggtgacggtgagcgtctgtccttcgaacaggtcgatgacgggggattgcaggtcgcccatgatgttttcaggaggctcgccctcgttcgtccagaggccgaaactcgtcgtgccgtccgcgatgccggggtcgtcgcttgcggagacgtcgatggtggaacccatgagcttcgcgaggctcagcttgctctctccgttccgcatggagcttccgacgaaatcgtagccgccgtagtactcgccggtaccgcgtgccgtgggcttccagcttgccagctcgcccatgcgcgggtcgtcggggtcggtcggtccgtcttcgaacgtcacgcggtacagggccccgcccgtcaggttcgcctgcacgcgggagatgccctcgccctcaacgtggaagaggcagccggtgaagaagccgctcactttgtagtcgtcgcctcctgagaagcggtagcccaagtcgcggtcgaacgcaacggtgcccccctcgccgggcgcgagcggcgcgctgccgtcggaggcgtaggcgcgcacggcgaagccgcttgcctgttgggcgtcgctcagggagatggccgtatggccgtccgcgtccatcgcgcccatgaccatgggcacgccgccggcgacgatggccgcggcgacgaggcaggctgcggcgggcagaccccagcgacgcgcaactgcgacgccgccgctgcgcgatccggcgcgccgatgtgggcgcttggctgacgcggtcgcgaccggctgagcggaggaggcgaagcggtcggctgcccgctcggcggcggctagcgtgcgttctttgagatcggacgacgcgcgcacctggtgctgcatgcgctcgtactccttgcggaaatcgttttcgttcatgagtgcgctcctagattgatcttgagggccttgcgcgcgcggtggaggtgggatcggacggtgcctgagcgctcgccggtgatctgcgctatctcgtcggttgcatatccttcgaagtagaacaggtgtacggcggtgcgctgctggggcgtgaggcgggcgagggccgcggccaagtcgccgggctcgaggttgcggttgccgaaagcgtcgtcgggcgcttcgcgtcccggctcgtccagctcggaggcgcgcaacgtggacagcgtggcatcgtcgagctcggcgcggcgcttgctccaggggctgcggtgcacgtcgttgcaacagttgatcgtcacgcgcagaagccacgccttcagatgctcgtcgtcggtgaaccgctctctcgattgcagcaggcgcatgaacacggtttgaaacacgtcttccgcgtcggcgatgctgcccatgcggctggtagccaagcgaagcacggtgtcgccccagcgctccatggcgctttcgagcgccacggcgtcgaggacgtgcacggttccgctcggctggccagcgtgcggttttcgtccgttcgctgcagcaagcggacggtcgctccgggacgttccggctcccagagcctcgcaacctacatccatatcccatctcctttccgctaccaacacgcgcgaaggagcgttttgtcgcagatgcttccgccatcatacacaaggtgcccacaattcagaggagaagggggaaaatgaaaaaggccagacacgatgtctgacctttagaattcaaatggtggactgtcggggactcgaaccccggaccttgggattaagagtcccctgctctaccaactaagctaacagtccagaaataacgcctatgtcaaagttccaagtgcgcaaagcgctggattattttaaagcatgtttccagcaattgcaagtacttttttcaaactcgcgctggggtggatgatgggactcgaacccacgacctccagagccacaatctggcgttctagccgactgaactacacccaccaaggcgcaaggtggtagtatacggattttctaccgggagtgcaagaggaatatgaacaaaatgtatcaaccattttgcaaacgcctgtcgatcgcttgctttcaagtagtatagaatcatccaagacgtcgaaaacggctgcctagcgcggcgcccgaagaagagtcgacgcccgaggggcagggcatccggccctcccgcaatcggaatgaggagcactacgtggatatcaagcaatcgtctgaaaagcggttcgcacttttgatcgatgccgacaacgtgtcggcgaaatatataaagcccatcaccgacgagctgtcgaagtacggcaccgtcacctacaagcgcatctacggcgactggacgctcacgctccatgccaagtggaaagacgcgctgctggagaactccatcacgcccatccagcagttcggctacactcaaggcaagaacgccaccgactcggccatgatcatcgacgccatggacatcctgtacacgcgctcggtggagggcttctgcatcgtgtcgagcgacagcgatttcacgcgtctggccagccgtatccgcgaaagcggcctcacggtcatcggcatgggcgagaagaagacgcccacgccgttcagaaaggcatgcgacattttcaccacgctggagcttctgctgggcgacacgggcggcaagtcgggcggacgcaacaggaaccgtcacgaccagggctcgtcgtcgaacggccagggcgctggaaccaccaccatgagcaaggacgagatcgagcaggccgtggtgaacatcatcacggacaaccagaacaacggcaagtcgacggggctcggagaggtgggcagccgtctgctgaagcgctaccccgacttcgacgtgcgcagctacggcacgaacctgctgtcgaagctgctcgacgagttcgccagcgtgcagatcatcaaggacggcagctcggtggccgtggtgctggctgagggtgcgaacgctccgaaggacgcttccccggaggcagagcaggcacccgagaccaagcaggccgacgacgtgaaagacgcgccggttgcagaatctgaaggatcgacggacgcacagggcgccgctgaggcgaagccggtcgagaagaagcccgcgtcgcgccgtcagccgcgtcgtcgcaaggatcaggtcgcggcgcagcagggatccgaggctaccgaggagaagccggttcaggaaccggaactctcagcggagcccgcaggcgagcagcatgatcgtctggccgaacctgtcgtcgaagccgagcctgccgagcagcctccctcggacaaccgtcccggacgtgccgcccgcatgcgcgcggctgcttctcgctcgagaggctcggaagggcgcaagcaggcggggaagaagcagaccgagaagggtgagcgctcggacggcgaggtgcctgcccaggccgccgcgccaaccgaggagcagaagcccgctgcgaagccgaagcgcaagcccgcgagagcgaaggcccccaaggccgagcagccggtcgccgaggctacggtgacgcaggagcagcccgtcggggaagcgccgaagcgggagcccgaagcgcccgcgaagcgcgcaccgaagcgtccggccaaagcgactgcgaaggctgtcgccgaaggcgccgctgccccgtccgaccccgaggcgttcatccgccagaccgtggccgccgccgagccggaggggatcgcgctgtccgtgctgggcaagcgcgtgcgcggcaagttccgcacgttcaagctgcgcgatctgggctacgcgcagttcaggccctatctcgacgacctggacggcatcaaggtggagcagcgcgacggccaatcctacgcccgcctcgaccgataagcgcgaatcgcccgcgaggggtttctcgtgcggtgccgacagggaggcttcccatcggcgccgcagggagccgcccgattacggctcgtggtctgcgctcggggcgtcgagcggaataccgcgccctcttggcagaggcgcgcataagtcgaggacttggactccctgcccgatgccgtgcgaactcgcgggcgcggaaatggacgaacgcggcggcgcatcccggctcgtgacggtcgggcaacaaccgttcgttgaagtcgtgaggcggcgttttcgggttcttctcccatgatatccttgtagcgtgaaagctgacgaggtaggagaggcatgaagaagatagtcatggttatcgtcgccgtcgcgctgatcgcggccggtgtgttcggaacgctcgccgtgcagcgcacgttcgagcccagcatctcgctgtcgtccacgtccatccaggagcagctgtccgattgcagcgagcttgccacggccaagctggactaccgcggcctcgtgcgctacgagaacggcgacatcgacttcatcacgaagaaggccttcaccatggtctacgatgccgaggtgcgcgcaggcgtggatctggcgcaggcccgcgtcgaggtcagcggcaacgccatcacggtgagcctgccggcgccgcagcttctgggcatcgagatcgacccgaactccctcgagttctacgattcatcgttcgcgctgttcaactgggagaacaagcaagacacggccgaggcgctgaaggtggcgcagcaagatgccgagggcaaggtgaaccaggccaacatgctggagcaagccaaggctcaggcgcatacgctggtcgagaacctgttgaagcccttcaccgtcggcgacaacgcctatacggtgacggtggtcgaccaatagcaacgcgtgcaagaagaagggcggccctggagccgcccttcttcttgcagaggaaccgttccccttacgccagctcgttctcgctgaacgcatcctcgccgaacgtgatctccttgccggctttgcgccactcgcggtactccgacgtggcggtgaacagcacgtcggacgacgagttgagcgccgtctcgcacgaatcctgaaccacgccgatgatgaagccgatggccaccacctgcatggccacgtcgttgccgatgccgaacagcgaacatgccagcgggatgagcagcagcgaccctcctgccacgcccgacgcgccgcaggcggacaccgctgccagcgcgctgaggatgacggcggtgggcagatcgatggacacgcccatggtgtgggcggccgccatggccatgaccgagatggtcaccgcagcgcccgccatgtttatggtggctcccagcgggatggacactgagtagttgtccttgtccagccccagcttgcggcacagctccatgttcaccgggatgttcgccgccgagctgcgcgtgaagaacgccgtgatgccgctgtccttcaggcagcgcagcacgagggggtaggggttcttgcggatgccccagaacaccagcagcgggttcgtgacgaacgcgatgaacagcatgcagcccaccagcaccagcagaagctggccgtactcggtgaatatctccaggccgttcgcgctcaccgtggtgtacacgaggcccaagatgccgaagggcgccagcgagatcacccagcgcaccacctgcgacacggcgtcggacacgctggcgaacacgtccttcgtgctctgcgacgcggcgcgcagcgcgatgcccagcaccacggcccaagccaggatgccgatgtagttcgcgttcataagcgcgtccaccgggttcgacaccacgttcatcacgagcgcgcccagcacctccccgatgcccgacggcgagctctggtcggccgccggagcgctcagcgtgagctcgatggggaacaggaagctggccaccacggccacgagcgccgcgacgaacgtgctcaccacgtacaggagcacgacggttttcatcgatccggctgcgcgagcgttcgcaagcgcgctgataaccaggaagaacaccagaatcggcgcgacgcctttcagcgccgacacgaacagcgtgcccagcagctcgacgacctcgatgttcggcaccgccacgcccagcacgccgccgatcaccagtccgatgacgatacgcttcaccaggctgaccgagttccacgcctggacgaccttcttgattcccatgatgcgttcctttcccgttgagtcgcatcatagtagcagaaagagggcgcgcgcacgaaaagcgttcggacgacggttttctttcccgccgtttttggtatcatggtcgctgcgcgctttcgggcgcgatgcaacgcgtgcgggcgtggcggaattggcagacgcgccagatttaggttctggtggggaaactcgtgaaggttcaagtcctttcgcccgcaccatcaagatacgtcgcggcgcgcttcgcccaatacgggatgcgaaggctgcgcgtcccgttccccatgcacgcttttgtcaagctaaacgcatcgttggacccgcatacgcttgacaaaagcgtgcacgagcagaaaaaggctcgcagcttcggcgttcgggcgagctaggcgaagaactttcccaacagaaagcctatgactacgctgagggcggcgaacaaagcggcggtgcccacgaggcgcgtttcgcgacgctcgcggcgcttgcgctcctcttcctcctgtttgagcatgggaaagtaggagtatccgtccgacgtgatggtgaccacggtgccgcggcggtcgtcgattttctgcatgagcgcgccgtgcgcgatgagctctacctgcaggtcgtcgtcggggcgataggggaaggcgcagtgatacacgaggtcgccgtcgacggtgcacgttgcgcgctcgtagtccagcaagcgcgccagctcgcgttcctgcaatatgttgagatcgatggtgggcatggaagcctccggctgctgcgtttcgggtgcgtttcgctttcggcttcatgataccgtgatcgggcgattagcgggagggcaaaatcgatttgtaaccttcgagattcgggtaagaggcgccttccttgccgtccaatggcgctacgcttccgtttcgacggtgagcttgcccgaatcgcccgactcgatccggaaggggtaggcgatcagttccaggcccagcaacagcacgtggtgctcgatgttcgcgaacgggctgatgataagcagcacggccagcaccatctcgaacacggtgaatgccagcttcaacgcgaagggcctccttcccttgagcgcgtgcaccacctcgtcgatctcgtcggcggccttgtacaggcccaggaggccccacatcacgccgacgaagctgatggaggcatgtccctgcacgaggatgacgccgccgagcacgcacatgaccacggcccgccccagcacggccggttcctcgacgaggctgcgcgcgtcggctcgcgcgccgctcgcgtgcgcaaccgcgtacacgaggcccgccgcgcccgataccgccatgaggcctcccagcagatacggcagcgcgtcggtgacggtgtcggggatcagcaggcagcacatccccaaaagcggcaggagcagcagcgagaccaccgacacctgctcgctgcggctgcgggatttgatggctttgagggtgcggtcctggggcataaggggctccttgcgtccttgtcgaaagtcgtctcatggtagcatgactttcgatgctggcggaattttcaacgggcggttctccggtttcgtttccgttgcaccctggttgcgtcccggtttcgtcggttcttcgtgaacctgcctcatctttacttcccggctgggcgcatatgtgcgataattccgtctcggtgtgcttggcttgctttgcaggtcgtaacgcatcgctgcaagggaaggccaaggcagtcgcaccgaacgatgccgcaaggcgacatatgaatgatggaggatagttacgtggaaacaaaagttgaggcattggaagataaccgcacgaaagtgaccgttaccgtcgatgccgcggacatcgatgcccgcatcaagaagacctacaaggacttcgccaacaagtacaacttccccgggttccgcaagggcaaggccccgcgcccgatcatcgacaacgccctgggcgccgaagccgtgcgcgcgacggtcaccgacgacgtggtcaacggcacctatcctctcgccatcgacgattgcgacctgtaccccatcgccaagcctgaattcgacgagacggacctcgtcgaggccggcaagccctacaccttctcgttcaccgtcacggtgaagcccgagatcgagatttccagctacgagcccgtcgagatcgagctgcccgccgaaggcacgaccgatgccgagatcgacgagcagatcgacgccctgcgcgagcactactactcgttcgaggacgcttccgccgccacgaaggtgaaggaagacagctatatcgacctggccatgaaggccaccgacgacaagggcgaggagattccgtcgctcacgaccgagaaccgtccctacggcttgggcgcgaacctgttcccggccgagttcgacgagcagctggtgggcctgaagaagggccagaccgctacgttcacgctggacatgcccgccgatccgcccatcatgctgtccgcgctggccggcaagaccgagaagatcaacttcgaggtcgaggtcaaggtcgtcaagaagaagatcgttcccgaggtcaacgacgagtgggccaaggagcagatgggcttcgaaagcgtcgaggacctgcgtgcgcgcatcgccgagtccgtcaccagccagaaggccgacatgatgccgcgcctgaaggagaacgcctgcctgtacgcgctcgccgagcgcgtggagggcgacgtccccgaggccatgctggaggacgcggaggccagcttgatccaggacttcttccagcagctgcagagccagggcatgaccttcgacgtgtacctcgcccagcaaggcatcacgcccgaccagttcaaggaggacgtgaagaagcaggccgaggacatgtccaagcaggatctcgcgcttgacgcgtgggcccgccacttcggcatggaggctacggccgaggaggtcaccgaggagttcgtgaagagcggcgtcgaggatcccgcggctctggaggccgagtggcgctcgaacggccagctgcacatggtgcgccagggcgtgatccgcacgaaggccgtgaaggacatcatggacaaggccgtcgtgaccgagctcgacctctcgaagaagaaggacgaggaaaagaagccggccaagaaggctgcggccaagaagacggccaagaaggacgaggccgcaggcgacgagcccgcgaagaagcccgccaagaaggccgctccgaagaaggctgcgaagaaggacgaggacgtcgaggccaaggccgacgacgcagaatagcaccgtgagcacatcgagccgtccggccgcgcatccgcgcgtcgtcgggcggctcgaggtaacgaaacggtaccccggccttgcacagcgcagcgataaacctcactatggcataaacgcaagcaggccgccgagcggccgcaagagacaagcgaggcaaccttatgagctttgatcccaaatcagcactgattccctacgttatcgagcagtccccgcgcggcgagcgcagctacgacatctactcccgcctgctcaacgatcgcgttatcttcctgggcgagcagatcgacgacaacgtggccaactctgtggtggcgcagctgctgcacctcgagagcgccgatccggacaaggacatctccctgtacatcaactcgccgggcggctcggtgaccgcgggtcttgccatccttgacacgatggacttcatcaagtgcgatgtgtccaccatctgcctgggcgagtgcgcctctatggccgccgtgctgctgtccaacggcgccaagggtaagcgcctgtgcctgccgaactccatggtgctcatccaccagccgtccggcggcgcgcagggccagcagaccgagatcgccatcgtggccgacttcatgctgaagacccgcaaccgcctgaacaagatcctcgcggacaacacgggccagacgctggagaccatccagaacgacaccgagcgcgacaactatatgaccgccgaagaggccgtcgcctacggcctggtcgaccgcatcaccacctcgcgcgcggttgcgccgagcaccgacgagtagagaagcgaacaggatacatgaacgacagacgcgacgacgaattcgaaggccgagacgccgatatcgcctgcgccttctgcggcaagcagccgcatcaggtggcggccatgatatcggggccgaacggcatctacatctgcgacgagtgcatctccgtgtgcgccgatgccatgatgcgcgacctggggctgagcgttccgggccacgacgaggcagcaatggcggagggcttctcccacgccgaggagggccgtcacgcgcgggtgggcgacggggtcgtgacggcttcggtcgccgatccggcgccggaggacgtgctggccgacctgcccacgccccacgagctgtacgccgagctctccgagcacgtggtgggccaggagcaggcgaagcgcgcgctgtcggtggcggtgtacaaccactacaagcgcatcagcctgggcgcggacgccgtagacggcgacgtggagctggcgaagagcaacatcatgcttctgggtcccacgggctcgggcaagacgctgcttgcgcagacgctggcccgcacgttgcgcgtgccgttcgccatcgccgacgccaccaccctcaccgaggcgggctacgtgggcgaggatgtggagaacatcctgctcaagctcatgaccgcggccgacttcgatatcccgcgcgccgagatcggcatcatctacatcgacgagatcgacaaggtggcccgcaaggccgagaacctgtccatcacgcgcgacgtgtcgggcgagggcgtgcagcaggcgctgctgaagatcgtggagggcacggaggccagcgtgccgccgcagggcggccgcaagcacccgcagcaggagctcatccatatcgacaccacgaacatcctgttcatcctgggcggcgcgtttgtcgggcttgccgacatcatcgccgaccgcgtgggcaagaagggcctgggcttcaacgccgagctgcccgagagcaagaagcacgccgaggccgagcttttggcgcgcgtgctgccggaggatctgaacaagtacggcatgatccccgagttcgtggggcgcatccccgtggtgacgtcgctcaacgagctttccgaggaagatctcgtgcgcatcctcaccgagccgaagaacgctctggtgaagcagtacaccaagatgttcgagttcgaggattccgtgctgacgttcgagccggaagccttgaaagccatcgctcacgaagcggtggagcacggcacgggcgcccgcggcctgcgttccatctgcgagcgcgtgctgcaggacgtgatgtacgacctgcccgagcagaaaggcccgtcgacggtgaccatccgcgcgacggacatcacgggggagacgaagcccgacatcgagccgacggacggggcggaagctcttccggcgggcgatgcggcaagcctgcagagcgcgtagcgcggacgcgggatacggtaaacgagcgggcggatcgcgacgagcggcgcgcccgcttttcggtttgagagactttgaggacgaaagagcagaccatggccgataacacgaacgacaagagcggcaagaagatcgactacgacttcgccgcccacgagcgcccgcttttcga

SEQ ID NO: 9463 - DNA, 335 bp, Unknown
  gut microbiota DNA sequence
cacatccacgccccgggagactgggtcaccaagctctacgacatatacctcggcgacgcgaccaccgtcgacgagtacgtgaagatcatctccgacttcgtcgcggcgcatcccgaacgcgaggcgtacacgggcaacccgttcatggtgaacgcgttccagctggaggacggcagcaaccccgggccgaacaagaagctgctcgacgagatctgccccgacaagcccatcctgcttttggacgtctcgcaccactccgcctgggtcaacagcaaggcgctcgagatggcgaacatcacgcgcgacacgcccgacccgctcggcggcatcatcac

SEQ ID NO: 9464 - DNA, 220 bp, Unknown
  gut microbiota DNA sequence
gcccatggtggcgtgcacgtcgcccatttgcagcagcgcgcccggcacgcgcacggggaagtacatacgcgtgcccttcgtgatcagcttgttgtccaggttgccgccgtgcgcgcccacgaagccgtcgatgacgtcctcgccgtcgggcgcggtgccgatgacgccgatcatcgggtcgatggggaacttcacgccgttgaagtcggccatgccgtcc

SEQ ID NO: 9465 - DNA, 271 bp, Unknown
  gut microbiota DNA sequence
ggggtcgtcggcgggatcccacgcgtccatcggtccgaacaggtccagcggcggctcggccgcgtcggcctgttgctgccactgcccgtagctgttcggctcgtagccgatggtaccgccgaagttgccgtcggtgcgcatcatgccgtcgcgatggaactcggcgtaggggcagcgcggccggttcaccgggatgtggttgtggttcacgcccaggcggtagcgctgcgcgtcgccgtacgcgaacaggcggccctgcagcagcttgtcg

SEQ ID NO: 9466 - DNA, 238 bp, Unknown
  gut microbiota DNA sequence
tgcccggccggaggggacgaggaacgtgcttggcctctcccggcgcgaagcgggacgccgcgacgcgccaccgagcgcagggggacgccccggcgctcgcgcacgacaccacgaaagggagcctgagttggacatcatcatctcgaatgcgagcgacaagcccatttacgaccagatcgtctcgcagatgaaggccctcatcctgacgggtgagctgggcgaagggcagcagctgccc

SEQ ID NO: 9467 - DNA, 672 bp, Unknown
  gut microbiota DNA sequence
cacgtggacaacatcaacatgaaccgcatcacgcccgatttcgtgcagcacctcgacagcggcacgcgcgccgtcatcacctcggcgtacagcgacgcgctcgtgcctatcttcctgtatgtagtgccgttgctggtggtgggcttcgtgctgatgctcacgctcaaggagcacccgctggccacgaaggtgaaccacaccggccaccctggcgacacggtgtagagcgagacatcaacctaccggcgcagctgccagaaggctacggcgctggcggcggccacgttgagcgagtccaccccgcaggccatggggatgcgcacggtgtagtcgcagcgggcgatggtgtcgtgcgcgaggccgtcgccctcggtgccgaacaccagcgccaggcgctcctcggcgttgagagcgggatcgtccagcggcaccgagtcgtccgtcagcgcgaaggccgcggtcttgaagcccagctcatgcagcagcggcacgccggcgggagcccagccgcccgtgcccgtcgcgcccgcgccggcctcttcgccgatgcgcgtccacggcacctggaacaccgtgcccatcgacacgcgcacggcgcgacggtacagcggatcgtagcaggcgggcgtcaccagcacggcgtcgatgccgagggctgcggccgagcggaag

SEQ ID NO: 9468 - DNA, 510 bp, Unknown
  gut microbiota DNA sequence
catcgcccgaaaaacacgctttcgcgctcgattccgtgtttttcgggcgatgatgcgcatgcgcgctgtcagcaacacagccgccatgccgcgcaaacgagcggatagagaaccgttgcgccgccgcaaccgaccggccgacgccctgcggtacgctgaacggaccaaggcaaccgacgatcagataaggagacgtccatgaagtacaagacaggcgacaagccgggcgcgggacgctaccgctgcgacaactgcggctacgtcgttcgcatcacgagcgatgccgaagcccttcccgcatgccccaactgcggacaccacgagttcaccaaactggaagactgaccgaacgccagggccggcagcaagtccggcgcgctgccggccccgcaggggccgcgatgacgacgaaaacttctgcgtacggcaggaatcaaggggtttggtaaccggtgccgccgcctccgacatgccgagaacatccgacctgcacaaacgcacgcgcatcgc

SEQ ID NO: 9469 - DNA, 326 bp, Unknown
  gut microbiota DNA sequence
aacatcgtggcgcttccgcgcaactcgcagcatctctaaatggcaagaaggcatcgaattcggaagaaatcttgcgccttgaccgtgtccgacgcaaagccgctcggaagagcacgctcacgaacaggcgttatgcgcagaggggctttcttttgcccttgcgatccgcgcgggcgattccgaattcgatgtctttttgccattcgctaccctatcggctgctaaaccagaatcgacatgcactgccgcgcgccgcttcccctgtcgggcggctggcgatcaggcgggacgagcgcctgtccgatggccgaggagggcttccgagc

SEQ ID NO: 9470 - DNA, 233 bp, Unknown
  gut microbiota DNA sequence
tgaagtgtgtagtctccgttctgggcaaggaccgcagcggcatcgtcgcggaggttgccaccgcgcttgccgcgtgcggcgcgaacatcgacgacatcagccagaccattctggacgacatcttctcgatgaccatgctgaccacgctcaatcccgaggtcgccgacttcaacacggtgcaggagaagctggaagctgtgggcgaatccctgggtgtccaaatcatcgtccag

SEQ ID NO: 9471 - DNA, 4822 bp, Unknown
  gut microbiota DNA sequence
gccggccttcgcgagctcgtaggccgccacggcgcccgcgcacccggagcccacgacgatcgcgtcgaaatcagccatgtcctgtcctttcctatcgttgcgtttccgttttcttgccgtcctgcaaaccgtcgcgccccgaacgaacacgatcccggttcggagcatcccgcggttgcgtttcctcagccctgccgaacgcgacgattgtcgcgaaccgttgaggccgccgtcccgagcgcgcgaggtgggcgcggagcgtcgaggccgcgacgagctggcgaaggtctcgtcgggaggcgaagggaggatgcatccgccccgcttccacctgcggcgctcgggacggcggcctgaccggctgcccggatccgcgaaaaacgcggatccgggcagcttgccgccttcggcttacagtgccgccgccagcttcggcaggacgtccttgatgtcgcccacgatgccgtagtcgcactgcttgaacaccggagcgttcttgtccttgttgatagcaaacatcgtgccagcgcggttgcagcccaccatgtgctgcatctggccggagatgccgcaggcgacgtacgccttcggggacagcatgaggccggacacgcccacgtacagctcggtgggaagccagttcacgccctcggtaaggggacgcgagcaggcaaggcctgcgcccagcttgtcgcacagctcgcgcgccaggtcgagctcggactcctcggcgaagccgcggccggcggccacgacgacgtcggccttgttcaagtccacgccgctcttctcgatgggcttggaggagaccagcttcacgggcgtcgccggagcgacccaggcgacgtcctcgacggcgttcgcaccggaggcctcggcgccctcgaacgcgcccgcgcccaccgtgtagatggccacgtcgcctgcggccttctgcacgcgctcggccacgccgccgaagtacaggctgacggcgccgttctcgaaggacatgacgtcggtgatgacggaggcgttcgcatgggcggccagcttgccggcgatcgtcttcatgtggcgcgtgggctccacgagcaccacggccggagcctcggcgtcgaacaccgagatcacggtgtcggcggcgtcgtcgaggacggtcccttccggcacggagatgcgggcgatcttatcggcgacggcctcgggggcctcgccgaaggagacgagcacgacttcgtcggccatggtgcgagcgccagcgcaaagctcccgagcggcatccgtgcgttcagcgataacgagtactttcatgaatatcaactctgcctttctattgcataaggggatggtcgagggaacttacagcgcggccttgagggcggcggcgaactgctcgatggcgccgtcggccgaggcttcaaggatctcgcgcttgcgatcagcctgcttgggggcgaggcaggacgcgacctcgatggagctctcgtacgcgccgtcggcgcccgccacgttcatcggcttcttgccggcggcgaggatgtccttcatgccggggatgcggggcagcgcgatgtccggcgcgacggacacgacggccggaagcggcacctcgacgacctccaccacgtcttccagcgtgcgctcgacctcgagcgcgccgtccttggcggtaatcttcgtggcggcggtgaccacgggcagacccagcttggcagccagctgcacgtccacctgctgcgcgtagttgtcggcggagccgtcgccgcagaggacgacgtcgaagtcgcccaccttggaaacgagttcggcgagcgcgacggcggtggcgcgggcgtcaagtcccttgcatgcgtcgtcggcggtcatgtacagctcgtccacgccgcgggcgagcacgttcttcttcaacttggagtcgtcgatgtcggcgcctcccacggtaacggcgaccacgttcgagccctcgttggcggcggccagctgagcggcggcctcgatggcgttcaggtcgtaggcggacacggtgttcttcgccttggagtagtcgagcgttccgtctgccgacacctggatatcctgatcgtcgggaaccaccttgaaagcagcaacgatgttcatcctgtacctttcccttctcgtttgccttacttttgcatgcaagtcgttggccgggcgcgcctcggcgccttcccccgatgcttcggaaggcccggggcccttcccggcgcgttgatgacagtttgccgccctgtcatcgccccgtcatcgcaaaatcgctgtgaaaccctcattactcaacttttgactatgcctgcgcgggctctgcggacgggggcgccggagccgtccggcggcggcgcgggccaggcggcgcggcgagccctttccacttggtcgctaccccggtttactcggggctactgctttttttgcgatgccccgcttgcgcagtatcgtcgaattactgcgctgcttgcgatgcggccgatacctgacgatccctatgatggaaccagatttcaggcgcgtcgagcctcccgctgcgccgtgctgcacatgccgcagcgggaggcgagaccgcttgggaaacaggcgtgagatcgcaacaatccaaggaggagcaatggcagattactatggcaccgacaccgtcgtatccgaacttcgcgaggacggcctgctgatcatccgcatcaaccgtcccgacgtggcgaacgccctcaacggcgtcacctccaaggccatggagaacatcatgaacaacgccgagaccgatcccgcggtgcgcgcgatcatcgtcaccggcaccggcaaggtgttctgcgcgggcgaggatctctccgagctcagcgaaggcggagagtgccagaccgtgaccgagcacggcttcggcggcctgaccgcgcgcctgtgctccaagcccgtgatcgccgcctgcaacggctccgcggccggcggcggcatggagatcgccctgtcctgcgacatggtggtggcctccgagcgcgccaagttcggctgcaccgaggtgggtctgggcatcatcgcctccaccggcggcctcgtgcgcctcgcccgcgacatcaaccgcaaggactgcatggagcttctgctcaccggcaagaagatcaaggccgatgaggccaaggcgctgggcctcatcaactacgtcgtgccggccgaggaagtcatggacaaggccatcgagctggccgaagagtgcctgaagaacgcgcctctggccctgaagtggacgaagtacatcgtgcacgccgccgaccagatgtccgaagaggacgccatgcgctacagcgacgccgcctaccgcttcctggagaagaccgccgacggcatcgagggcccggccgccttcgtcgagaagcgcacgccgaactggcagggcaagtagctccttcttggctttcgtccttgaaacccccggacgcgcgtccgggggttttcgctttttccagcgcggcagaggcgtgcgatcggcgcggacgggtcgcatccatcgcgaatcggcgcggacgggtcgcgcgagatgcgcatccctcctcgcgtcaaaaaagcgaggcgatgggacggggccaacgtctcattcctccaactcccccgtcagacgttccttccaggtgagcttgcgtggcgcgaaggggcttggcaggggcacgtcgtggccgatggagcgcaaggcgatgtcccacagcgtgcggcgcccgccgaagaacaggtagcgcttctcgagctcgggaagggcctcctcgtccgccgcgccgctttgggcgaagccgtcgaggatcgcgtcgctctcgcgcttcgccttcgcccgacggtacgccaccacggcgttcgccacgaacacccccacggtatagggcagaacgaaggccttcacgagcgccaccaggtcgtcggtgcggtagtcggccagcgcccgggccttgtcgcccacaaggtcgggatcgacgacgtgcgcgagctgcccgctttcgccctgcgccgcccagcgctgcacgtccaccagccacgcgcccgcgaacacgatggctgcaccggagaacgccaccgccgcaaggccgagccctttgaaccagcgcgcaacgctgctcatccagtagtacggtaccgtataggcgtacagcagcaggagcacggcggcgaacaccaccgaaccgccgatgatcacggcgtcctggcgcacgaagtagtccgtcgccgatccgagcacgcgctggacgtcgtagacccaggagaacccgtcagcgacggccgcctcggcaggccggccgatggagcccgcgagcgtcgagatccatgagagcaccatgccgaaaaccgcgacgatgacgaagaacgccggcagggtgaccgcgatgctggccaggccgcgcgcgagcccgttgtcgaagcgcagcgccacgtagtagagcagcagaaagcctcccagcagcacggcggcgaatcccaggtacagcgcgatggaacccgacagctccgcacccggcagaagcgcgagcgccgcgcgcgagacgagcaacgccgccgacagacccacgagcgcgatgcagccgagcacccaggcgcgctgcagccggtcggtctcggtgtcgaggcgcgccgtgccgttctcgtcgacgagccgcacgaagtccaggcggtggatgcgctgcgatacgcgcaccgccttcaaggcgagcgcgagcgcaggcggcaggaacagcgcgagccccgcgcccgccggcagcgcaaggcagagccccgcgtaaagcgcgagcggcagaccccagcggtaccccgtgtcgaaaggccggcgcgtccaggcgcccaaccgccgggc

SEQ ID NO: 9472 - DNA, 258 bp, Unknown
  gut microbiota DNA sequence
ccgtttccacgtggatcacctacggatccaacgtcgttccaacgcggattccacgtgccataacacctggtaaacagctggtctgcacgctcgtaacacatcgaagccccatgctaccctcacgtcatgaacagatatctcagtcatacttccgcattggaatggcttgcatacgcgaaggccgatccgctcgcgccggccgcagccgatcgtcgggaacggcttcctcgacacgacggaaccccgcttccgcctgcc

SEQ ID NO: 9473 - DNA, 1654 bp, Unknown
  gut microbiota DNA sequence
tcgtttccacgtggatcacctacggatccaacgtcgttccaacgcgaattccacgtgccataacacctggtaaacagctggtctgcgcgctcgtagcatatcgaagccccatgctaccctcacgtcatgaacaggtatctcagtcatacttccgcattggaatggctcgcatacgcgaaggccgacccgctcgcgccggccgcagccgatcgtcgggaacggcttcctcgacacgacggaaccccgcttccgcctgccggtaagacgacgcgcgcggacgtcgacgggctcgccagcttcggcctcgggtacctcgcgaagcccgtgcaccttctcgtgccgagcagcgagtgcaggatacgatgcgccgacgcccgttgccacgtgcgatcaggcccgttccccgcccgttcgttcctgccgatcgacgaagggacgttctcgtcctccccggagctcgccttcgttcagatggcggaagtcctggactgcccccggcttgtcaagctgggggacgagctgtgcggcatctacggcatagaaaccgtcggcatcgtcgacttcgaccgaacgagccctttcaccaccgtcaagcggctggagcggttcctgctcaaggcagagtgcatgcccggcttggtgaaagcccggaaagcagtgcgacacatcgcgccgggttcggcttcgcccatggaaacggccatcgtcctgctgctctgcctgcccccgcggctcggcgggtacggcttgccgcgccccgtaatgaacggaagggcgagcctcaagaagcaagcctgccgcaagccctccgaccgacgctaccgttgcgacctcttgtggccggccgccgacatcgccgtggaatacgacagcttcctgcatcacggcagccgcgcgaagatggccgacgacgcaagaagaaggaacgacctgctggcgcgaggcaccacggtggtatcgatcacgggcagaacagtgtggaacctcatcgaactcgacgagatcgcacggcttcttgcaaggcgcatgggcaaacggctttccacgaacggagtcggctggcgaaaagcccagcacgagcttcacgggatgctgacggggtctttcttcgacggacgatgagctttccgctaatataatcggcttcccaacatgcgcagcagggcttcgcgcacgtttccgcgtcgcgatgtgcagcaaaaacgaggttttggcagtcctgaccacaaggaatgcgaaacggagaagtcgcgaccaggggtttcgcctggttgcgttcgctccgacggcgtccaaccgcttccgaaacgtcgaaagactgccaaaacctcgtttttgctgcacatcgatgagatcgaacgtgcgcggaggccgcgaggagcggcgcgcgaagcgagggcggcacgagggtggcgaggcgaggacggcgctggcggtcgggcgcatgcggggatcgcaaagagcaagcgacgcggacgggcgcgaaggtcgcaaggtgcgggcggcgcgatgatcgcgtgacgaaggaagtcgaacgggcactgggaccgcgaggtgcgggcgcgcacggaggtcgcaggatgcgggcgacgcgggcgcacggggcgtgcgagatgccgtcgcgcgcccgggcggttgccgggcgcgcgaggtt

SEQ ID NO: 9474 - DNA, 207 bp, Unknown
  gut microbiota DNA sequence
cgcatgcgattatacacggcgacgaggcgaaggcttcggaggactcgcccgcatcgcgggcttcgcgcgccggcgagtctacagcagcttggccagcttgtcgatggccgcgttgcacgagtgcccctgcaccaagccgaccttcgcggtgaaggctgtgagctcgatgcgcgcgccgccgcccgtggacacgagttcggcgacgac

SEQ ID NO: 9475 - DNA, 169 bp, Unknown
  gut microbiota DNA sequence
cacgacgcgcgtctcggtgcgcagcttggccatcttggcatacgctgccgaggagtcgcccatgccgatgccgcccgcgacggcttccagcgggtcgccgctcatgatgccgtcgagcacggccaacgggttcgctccggctttcgcctggcctttcgccaggatgttc

SEQ ID NO: 9476 - DNA, 202 bp, Unknown
  gut microbiota DNA sequence
caaaagcccaaatcataaggggtggatggatgaaacgcgccgatatcatccccaaaggattattttgctttttgcgcccaacctatacttgatggcagcgaagaggttgccgttcgcgcccgtcatccgagcgtgcggcaacgggaagaaacctgtgaacgaaggagactgccatggcacaaccgcgtccgtcattgacgct

SEQ ID NO: 9477 - DNA, 399 bp, Unknown
  gut microbiota DNA sequence
ctcgacgccgccgccgcacatcttgcccacaacatgcgctacgcggataggctcactcatcttcccgtcctgccttttccgaacatgatcgagaacgtcctcaggaacaccttcgcatctatagcaagagaggcgttcctgacgtaataaagctccagttcctggcggctgccgtcgccgtaggtcgcatcgtttctcgcctgcacctgccaccagccggtgatgccgggcttgacggaaaggagctcgcccgccgcgtcgccgtaagccgccagctcctcctcaacgatgggacgcgggccgacaacgctcatctggccagccagtacgttcaggaactgaggcagctcgtcgagggaggtcctgcgcaggaagcgccccaccttggtgacgcgagga

SEQ ID NO: 9478 - DNA, 2770 bp, Unknown
  gut microbiota DNA sequence
aaaggggaccgcctctttctatgccacctttctgtgtcggagcgcgtcccgaacggcgatcggccgttcgggacgcgctctacttgttccaagcgatgaacgcccaggtgaccgttcggggctcgcgcaggcgcagggacttctccggaagccccttcttgtcgggctgcccggcgcgctcgttcggcacgaggttctcttccagccagcagcgcaggcgaccgaacgcctccgcgcgctcttcggctccgacggtcgcgcccacggcatcgtccgccatgcgcgcgaacgcgtcgtaggcatcgtcgagcgagtcgaacgtgtcggtgcgctcgctgtcgatgtaggaaacctcggggcgcagtccctcgttcgccaggatgttgaacgcatagaggtagtcgcggccgagcacgctggaaaggcccatggcgttgaggatgcgctcgtcggtgcgcggcgacgagccggtggccagcgtgacgcatacgcggcggcgcgccacgtcggtgaggcgcagcagcgaatcgcgcagatcggcggtcgcgacggagcgcgaggcgagcgccacatctaccatgcccgggcgcacgccgaggctgggccaatcgtcggcccagctcatctgcttggggaacaccgtgcgcacgccctcgcggtcgagcgcttcccgcagctggccgagcatgccctgcgagaaatcggcggccaccaccttgtggccccgtttgcccaacggcaccgacagcgcgcctgtgccgcagcccatgtcgaacaccgtctcgccctcgcggatgccggctagctcgaggaaccgctcgacgtaagggttcggcgcgtccttcgtggtgaacgtggccgaccgcttgtcccagtagctcgcgtcgtcgaagcggcgtcgtgcctgctggagccgcttccactcctcgttccaatcgcgggcggtcagcgggttgacaaaggactcggacgtgttgttttcgggcatggcgcgcctctcgctttgatggttgcgggcttttaggtactatactagcgaaatgaaacgcctctgtgcgcgcgatccgccgaatttatcccgaaacgaggagcattcatcttatgcaagtcgaactgctgtaccacacgcccgaccccgagcgcgcgatcgccacggcggcgcgcctgtgctacgcgcccgtcggcgcggccgagctgatggaggccatgccggaggagcgcgtgaaaagcgtgctgtccaccatcatgagcgcgggccatacgtccacgctcgagcacgccagctacacgttcgcggtggacggcgtctcgcgtgcccttacgcaccagctggtgcgccaccgcatcgccagcttcaaccagcagagccagcgctacgtgaagttcaccgacggcctggccactgtgaagcctgaaagcgttgccgcgaacgaggagacgaacgcggtgttcgacgaggctatcgcggccgccatcgaggcgtacgagaagctgctggccgcgggcgttcccgccgaggacgcgcgctacctgctgccgaacgcggctgagacgaagatcgttatcacgatgaacgtgcgcgagctgctgcatttcttcagcttgcgctgctgcaaccgcgcgcagtgggagatccgcgagatggcgcaccgcatgctggagttggcgaggcccacggcgccgttcatcttcatggacgccggcgcgccctgcatccgcggcaactgccccgaaggcaagatgacctgcgggaacccgtacccgcgcgtgaaaagggcctagcatggccgagcagaagagcgacctgtcgcgggcgttctccgaggacggtgcgctgaagacgcacgtaggcggccaggcgctcatcgagggcatcatgatgcgcggcaagtacaactggtcggtggccgtgcgggagcccgacggcggcatctacgtggaagagcatgacctggcctcggggcgcaagaagaacggttggatgtactggccgctcgtgcgcggatgccgagctatgctggagtcgctcgtgctgggctacaaggcgctcgagatcgcggcgctgcatgcgttcgcggaagagggggaagacgaacctgcggcggccgaggaggcgggaggggtctgcagctcggacagtcctgctcgcacgaacagtccgctggactgttcggctcgtgcggaactcgcctcagacccctcccgccccctcggcgatggcatcgaatcttctgccgacgccgacgctgacggcggcgacgatgcgcgccttgaacccgttcttgctgcagaagccgaggaggagagggctttctcctggaaggaggatttcgggcggccggatacgatgatcgatgcgttgggggcgcagcgttccctcgaggtggtttccgagccggaatcctctcccgagtcccagtcccggcccgaacccgccaagaagtccttcatggacgaggaggtggagttcggcaagaaagagatggccgtgtcgatggtgctgggcctcgtgctgggcgtggtgctgttcatcgtggcgccggcgttcatcacgaacctcatcgtgggcgagtacgaccagaacaccgtgctgtggaacatcgtggacggcttgcttcgcgtgggcgtgttcgtgttctacctgtggctgatcgggcgcatgcaggagatcaagcgcatgttcggctaccacggcgccgagcacaagaccatccactgctacgagcacggcctgccgctcacgcccgagaacgcgcgcagcttcccgcgc

SEQ ID NO: 9479 - DNA, 516 bp, Unknown
  gut microbiota DNA sequence
ccgcatgcaggagatcaagcgcatgttcggctatcacggcgcggagcacaagaccatccactgctacgagcacggcctgccgctcacgcccgagaacgcgcgcagcttcccgcgcctgcgcgtgcgctgcggcacggcgttcctcatcatggtcatggtcatcgccatcttcgtgtacacggtgacgcccatcaacgggctcatcgagctgtggggcgtgccggacggcgcgccgaagctggcgctggtcatcctcgtgcgcatcctgctgatgcccgtcatcgccggcatctcctacgagatcacggtgaagtgggcgggcagcaaccccgacaacccgctggtgaaggtggtgttatggcccggcatgcagatgcagtacctcaccacgaacgagcccgacgacggccagatcgagtgtgccatcgccgccatgcagaaggtgctcgagcgcgaggaggccgaagaggctggcgagaaggcggcagccggcgcgcccgataacgccgacgagcc

SEQ ID NO: 9480 - DNA, 298 bp, Unknown
  gut microbiota DNA sequence
cgaggaagtggtgcggggcccgctgcccgaggtgcgcgacgcgttcgccgcgcgcgagcgggagggcgcgggcatcaagggcgagatcgtgctggtgatcgacggtccgagcgaggccgaggacgccgccgccgagcaggacgccgaagtcgcagcccgcgcccgcgccgccgagctgaaggccgccggcgtgcgcagcaaggacgtcgcccgcgcgatagccgaagagttcggcatcgcgcgcaacgcggcatacgacatctcgctcgaggcgtgaggcggcgcgcgatggcacgcg

SEQ ID NO: 9481 - DNA, 417 bp, Unknown
  gut microbiota DNA sequence
ccacgacatccactacgagcgtccgaaaacgttcgcggacgccgtcgaccgggcggcatcggtcgcatcggcgaagtagccgcgttcgacggcggctttttcggccatcgcggcgttggtcgagggcgagcggcgtttccattacgacgtcgatatcgaagcgcggggcgacgagtcgccttgcgggtggcgcccatgcgggccatcgggcgcgccaacacttcgcaagcgttcgccgccgtcgatcagatggcgtcgaagtactcgtgcccctcgtgcagcgccgcctcgtacagctcgcgagcctgtgcgatgtcgtcggtgaccagaccgtcgatgccgtagtcgatgaggcgcgacatgttggcggggtcgttgacggtccaagcgtatatgatcttccccgccccttgcact

SEQ ID NO: 9482 - DNA, 465 bp, Unknown
  gut microbiota DNA sequence
gggctgcttcgtggagtgcttcggcccgggcctcgacgcgctcagcgccacgcagcgcacgtgcatctccaacatgacgcccgagtacggcagcacctgcacgctgttcccggtggacgagcagacgctgacgtacctgcgtctgaccggccgcagcgagcagcaggtggcgctcgtggaagcctacgccaaggcgcagggcttctggaacgacgcggacgcgcccgcgcgcacctacgccgaggtgatcgagttcgacctgggctccgtggagcgctcgctggccggcccgtcgcgcccgcacgaccgcatcccgctggccgaggcgcaggagcgcttccgcgccgtgtgcgacgagcgcggcctcgacctgtccaagcacgtggcggtcgatctcgacggcgaagcgtgcgagctgacccacggcgcgctggccatcgcggcggtgaccagctgcacgacggc

SEQ ID NO: 9483 - DNA, 288 bp, Unknown
  gut microbiota DNA sequence
atcgacgcgtacgcaacgcgctcgcactcgatgagcatcgaaggccgcagaggccggtaccgcgcaatgaactcgtcgacctcgcgtgcgatctgcacgctgcgcggcgacagcgactcggcggccatcgccgggtcgggcagcgggaatcgcgcgcaggcctgctcgtacgactctccgcccaggtaggcttcggccgcagccaacgagcagcccacccgtcgcttgtacacgatgcccttgtacttcttcttgatctccacgaacacgcggtcgccagcctgcggc

SEQ ID NO: 9484 - DNA, 246 bp, Unknown
  gut microbiota DNA sequence
cacgatgtagtcggcgatcttctcgaggtcgctcgtgatgtggctggacatgaggatgccgtggcgctcatcccgcatgtagccgcgcaggatgtcgagcgcttcctcgcgggcgagcgggtcgagcccggcggtggcctcgtcgaggatcagcaggtcggggtcgtgtgccagcgcgcaagccagcgacagcttcatgctcatgccgcgggagaggtccttcaccgtcttgctcttaggcagctg

SEQ ID NO: 9485 - DNA, 346 bp, Unknown
  gut microbiota DNA sequence
tcccggctgcagctccacgtggaaccgcacggcttcggacgatccccgaccacggacccgacaggcccgcgacgtccttggttcgacggcaagacccccgcttcttggcagcaatcgaccggtttggtaatcccgccgagtgcttcacttgacgtttcaagaacccgagctggggaaacgccttcgatcgcgctcggcaagcccgaagcaccgcagctgggccctcgccagaattgccaaaccggttgattcctaccgcttgacgtcgttttcgccgtcaaacccccggcgctccgttggacaatcagctcgagcttccgcgtcagggtttttccctagggttttg

SEQ ID NO: 9486 - DNA, 289 bp, Unknown
  gut microbiota DNA sequence
cgtcaggccgatcgcctgggagaagtagctgagcgcgctctcgccgctgtacgcctgccagttcgtgttcgtgacgaagctgacggcggtgttgaacgcgagatcccaggacagcccgggaagcccttcggggttgaacggcagcagaccttgcagcatgagaatggcgaacagcccgaccaggcagatcgccgaaaacgcgaacgcgctcacaagatagcgcttccaccccatgtcctcggacttgtctacgcggatgcagcggtagaccgcgttctccaccggaacc

SEQ ID NO: 9487 - DNA, 351 bp, Unknown
  gut microbiota DNA sequence
ggccagcgcgccgtggaactcggaagacacctcgaaaccgccgatcacgccgttcgcccgcgtcgccccgtaaccgaagaacgcgagcgaaatagccgccatcggcttccaaggaacgcgcgacaacgatacgcgcagactgtcgccgtccagagaagcgggcagcatccgcacctctgatgcgcccggctcccgttcgccccgcaccgcgattgcgagcagcccgaacgcgccgaacggcagcagcacggagaccgcgagcaccgacagggcgggcagcagcgagatcagggcgaacaagaggaatccgagcaagtacgccgtccctgcgcacacggcggtgcgctccac

SEQ ID NO: 9488 - DNA, 3180 bp, Unknown
  gut microbiota DNA sequence
gcagcacatcggtcacgatctggcccagacagctgccgccccattgggcgaatcgcataagcgccaggcacagcagcgccgacaggccgtccttgaagaaggagtcgatgaacagaaaccataccaggtacttaaccagctccgcccccaccagcgccacgctgaacgtagtgccgcccccgaaaggatcaagcgatgccgggagcagcgaagccatagccatcaaaggaaacgccaggtagaaagccaacatggcgttcttgcgataaaagaggtacgccaacaggatggcgacgaacgacgcaagcgcgggcacgccggccagcgcgccgtggaactcggaagacacctcgaaaccgccgatcacgccgttcgcccgcgtcgccccgtagccgaagaacgcgagcgaaatagccgccatcggcttccagggaacgcgcgacaacgatacgcgcagactgtcgccgtccaaagaagcgggcagcatccgcacctccgatgcgccccgttcccgttcgccccgcaccgcgatttcgagcagcccgaacgcgccgaacggcagcagcacggagaccgcgagcaccgacagggcgggcaacagcgagatcagggcgaacaagaggaatccgagcaagtacgccgtccctgcgcacacggcggtgcgctccacgccctgcacgctcatgcgctcttcccatccgagacgcagcgtgcttcccaagccgctcagcgcgaaggcgatcagcatccagcccatcggcgcccgcccgaaaccggcaagcgcggcaactacgatggccaagctcgacacggcggcgaacaccgccaacagcacggtgcgtcgcctaagaggagccgtcctgcgcgcgagcagcacgagcacgagcgcggccaaggccgtcagcgccgcctgcacgatttgcgcctcgcccacgggcgcctcatggcgcaggtcgccgaacagcaccgatccgttccagaacacgaagctccaagcgatgtagcaggccaaccccgcactgtcgaacagcatcgcgcgattgggtttggggaacggcacggcaccgcctgaccgggaggtctttttcgtcgtatcgtccgctatggaagcgttgctgcgcatgcggcacatactagccgatggaacgcgttcgcacaaggcgaacccgtccgacgcgcaaagccgtcgaacgggttctgggagagggaggaacgtcaaggctggcaagcgttatgcgagcgccgccgcgttcgcaccggccacgcggccgaacacgaacacgtcggtgatggagcaagagcccaggcggttcgtacccatcttatggccggcctgctcgccggccgcgaacaggccggggatgggcgcgccgtcgctatcgagcacctgcgcgtcggtattgatgtgcaggccgcccatggtgtagtgcaccgacggcttgtacgccaagatgtagtaagggccgccctcgatgggattgagcgccgcgcggtagttgaagtcgggatcggcgccatccttacagtagccgttccacttctccacggtcttttgcagctcagcggcatcgatgccgaaaggttcgcacgcctcggcgatggtttcgcccttcgccagctggccgcgcccgaacaagccgtccatctcggccgcgttcaccgtggcgatgtcggtgtggtcgaggccgtcctggctgaagatcatgtagccgatgccgtccgtctgctccttgatggcgttggagatgacgtcgcggcgttccatctcctcgacgaagcggtcgccttccttgttgacgcagatggctcgattctccaggcgcatgttgcccacgtacaagagggcgcccgtctgcgtgtcgcaggtgggatacgtctggatgtactgcatgtcgatgaggttcgcaccgatcttctcggccatgacgtggcagtcgcccgtcgcgcccaccgagtcggtggagagtatcttctcgtccatctcggggttgtacttcatgcgcatctcgacgttggagccgaagccaccggccgcgaggatgacggccttcgccttgaagtcgtaggtttcgcccgtggccgtgttcgtggctttcagtcccacgaccgcgcccgaggcgtcctgcaccagctcgtcggccttcgtgttgcggcacaccttgaggttcttgagaccctcggcacgcttgtccagcttgcagatgatgccgcttccctcgttgccttcggggatgagcgagcggatgaccgagtggccgccgaagaagcgctcgtagggctgccacgccacgcctccgttgaagatgagccactccatggcgccgtacgcgccttcgcagatgacgttgaccaggtcggggtcgcccacgtgatcgccgccgacgatcatgtcctcggccatcttctccacgctgtcctcgatgccgtcccgcttctggaaccagttgttcggcacggccatggcgccgccggacaggatggtatcgccgccgacgatgcccagtttctccaacagcacgacgttcttgccggcctcggccgcggtcagcgcggccgcgtagcccgcgcctccggcacccactacgacgacatccacatcggtcgtcaggccctcgggagcctgcggcacggccttttcgcgtttcttccattcgctcgatttcatgcccgaggcgtcgacggcatcggagacagccgcgagaaaggccatagacgaaaccgtggcgcccgtcaccatatccacgttgagcgtctggttcttcacgatgagatcggaaagcacgtcgatgccggcggtgcccacgccgtaggactcgcgcgacttcaacaggttgatgcgggcgatggaatcgccctcggtgatgacctcgacagtaagctcgccgcccttgccgttggccgtgccggtccatgcctgcgcgccctcgcccgcagcgcctgcgaccgtcgacgagctttcgcctttcggggcgcaacctgctatcgccagcgtcccgcccaaagcagcaatagctccaccggtaatgaaatttctacgtgaaagattcgacatgacgccctccttgttgtgatggtgctcgcttctcccgaatatcccgattcggtaggccgatgctacatcgagaaggacgcccaccgcatcgccgcagaggtttgaaccgagcgcaatcttccgaaaac

SEQ ID NO: 9489 - DNA, 7247 bp, Unknown
  gut microbiota DNA sequence
aaacggtagccatgacaattctcaagtgctcgaaatgcgcttctcgctagaagcgcgcgcaaaaggcctggtcgcatttcgagcctacgacgatatgcggcttcaggcgagagagaaaatgtcatggctgtcgattcgcgcccacgttcgaggaattcgagcgaagttcgccggttcgagacgagacgttgactcattcccgttgactcccggtgacgagacgaagggacggggttgacagttcattacctcccttcgctcgtcccgcgattcacgctcccagcatgatcctgatgatctcgtcgttggtggcgcgcatgccgtcgcggccgaggcgggcgatgctgtcgatggtgttctcgacgcccttcttcacgatgccgtcgccgccgtagaactgctggccgtcacggtacatgacgtagcctaggatgcccgcgttcaccgagaacgcgatcttgccggcgcacgatggcttcgcgccgtcgcacaccatgccggccacgatagacagcgcattcaccacggcatgacaggcctcgcagtagccgccgccatccaaatacgcgatgcctgcgcccgccgccgcgcccgcgcacaccgcgccgcagaacgccgacagccgtccgatacccgtcttctgatggatggccacgaggttcgacagcacgagcgcgcggtagagctgctcgtcggaagagcccaggtggcgcgcgtacacgatgagcggcaccgacacggtgatgccctggttgccgctgccggagttgatgaccacgggcagctcgcagccgctcatgcgcgcgtcggacgccgccgcggcgcacgcgcacgcgcgtaccttcacgtcgtcgccgtaggcgcccagcatgacgctgccgatgttcgcgccccagtcgcccgccagcccctcgtcgacgatggcgccgttgcaggcgatctggcgatccagcaggtctcgcacgtcatccagctccacggtcatggcgaagtcccagatgccctccatcgacagcacgccgcgatcggtcatcccgtcggccgagccgccaacggagggcaccgccacgtcgcgcagcacctccccgtcgcgctcctcgcgcacgatgttcgtatggaagtcggcgatgcgcacgagcgcgctgcgagcgggagaggcgcaggcatcagcctccgcgtccgccgcctgcgcctccgcgtccgagaacacgcgcacgacgatgtcgaagtccagctccgatgcggcgcgctcaaccgcgatggacgcgcgctccacataggccgcgatacccgcaatctcctcgggcgaaacctcggcgatcacttcgaggctgcgctcggcgcgccccgccacgatgcccgcagccgcagcggcctcgatccccttcaggccgccggtatggggcaccaccacgctcttcgcgttcttgatgatgcttccgctggcctccacctccacgcgggcaggttccgcgcccagcagttcgcgcgcccgcgcggccgccagcgcgatggcgatgggctcggtgcatcccatcgcggcgacgagctcctcttcgaggatggccacgtatcgcctgtaccgctcgtccgtccgctccatgaagcactccctttcgcgccgcccgtcgcatgcaacgcatcatgatagcacctcgcgcatggcgccgcgcgccgcccgtcctcgcaaaccgcgttcggcagccctcccccgttttcgggtatcttcgttgttttgcctggacacaggcgaatataccccaatccgcgcgatgacgcggctccgcgacccgcgtagcatgcacctcgttgaaaccgaacaaacgaggagggaatcatgggagaacgaaccatcagccgccggaacttcctggcgggaatcaccgcgacgggcgcgctggccgcagccggggcgctggccggatgcgcgccgcaagcgcaggccgaaggcggaaaaagcggcaaggccgacgccgacgcgcagggtagttggcgcgacaagccggatatgcccgccgacatcgccgagacgctggaagccgacctcgtggtggtaggcgccggcaacggcgggctcgtggccgccaccacggccgcgcagaacggcgcgaaggtcatcgtgctggaaaagggcggcaacatcgccgccgcacgcgaggctatcggcgcgctcaactccgcgctggagcccgaccatgtcgaagacgtccccaccctgctgaaccatgcgaaccagacccaagcgggcgatgccaacatgctgctgtacaaaacctgggccgagaagtctggcgagatgatcgaatggatgaaggagacgcttgagcccaagggcatgctgttcccgttcgaatggcacaagcccgacgacccgcacgcctactacccggccatgtgctataacccctgcatgggcgagtacaaccccgacggcccgaactacggcgcgtacgcccaccttgaagtgatgaacgaggtgctgggcgagctgggtggcgaagtcatgttcatgacgcccgcgaagatgctcgtgcaggacgagtcgggcaaggtgtgcggcgtcatcgcggagtcgaaggacaagggcgtcatccagatcaacgcgaagaacggcgtcatcgtgtgcacgggcggctacggcgcgaacgacgagatgctgcaggacctgtgccccggcaactccaactggtgcgtgctgcgcgacagcgtcaccgaggagggcgacggcatccgcatggcgctgtgggcgggagccgagctggaagcgggcggcgcctgcatgatctggaaccgcggcatcatgttcgacgacaccgagttcgacggctcctaccagggcggcgacatcttccttcccggcagccagccgttcctccacgtgaacgccaacggcgagcgcttcatgaacgaggaccagtgctaccccatgagctacgccggcggcgcgaaccagcccggccacttctcgtggatcgtttgggacggcagctactgggaagacatcgagcggttcgacacctgcggctgctcgcgcctgttccccgcgccgtcgggcaccgcgttcaacgccgacgtgtacgactgcgaggccatcacgaaggagcacctcgactcattctggctggagccgcgcatcgagagcggcgcgctgaagaagtgcgacacgctcgacgagctggcgaaggagatgaagttcgacgccgaccagaccgccacgttcaaggccaccatcgaacgctataacgaactggtcgctgcaggcgaggacgtcgacttcggcaagcctgcctaccgcctgagcgccgtcgacgagccgccgttctacgccgcgcgcatcgccggcgagctgttggtcaccatccacggcgtgatcacgaacgccgactcgcagccgctgcgcaaggacggcagcgtcatcgagggcctctacgtttgcggcaacgaccagggcggcttctacccgcacaactatcccagcaacttcacgggcatcaacgcgggccgcaccgccaccttcgcccgcatcgccgccaagcacgctttaggcgcagcgtaagcagcaccaaaaccaaccctccctcccttaacggaaagccccgcacgcggggctttccgtgcgcttgctcaggatggcaaggcaacgtgcgagctaatgcacgaggtcgatgagctcttggcgagagtgcacgtcgagtttggcgtagacgtgcttggcgtgggtggcggccgtctcgcgcgagatgacgagagcgtcgcgcacgtacggtatcgatcggccgcgcgccaggaggtcgaacacctcggtctcgcgcggggtgaggccgccgcgttcggcaagctcgaggatgcgggcggtcagctcgtcgatatcggctgcaggcgcgggcgcggatgcagcttcgtcggcgttcgcgccgcccgcatccgcgcccgccggcatcgaccgcttcgaagcggcatcgtgcagcacgccatcctcgttgcgcgcgccgaacgcgaacgcgcggccgtcgctgagcacgaacatggtggcgcccaccagcagcgcgatggacacgaccgccacctggtcgagcgagaacaccccggccgccatgccggactccaccagcacgagcgtcaccacgcccagcagatcgcccaagtgcacgaagatccatcccaaaccgtacgactgcacgggcgtggccgcgccctgcacagcgtagcgcgcgaaatacatctgcgtgatcaggcagaacgcgaagcgcgcggcgatggccaccacgtaggcgacgtacgcgcccgcggtttcccccagcacgatgaacgccgcgaagcccaccacgagcgtcgggcacatccatcggtacagaaacgacagcgacacccgacgcggccccgccgtggccgaaagacccaccatcagcatgaacgcgatgctcaccacgagcgccacctgggcggccgtcgcatcctgccctgacgaccccgaccagaacgacccctccacgcacacgaacaggcacgccgcgaggatgccgaacccggcgcgccccatcgacttcagcacgcgcggcagccccttccgcgcgctgtcgtgagcctcggcgaacgcgcgctgctcggcggcgccccggtactcggcggtcgcgtcgcgcccttgcgcatcccgccacgacagcagcaggcacaagcccgacaacaagggaaacgccgtcaccaccacgagcgccatccatccctgcatcgccgacaccaccagcaccagaacggcggccgccacagccgacgacggcgcgagaaactccacttcctcctgcgtcaccttcgcgtagtactcgccccacatcacccacatgaagccgctgccaaatcccgtgagcaccgcacctatcacgaacagcgcagccgtcgcgccgaaatcgggcagctcacagaacagcagcggcgtggaaaccgcggtggccagcggcgcgatccagaacagcgccgcatgctgggcgggcgagcccagccgcttctccaacaccacgatgagcacgagcatgaccaccgacatggacaccggcagccccgtgaagaacagatcccagcccgcaccaaccgccaacgtcgaggccttcgcgcccgtgtagccgctcaccgcgttggtgtagaacacgcagaacacccaggccagcagaaacgcccagcccaagcgccgcagcggcgcgaaccgctcgaccgccgccacgagcgaccgctcgcgatcgcactgcgcgctcgtcgtcttcccggtcatccgcccgtcccttccaccgtcatcccatttggccatttgtaccacaggaagccccgcttggcaaaaagtgcccccccccccccgacgcgtttcgagctgctagaatgccagacagtggcagatcccggcaaaggaggtgccgtatgaccaggaaacgcggcatggcgacggcgttcgcggcggcgtgtctggttctggccggttgcgcaggacccctcaatctgatgcaggaatcgatctactgcgacgatgcccgcatcgcccaaggattcgacacgtacacagttgcgaacagaaccggctccctgttcgacagaaagatcggcggactgaccggcctggaaacatggcttcggatctccgtccccaacgaaggcggggagtttcgcgtcgactacgatgcgaccgtatcggacggcgacttcaagatcgtattcgtcgatgagaagaacgttgataccgtctgcgaaggaacggctcgcggaagccgcgtcttcacgctcgaccggggagggtacgccctcaaagccgtcggggcgcatgcgagtgccgaaatcgccttcgaactgcaagcgagcgaaggcgtcaccgccgttgccacgggtgacgcgttcgacgacgaccaggcagtggatctcgaaccgattgaaagctgatgccgcggatttgcctgcgtggacgcgaatgcgtttccacaagaagcgaacaactgcctaagtcccacgcttaaagcgcgaaagcgtttcggcgaacggcatctgcacgtgattcgcccttcagcgcacaaaaattggcgacgtacgagacttgaaggccgttgaacggccgtctctcgcgaatgcaccgcgcactgcaatcgagggcgattcaacgacctggggattcttcaaaaccgatcagagtgggcgacaagaaaacatcggttcagatcgcacgtcgcgggtttttgtgcaacagacgcctgaccccatgcaaaaccagcagctcttccccgccgactatcaccccgcggcgcgcatgaccatgcgcttgacgtcttcacggtactcggggcgcacgaggtagtacgcgtaggcctcgagcacggtttggaaggccacgccgcggccgacgatcttgaagtacccgatgccgtactcgtcgtgcaggtcgcgcacctcccgatcggtgaagatcaccgggtggcccggctcgtggtcgaagaaatcggcgcgcttcgcgacgcactcgaaggggcgcatcgtgcccgaccgctgatcctcgctgttatgcaggtagtgttgcgcgcgatgcgggcaccggtaggcgcagaactcgttcaccatgacctccaccttgtcgcggtcttcgagcgccgcgagaaacgccggatccttgtggcggttgtagtcgagcaccacgtagtcgtagcgcttcgtcatacggttgacctcggccgcgtccgccagcgcgcgcgtggtggacagcacgcagcgcatgccgtaacgctcgcgcacgtagtcgcccacgaggtcggcgtacacgatggcctcgacgccgtagcggctggcgatggcgagcatcgcgttcaggtactcgtcgtgcaggtcgtcctcgtcggccagcatgttcgtcagcgtgagacgcgccttcacgccgtgctcggccaagagcgagaacgcctcctccatctgccgaggcgtggctcgctcgcgcaagaacgcgcggccgccgttcaggtcgcacgcgggaaagcagccgtacacgctgtcgatgcgcacgccgtcctggaacagcgccgggcgctgctccagcaagcggatgaagaacaggttgagccccagccccaccgtgaaatccggcagcgtgtagttgatcatgcgttcgttcctccaaaatcaccggtcgttcgtagcgtcagcgaggggctccctggtgcccgagatcgtggggagggcgagggcgaagcgtacttcggtacgcgagtcctcggcctcgccgcgag

SEQ ID NO: 9490 - DNA, 1876 bp, Unknown
  gut microbiota DNA sequence
gggagctccgcagcgtcgagcagttccggcggccgacaaaccgccggaacttccctagaacatgcacatctccaagtgttcgccgagcgttgagtgcagcttatcgtacatcgatgagggcttgttcggggtccaggttgggcgcttcatagcgaagcacacggcttccttgcccatgaactgcttgatggacacgcgaccgctcaccgcgatggcctgctcggggcagatgcgctcgcacaggcggcactgcatgcaggcgctcggacggtgcacgacgccgaacacgccgccctcgtcgagcttcttgatggcgcccgtggggcagaacaccgcgcacatacggcacgagctgcacttctcggcatcgatggacacggcgccgatcacgcgcgtctccacctcgtcggccgtcggttgccccacgtgctgcaggtagttgtacagccgcacgcggcgcgtggggacgaactgcgacagcgtcccatctgcgcccactttgcgatgcgccgcaggaacgggctcggcctcgaccatccccaactcctcggccaccgccgcgccagctgcgcgggtcgatgcgtccttggccgagcggaagaagtcgcgccgccccaccccgtcgctgcctgcctggccgtgcgacccgccgggctccaacacgcgctcgggcacgcattcctccaggtcgatgggcatggaggatccgaacgcctcaagcaggttgcgcgcgccctccaccacctcgcgcacgagcgcgccgcccggagcatgtgggcacgtctcgcacgaaccgcaggccagcgtcgcgtcgaaggcgcggtacgccgccaaccccacgagcgccgactcgtccatgcgccccaggcacggcaccgcgcacgcggccgacgcatcgtcggccgcgacgttggccgcctcgagcgcctgctcgcacacgatgaccggatggcctttcgtcgccacgatggagtgcttgagctgcgccgtcagctcggcatccgtcgggttgcgcagctcgatggcgcaggtggggcacgccgtggcgcacgtgccgcatccgatgcagcgctcgggctctacgagcagctcgcccgcgcggtacgccagcgcgcccgacgtgcatgcctccacgcagcgcaggcagtcggcgttgcggttgcgaaccgagatgcagcgttcctcatgcacggcgatggcatcgctctcgatctcgcccaacagggccagcaggccgttgatcagggacatggcctatcccctttccgggatctcgtcgtcgacgggcagcggcgtcgcctgcgcctgcttcttcggcagcaacgggaacgtgatggcgcgctcggggcacacgtcggcgcacgcgcggcacttgctgcagtcgttgagcgtggtctcgcccgccgcgacatcgtgcaggttgatgccctcggggcatgcctgctcgcacaggttgcaggccttgccgcgaccctcgcgcaggcacttctcggcgtccacctgggggcggaacgtccggttcagcccgctgaacagcgaaagcaacgcgcccaacgggcagaagcgctggcaccacttcggcagcagcaggatctccagcgcgatgatggccgggaaggcgacgaccgtccacgtggcgtcgccgaacgcgaacaggcgcatgaccagcagcaccgtggcgaacgtgaggccgatcgggcagacgaggcagaacaccgggaagccgaagacgagcgtggagcccaacgccgccgcgaggatgccgtggcggctgtcgatcttgatgcccttggctttgccgcagggggaagcgcacgcggagcaaggggaagcaaccttgccccctttaccctccttgtcccccttatcccccttc

SEQ ID NO: 9491 - DNA, 6026 bp, Unknown
  gut microbiota DNA sequence
agcgaggatgccgtgacggctgtcgatcttgatgcccttggctttgccgcaaggggaagcgcacgcggagcaaggggaagcaaccttgccccctttaccctccttgtcccccttatcccccttcttccttcctcgcgacaggaagtgcacggggcacgcccaggcgcagaacaccttgcctagcacgatacacaccagcagcacgaccgcaacgctgatcacggccatcgggatggctgtgcgctcggcgatcatggccagcagcgcgcctagggggcacagcagcgtgatggactcgaagccgatgccgcagaagttgccgatgccgccggccgtgaagtaccccacggccaccacggccagcagcgccagcatgatcaggaaccgcagccgataggttttgagcttcttcatcctgatcacgcctccacttcttcggtcggacggacgacgatggcgcgatcggtggcgccggccgtgatggaacctgccgacagcgagatgcacgccagctcgcaggcgccgcagccgttgcacgcatccacgtccaccaccggcacgttgtcggcgcccagctcgagcgcctcgtagttgcacacgtcgacgcactcgtggcagcccatgcccttcgcggcaaggcaccagtcgcggttgatctccgccttgccgatgatcgcctgcgacgggtcggggcacgaaagcgcatgcgtcgggcacgccgcgacgcacttcggcccgcccggctcgttctcgcagaaatcgcaccagccgcttttgaagtccatgcgcggtgtgcgcgcgttcaagatgccgtcctcaagatgagcaggagcgatggcatgcttcgggcacacctcgcggcacttctcgcaatgcaggcagccgcgcgccagctgctcctcgtcctgcccgcccggcgggcgcagcaacgtggcactgggcaggtacttcacgccgcccagcccgatgacggcgcacgctcccacggctcccagggcgaacgtgcggcgcgacacgcaggggcccgtatcgcgcttgggctcgatgccgtgctcgtccatcatgcaacctcgacttcggtttcggccgacgccgcacgggatccttcggcttcggcctgcggcctccgctctggatggcaatccgcttcgttctcagacagcacggcgtccaaaaattcgcggtcgttgcgcaggaagccgtcggtcagcttgcccaggcccttgtagaagtcggtctgcgggaacttctgcaagtcggccgccatcatggggtaccacgccagcaggtggtcctccaggaagttgcgctgcgacagcagcagcttcaggcactcgtcctcgtcgccggcctcgtacgccctgatagcgcgctcgcataggatctgctcgaactccagctccagcgcgatatggtcctcgccctccttccagctttcctgcttgtccagaccgaaggcgcggtacagcaccagcacctcgtcgcgggcgtcctgcatcatgaggcgcttcgggctcgtgtacaccgactcgtacgggtacgcggccgagaagccgtcgttgcccgacccgatgaacgcgcgcacgtagtccaccgccagctcggtgagcaccgtgccgtcggcttggctcagataaccgcagatcatccggtagccttcgtccaccagcgcgttgccggtgttcgccgggaagcgcatggacatcagcgtgtcgtacagctcctggtccacctccacgcggaacaggcgcgagaggaactggtaggttgccatgcggccgcgcagcacgtcggcgatggtggtttcctgatcgtgggacatgggtggctccttctctagcgttcggacggggaagcggcggcgaacaagccggacgcgagcacgctgcgccccagatcggtgatggtccaggcgtcgcgccattcgatggcgcccgtctcttccagcttgccgcggaagaacccgcagaagcgacgcggctcttggcacagcgggtcgccgtccaccgcctggtccagctccttggtgggacagcctccttcgcgcgcgcacatctcaagcacgcgctggaagatgggcagatagcgctcgtcctcctcgatcttctctgccacgaggccctcgttgacgtgcgccgcgacggcatcgaggcccgcttgcgtggcacggtagcggcacggcggagcgggcgtcaccgagatgaagccctcgtcctcggcgagcgcatcggcagcgtcgccggcggccgcatgggcggcgtcctcgtccacgatgcgctccagcgcgccgtcgcgctcgagcagctgcaccacctgcgccgagccgtacacgctcgtcgtgttcggatacgccgcatccaagtcggccacggcctcgtccatcgtcttcggctcggtgcagaattccacggcgtgcagcaggcggaactgctggccgggaatgcccgccagcagattctcgatgcgctcggccgcagacagcggcaccacgggaggcaccacgctcttgtcggcatcggggatgggcggcaggtaatccgcctcggcatcgtcccgctcgccgtcgtccaggctcaggtcggccaggggatcgaaatcgtcatcgatcacgaatacatcaacatcgctcatatctatcagtcctttcatcatttcaaaatcaccggtcaggaaaagtcagcgaaggttcgcgcggtcgtcagaccgttggagctacaaagtcgaagacgcgtacagcaccttcgtgggcagctcgcgaggcgcgtcgggtgcgggagagagcacctcgtcggtcagcgacgcgaactccgacggcgtcacgcgcgcgaagcgctcgccgtcgcgcacgaacacgcgcgaggtctgcaccttcgtgaacgcggtgttctctaaaaggtcgcgcacgaaccgcgtgcataccgctcgttcgctcgcacaggacagcacgtccaggaacagcgcgcgctcgcgttcgagcgccacgcgccgatggtcgatggtgaacttgtcgtccacggcgtcgttcgccggcaagaagccgttcaccaggccggtgacgaacaccgtgcgcacatggcgcccgtggcagcgcgcgtaggagaccacatgcacggcatcgcgcgcgacgtcctccaccggcttcgcgaacccgcagcgcgccaagcgctcgacgtccgcatgcgcagggtcgtcgcccagcagctccacgtggcgcggggacaacggcattccgtgcgcttcgaacagcgctacggcagcatcgcgcgacaacccgccagcgcaggcgcgcagcagctcgtccagctcgtccagcgggccgtcgaacttcccgaagatcgtcgaggagcggtcggcgtcgcgctgcgtgcgcagctgcgccacggcttcgggcacggtcgtctcatggtcgcgcgcgtacgccatcagctccaaaaacgcatcggagcgcagcagccaatcgccgaaccccagccacgagcgcagcgacgtgaaatcgtgcggatcgaggtacaaccgcaggaacgcggccagcttgaggtcggcgtaacggccctcggtgcgcgggtcgcccttgatcttcccgccgtcgaacccgcgctccacggcgatgccgcgcccttccaactcagccgcgatgcgctcgccccaagcggcgttcggcacggccacagccacgtcgcctggccggaagccatcgaccaggcactcccccacggacgccgccgcgaacgcgaactcggccgccgggtcgtccagcgcgcgggactcgcgcgccgcggccggccgctcgcacgccagcgtcaccaggcagtcggcctcgtcggcaagcgcgcggaacccgtcgaagcacgggtacggctcctcggagctggacgaggccagcgtgcggccggccgccacgaggccgtccgtcgccagatggcgcacgaggcgctgcgacgccttgctgagcgacccaaagtcgtctgccaccagcgtcagcggctcgcgctcgacctcggctttcacaaggccgcgatacgccagcgacgaaacctcgcacggcagcagcgcgcggcgcgcctccaggttctcggtgaggatggcgtgcacggtctgctcttcggcggtgatcagccagcgctcgtcatcgtcggcgcagtcgctgatgctcttgtagaagaacttgagcatctcgcgcagccggcccggcttgaggccgctcaccttcacgtcctccatgagcacggccagctcgttctcgtccagcacgcgcgcgtcgcgtcccacggcgtcgccgacccgcgcatcgcccagaatcgagagggccagctcgcgcaccgacaccacgtcgagcgcgcccagcagcggatcgtcggccgcaagcgcccgaaagcgcgcggctgcaacggcgtcggcgcacacgacgcgcacgttcgaccccgcctcgacgcgagcgcgagccgcgcgcagcaacgccggcgcaacgtcgtcggacgcatcgtgctccacgcacaagcacttcgcgccgctattcagttcctcaagaagattgttcgccgcgtcttcgacggacgcagcagtacaagcactcatattcggtctccatccattcttcggatgaagccctttgctcgaagccccccagcttcatagcgctttcacttctacgcagtatgcccaaccgccgcgggcgcgtctaccatcattccgaaacggaatggatgaaatcgagcgcctcctgcttgtcgcccacgcccagcttgcggtacacgctgcccagcacgtcggccacctcgtcgcgcgtcagcgccagctcgccctggatcgtctcgaagccgtgctcctccacgtacaggatgagcgcgcccagctcgcgccggtcgagcccgcagcgctcggccgcgagccggcacttgcagcgcagcgccatgtcccccgcggccgcgggcgagccgtcgacagcaccctcgcccgccgcgacaccggcagtcgagcccgcagcctgcccgtcgcgcgccgcgcgcaccagcagctcggtggcgcgcagcagcttctccatctgccgcgcctgcgcgtacagcacgccgcccgcctcggtcaggctcacgccgctgcggtcgcgtacgaacaggtcggccccgaattcgcgctccaacaaggccacgtgcttgctcagcgtcgactgcgtcagatgcagctcgcgcgcagccgccgtgaagctgccgcactcggccaccttcgcgaactcgtgcagatacgccgtctccatcgcctcagaccgcctcgtcctgcgcggccgtctcgtgggccaggtcgatgagctcttggcggttgtccacgcccgtcttctggtagatgtggcggatgtgcgtgctcaccgtacccgccgagatgaacagcgtctcctggatgcgcgagatggtgcgcccctccagcagcagcggaagcacatcggtctcgcgcggcgacagggcgaagcgctccgcgatcagcgcacacggatccaccgggtcggccgggtcgtcggcggcctcttcgggcaccgtgcccatcaggctgacctcgccgatgccgattttgatgaggtcggtctccgtgaacaggaacaaatgcgcgatgaacagcagcgacacggccaccagcgtgaccagcgtaaggtcgaacatgctgaccccggtcgcctccagcgaatgggcgaacagctggcctgcagtctcgccgccgtacagcgccacgaaccccaggccgatcgtccgcgccgggctcacacggaagctggacgccacgtcgatgcacaccacgcacagcaccagcacgaagcagtggtagccgccgaagataagcgcgctcgaatacgtgttgttgtcggccataaacggcgtggacaagcaccccaagcacagcatcagcatggagacgcggtgcgagaagaacacgctgtcgcgctgcaggaacacggctatcaggcagatggccaacgctccgatgaagcccgccagaaacaggtacgtgccgaagatgtcctgcacctcgtaggttttgaa

SEQ ID NO: 9492 - DNA, 2327 bp, Unknown
  gut microbiota DNA sequence
ggcatggagacgcggtacgagaagaacacgctgtcgcgctgcaggaacacggctatcaggcagacggccaacgctccgatgaagcccgccagaaacaggtacgtgccgaagatgtcctgcacctcgtaggttttgaaccccgacaccacgtcgaagaaccccatcaacatgccgatgagcaccgcgcccagaagcgccttcgcgaacagggtcgccgtatggcgcgacaaaggctgctcgggctcgcgcggcagctgcggcgtatcgggcgcgctgcgcctgagagctgccgccgaaagcacgggcatgacaacgatgagcacgatgacgggtatcgccggccctacgatcagcaagaaccccacgacgaacgcgatgcacagcgacgaggcaagctccacaagcgccaagcggcctcccagccccgactcgagctcgatccagcacaagaacagcacggccgagcccgtgccggtcatgaccgcgctcaggcccagcaccagcatgccgacgggcgtggtaggatcggagaacggcgtgagcacgctgcccgcgctcatcatgatggccgatcccagcacgatggagcggttgccgctcacccgctcgcgccgcacgatgacggagacgaacagcatggtcaccaccatggccaccagcgatatgatcaggctgacgtacagcgagccgcgcacgtccgacgagaagccgtacggcacgatgctgtagaacatcatgagcatccaaagccattgcaaggccgcacccgcgatgcgcgtgagggaaaggctcgtccccaacgcagtatcccatgcactccgaagcttttccatgccccaccccctgtgagcccgtacggaacgtcgctcgcgccgacccctctgtcgacgggttcgattatacggaaaagatgagcatccctctttgaggaagttattctagtttcagaatagtttatgaccttcgtttgatgtttttccagttcaaatcgtcatcgattttttcatgatcacaagatcataagaatttatgatgcggtcgaacccgctttccaacctttgaacgatgctctgcatcccctcgcatccgtatggtcaacccaagcgacacggggactttgcaccggtccggagcccgaggcttcgcccggaagcccccctccccgatcgcccgaacgaagacgagcaagacgagaacgaggagaaagaaggaggaggagtatgggcaacctgaccatgtcacgacgcacgttcgtcaagaccgccgccatcaccggtgcggcagccgcggcgttcggcgcttcgacgcacaccgcgctggccgaagagacgtacagcagcgtgtccggcaacgacaccgtggccgtgaaaacgtgctgccgcggctgcggcaagatggagtgcggcgtcaaggtcatcgtccagaacgggcgggccatacgcgtcgagggcgacgagggagcgttccagtccatgggcaactgctgcacgaagtcgcagtcgtccatccaggcggcgtaccaccccgaccgtctgcactatcccatgaagcgcacgaacccgaagggcgaggagcccggctggcagcgcatctcgtgggacgaggccatgcagtccatcgtggacaacttcatggacatcaaggcgaagcacggcggcgaggccatcgcctgccaggtgggcacgtcgcgcatctggtgcatgcactcggagtccatcctgaagaacatgctggaaacgccgaacaacgttgaggcctggcagatctgcaagggcccgcgccacttcgccaccaccatggtgtcgcagttcgccatgtcgtggatggaaaccatcacgcgcccgaaagtgtacgtgcagtggggcggcgcgtccgagctgtccaactacgacgactcctgccgcaccacggtggacgtggcatcgcgcgccgacgtgcacatcagcgtcgacccccgcatggccaacatgggcaaggaagccgactactggcagcacctgcgccccggcaccgacggcgccctggccctggcctggacgaacgtcatcatcgagaagaagctctacgacgagctgtacgtgaagaagtggacgaacgccccgttcctcgtgtgcgaggacatggagccctccggcttccccaccgtgcgcaccgacggttcctactgggacgtgaaaaccgcgctgctcaaggaaagcgacatcaaggagggcggcagcccctataagttcctcgtgtacgacaacaactgggagaagctgaaggccgagggcgtcgagcacgagtacggcgcgttcacctggttcaacgccgaccaggaaggcgtc

SEQ ID NO: 9493 - DNA, 3068 bp, Unknown
  gut microbiota DNA sequence
gtactgggacgtgaagacgcgcctcctcaaggaaagcgacatcaaagagggcggcagcccctacaagttcctcgtgtacgacaacaactgggaaaagctgaaggccgagggcgtcgagcacgagtacggcgcgttcacctggttcaacgccgaccaggaaggcgtcatcgacgaaaccggcggcttctgggagggcgagaactacgactccgagaaggcgcgcgaaggccgcgaggcttcgcaggacaacctgctgccgggtcagacgcagggttggatccccgatcccatgccgttcgaccccgccatcgaccccgcgctcgagggcgaattcgagatcacgctcaaggacggcaagaccgtgaaggtcaagcccgtgtgggagtactacaaggcccgcgccgccgagtacaagcccgaggttgccgcggagatcaccggcatcccggcatccgagatcgaggcggccgccacggcgtacggcacgcgcatcgacccgtccaccggctacggcaacggcggcatccagtacatgctggccgtcgagcacttctgcagcgccatccagaactgccgcgccttcgacaacctcgtgggcatcaccggcaacatggacaccccgggcggcaaccgcggcccgacaatcgtccccatcgacggcgacctccagggcttcagcgcctgggccccgggtgctaccaccccgccggcggaagtcaacctcaagcaggtcggcatcgacaagttcccgctgctcggctggtggcagtactggtgcgacagccactcgctgtgggatgccgtcatcacgggcgacccctacccggtgcgcgccctgtggaacgagtccggcaacttcatgagccagacgaacaccacccgcgcctgggaggccctgtgctcgctggacttctacgtggacctcaacctgtggcacacgccgcagaacgacaccgccgacatcatcctgccggtggcccactggatcgagctcaactcgccgcgcgcgtcgcagggttccgccggcgccatgggcgccacggtcaagtgcgtgcagccgcctgcggaagccaagtacgaccccgagatcgtcatggacctcgccaagcgcatgaactggcagtggacggacgagcccggcaacgagtggcccgacatcaactggcagctggacgactccatcaagctgctcaccgatgacgagctgacctacaccacgtggcatgtcgagaacggcaagcccacgttcgagcgccacggcgttccgatggccgaggtcacgcccaagtacaagacgtgggacgagtacgtcaaggccttccaggagcacggctggtggcaggcgaaggacatcgagccgcgcaactggggcacgtaccgccgctaccagaccggcgcgatgcgcgcacgcgaccgcgtgtggggccgcctcgactacacggccggcaagggcatcggcgactggaagccgggttggttcaccccgacgatgaagcaggagatctggtccaccgtcatggaatcgcaccatcccaacaaccccgagtggttcgtccccagctacaccgagccgcctcacggcccgaaggacggcgaccgcatcaaggagtacccgctgaccgcgaccaccggtcgtcgcatcccggtgtacttccactccgagcaccgtcagcttccctggtgccgcgagctgtggcccgtgccgcgcgtggagatcaacccgaagacggctgccgagtacggcatcgagcagggcgactgggtgtggatcgaaaccgagtggggcaagatccgcgaggtggtcgacctgtactacggcgtgaaggaagacgtcatcaacctcgagcacacgtggtggtaccccgaggtgaaagacgccggtcacggttggcagtattcccaggtcaaccagctcatcgaccacggtgcccaggacccgcactccggcacgtccaacctgcgcgcctaccaggtgaagatctacaaggccacgcctgagaactcgccgtacaacaaccccgtgccgtgcgacagcaccggcacccccatcatccatacttccgacgacccccgtctgaaggaatggttgccgaactacgaagggagggagtaaaccatgacgaaggctatcatcaccgacctcaaccggtgcgtgggctgcctcgcgtgctcggtcgcctgcaaggcggtcaacaacgtgcccatcggcagctactggaacaaggtcgtgcgcgtggggccgaaccccatcccgggcggatcgggacagtatcccgacgtgtacatgtacttcctgcccatcagctgccagcactgcgagaaccccgagtgcgtgaaggtgtgcccgaccgaggcgtcgcacgttgccgaggacggctccatccagatcgacaaggagaagtgcatcggttgccagttctgcgtcatggcctgcccctacggcgtccgctacctcaacgaggaagagaaggtcgtcgagaagtgcacgctgtgcgagcagaagcttgcccagggcgagctgccccagtgcgtcagccagtgcggcggcaacgcccgctacatcggcgataccgaggccggctacgagtcgttcgagggttccgaagacccgttgggcaaccgtcgcaagatgctcgacttcctcgagcccttcaccgacgccgacgtgcacaggctgcccgacgtgggcaacaagccctcgtactcctacatcctacgcgaccatcactgggaaggaggtgatgagtaatggaaactcagtggcctctcgttatcttcacgctgttcgtatgcttgacccgcggcacgctgggcggcatgtccatcctggcgctcaagggcgaaggtaagaacctgcagatgaccgcgctcatcacgtccgccgtctcgctggtggtgggcggcatcggagccttcctgcacctcgagcattgggagcgcatcttcaacggcttcgggcacatcacgtccggcatcacccaggagctcatcgggtgcgtggcgctggccatcatcatcgtcgtgtggttcgtgatgctgcgcggcgagaagccggtctccaaggcgct

SEQ ID NO: 9494 - DNA, 193 bp, Unknown
  gut microbiota DNA sequence
gctcgtggctgcgggaagcgccctgtgcggctgcgctgccgcaggagccggaaccggtgacgacgcggccgccggcaaagccgcgctcgacaacctgaaagccgacgcgaaaccggccgcgccggcaaccgcggcggccaacgagggcgtgtacgccctgctcgacttctccgacgaaaccgagcgcgaattc

SEQ ID NO: 9495 - DNA, 4812 bp, Unknown
  gut microbiota DNA sequence
tcgtacgggtcctccggcgccacgcccggctccagcgcgtcctcggcaagcgcgtgcagcggatggcgcggcgagggcgccacgcgcgccggggcgatgtccacggtgccgtacatggtctgcacgccgcccgccatcgtgtcggccgccgcgcgcccggtgatgtcgtgcgtgcccggcgtgacctccatcgtgtcctcggccaacgcctcggtggcgtcgccggtggccagatgcctatgcgagcgcgtgcggcgctcaaggtacagcgccagacgcgacagcgggaagcagatggcgaagtacagcagcgccgccaccacgtacaccggcccgtagtagctcgtcgcgcccgcgaacgagttcgagaaatacatgagctcgccgcccgcgatgagcgcgagcaccgacgtgttcttcaccaggttggccgcctgcacggcaagcggcggcatgatgatgcggatggcctggggcaatatgatcacgaacatcgactgccagtacgtgaagccctggctcttcgccgcctcgaactgcccgcggtggatggagccgatgccgctgcgcaccacctcggagatgtagccgccgtggtagatgccgatggccaggaccccgatccagaacgcggccagcgacaggcccagcagcgggaagatggcgtagaacacgaacacctgcagaagcagcggcacgttctgcaccacttccacgtacacgcgggtgatgccgcgcagcacggggatgcgcgacaccgacagcacgccgaacacgatgcccagcgccagcgcgatgaccagcgcgagcaccgagatgccgacggtggtgccgaacgccatgaggatatcgggccagcgctcgaacagcgcctcccacttgtagggggcgaagatgtcaagcatgcgcctcgcctccctcttcctcgccggcaggcgtctcggtcgagagcccccaccgctcttgcagcgccgtcagcgtgccgtcgtcggccatagcgccgatggcggcgtccacctggtcggcaagctcggtgttcgacttcttcgtggccacgccgtactcctggggcgcgaactgcgcgtccagcagcatggtggagtcgtccacgtagccattcaggatggagcggtccaccgagaacgcgtccacgcggccggtgaccagcgcgatcttgatctccggatacgtcgagtactcggcgaagctcatgtggatgccgatctcgtcgccggcggcggtcagcttgtcgcgcgtcgtggccgacagcgccacgcccacggtctttccgtcgaggtctttgagatcgacgatacccgaggacttcttcaccagcacgccgatgtgatcggtgtagtacgggcgcgagaagttgtagctcttcttgcgcgcctcggtgatggtgaacgtggccagcgtggcatcgagcgtgccgttgtccagcatcgcgccgcgcgtggtgacgttcacgccggtcaccttgagcgcgtcggggctgcccttgatgcgcttcgccagctcgcgcgcgatgtccacttccatgccctcgatgttgcccgtctcgggattctggaagccgaagccgggcacgtcgatcttcgtgcccacgcgcagcacgtctgcgccgccggcgcaaccggcgaggccgcccgtcgccccgcccagcacgagtgtcgacgcaaccagcgccgaggagcgtatgaacgttcttctcgtgatcatggccgcgcctacaggatcttcgacaggaagctcttgacgcgagcgttgtcggtctcgtcgaacaagtaatggggcgtgccctggtctaccaccaggccgttctccatgaatacgaccttgtcggccgcctcgcgcgccagacccatctcgtgagtgaccatgacgatggtcatgttcgtctcggccagcgacttgatgacgtcgagcacctcctgcaccatctcgggatcgagcgcgctcgtgggctcgtccagcagcatgatcttgggatgcatgttgagggcgcgggcgatggccacgcgctgctgctgcccgccagagagctggtcggggtacttgtccaccttgtcggaaagccccacgcgctccagataggcgcgcccgtcgcgctcggcctgctcgcgcggcaccttcagcaccttgatgggcgccagcgtcacgttctcgagcacggtcttgtgcgggtagaggttgtagctctggaacaccatggccacgtcgcgagccagcgcacgggcgttcaccttgcggtccgacaggttcatgccttcgaccaccaccgtgcccgaatcgggcacctcaagaccgttgatgcaacggatgagcacgcttttgcccgagccggacggcccgatgacgacgactttctctccctcggccacatcgagcgaaacgcctttaagcgcctcgaccgcgccgaagttcttgcgaatgtccgtaaccgtgatcgcttgagccacgcttgacgcctcccgtaaaggttccaggccgcgatcttcgaggggcgccgcggtcgactgacagtgacaacatgcatcgttcagtctagcatgcgccccatcatcccagatggcaggaaggttacgggagcttgacgatagcggaatcggtcgcgttccatacgaaaccggtccgcgcctcctatcgaatcgcgggagcctcctcgtcctgcccgaccgccgccgggctctgcggcgcattcgcgtggtcgccgaagaaacgatactcggacgtgcggtaatagaaaagggtgaacgccatgacggacacggcggcaacagtggtgagcacgccgccctcgatgccgaaaccgcccccgttgagcaggtttccaaccgggtaggcgctcaccaggaacgcgggaacatccaagccgctcaccggcatgccgtacacgaccgactggaacaggttccaagcgatatggaaccctatgcacatccatacattgcccgacttgtagtacatgagggaaagggcgatcccaagcaatacgatgttgacgaccgagagcaaggtgacgttcggattggtgagatggatcaacccgaagatcagcgacggcacgacgatcaccaggaacctgctgttcgtcctccgcaaaaccgacatgatgaacccgcgattcatgacctcttcggcgatgcccaccgcaacgaacacgagcacccaggcgaaaagcgagagagaaaacggcgaattgaccccctcgactaccacgttgccggtggcgagcagcagcaggaagatggcgctgcacgccgcgaaacccagcgccatcccgacaacgccgtctttcttgaaccgggcgcgaaaatcacggaggccgaggtcttcccaacgatacctcatgatcctccacgcagccaaggggacggccagcatgatgccctccgtcaagaactgcagggcaacgggcagcaccgatgcgctcatccaatcgacgagcgcatcgtatgacgcagcatcgaggctggcggcatcaagaatcatgcgcaaagcatcgatgagcagggcggagaacgcatagccgagagcgtagaacgcggccatgcacagcgcgatgatccatccggatcgcaccatgccatgcttgttcttgaaaatcatcttcatgaccaaccttctttcttcgatagcgcgcgagcggcgccggcctagcgcgcgaacatgaggcgctcgctgtcgaacatgcactgcagcgcaagcacgccgacgccggcgtacgcgaggttggcgatcacgcagactgccacgttgaggggctggaaatcgaacgagaagatgccgatcatgcactgcaccgagttgtacagcggaacgaggtagtacgcaacctcggccttcgcgtcgccgaacatgccgaggacgcccacgagcatcaccacgatcatgagcggcgtcaggaacatggtggcctccttgaccgatttcgccagcgtggacaccacggtgatcagcgcgacgatgacgagcgtcgtcgacaggatgaccagcgccagcaacacgtattcgaccgggccgtacacgttgatgtcgaccgagccctgcatgatgccgggcagccccgagaagatgccgatggcgctggacgccgcgatgagcaggccgatgacggtgatggccagcaccttgcccagcgcgatatcgtgcctcttgatgggcgtggccaggagcgtggccatggtgccgcgctccttctcgcccgccaccgactcggccgcgatggacatgacgctgctgaacacgaggatgagcagcagaagcggcacgatggacaccacgagcatgcccgcgacgtcgcgctcctcggccacgtcgtagccggctccacccgcgttgacgtcgaagcggttcgacagcgacgactcgtaggagtccagcatcgcggcgaaggtcgagcgcgcttggctggaatcggggtcggtggagttgaagtagatctccacctgcggcgccggcacgcccgatgaggggtcgtacgccgccacggcttcgtcgaagccctccggaaacaccgcgaacgccttgacgtcgccttgctcgatgcgttcgcgcatctcatcggcgccgggcagcgaaggctcgtcccgcatgtcgacgatcgaatccgccgcaagcgctttcacgctttcgggcgcgttcaccacagccaccgccggaggcttgctcatatcgggcttgaacataccgcccatcgcatcgcccatgaacgtccacatgaggaagatgagcagacccggcagcacgatggacacgagcgccgaggccttgttgctgaagaagcgcgccagttccttgcgcgcgatg

SEQ ID NO: 9496 - DNA, 918 bp, Unknown
  gut microbiota DNA sequence
tcggaggcttgctcatatcggtcttgaacataccgcccatcgcatcgcccatgaacgtccacatgaggaagatgagcaggcccggcagcacgatggacacgagcgccgaggccttgttgctgaagaagcgcgccagttccttgcgcgcgatggtccacgcgttgcctttcacgatgcctccttcacgctcgccgcgtacaggtcgaagaacgcgtcttccaacgagcgctcccccgccacctccgacagcgttcccgaggccgccatgcgcccgtcgatgacaacgcccacgcggtcgcacaccttctccaccaggctgaagatgtgggtggacaagagcaccgtcctaccgtcggccgccagttccagcaagaagtcggtcaccgtcttggccgtgagcacgtccaggccgttcgtcggctcgtcgaagatgatgacgcgcggatcgtgcacgagcgagatggccagcgatgccttctgcttcatgccggtggacaggtcggccaccttcgtctgcgcgaagcggtcgatgccgaagcgcgcgaacagctggcgcttgcgctcgtcgcgcacgggcgcgtcgacatggtgcagctcggagaagaagtcgaacaggtagtcgggcgagaagacgtcttccagcttgagctcgctcgtgaggaagccgatgagactgcgcacgcccgcgggatcgtccacgacggagacgccctcgatcagcgcgtcgccctcgtcaggcttcacgagcgcggccaacatgcgcagcgtcgtggtcttgccggcgccgttcgggccgagcagcccgtatatctcgcccggcgccacgtcgaacgacaagccgtccaccgcggtcttcacgcgcgcgtcggtgcgttcgagcttgcgctgcttggccgagagcttgaaagacttccgcag

SEQ ID NO: 9497 - DNA, 444 bp, Unknown
  gut microbiota DNA sequence
ccgacaccgcttcctgcacgtcgggcttctgcaccgccttgaaggcgaacgagttctcggccgggaactcgatgatcaacgtgtccttgcccgcgtcgtacaccgctttcgtgttgagaaacagcacgccgtaagcagccttgttcttcttgagcgtcgccagcaccgcctgccacacgcgctgcaaggcggccggattctgcaggctggccttgagctggtcagagggggccgcggcagacggagcctgagattgcatcacgggcgatgcgggtcgaggagccgaaacgccctccgccccttgcggcaggacgccgcccgcctcgcgcgacggcgccgcaacctgcgaagccgcgacgggttgcaccggcgcggcaggcgtcgccccagcgcgttcggccgacgatgcgcgatcgggaccaggagcggaagcgggagccgcgg

SEQ ID NO: 9498 - DNA, 217 bp, Unknown
  gut microbiota DNA sequence
ggcaaacgacaacggcaaggtggccgtttatcggggggttcccggctcggtgctggggctgtcgttctcgcacctggaacgcaccaccgacgtgacggtggccgatctgcaaccaggcgtggctaaccggctgaacgagggcattcgcgtggacgacatggaagcggccgatgctctcgtgaaggagtacgaggacgagatcgccgcacgctccaag

SEQ ID NO: 9499 - DNA, 398 bp, Unknown
  gut microbiota DNA sequence
accttacggatgttcttcattctgcctgctccttcaaattcgcgatccaaagcagcgtctcttccagcacggtcgccttcaactcgtagaagatgtacttgccctcgcggtagtcgcgcacgaggccggcgttcttgagcaccgaaaggtgccgcgacacagcgggtgcggagatgtcgaacaagtcggcgatgtcgccggccggcatgcgttcgtgcttgaggtgctcgaggatatccctcctcactgggtcggacagcgctttcaacgtctcctggatgcccatcgtccttctccgcaacatttaacaatatggttaaatatagcgctttgcagctggaagggcaagcggggagcggggcgtgtcggttgctgggctcaaaacggcgcccatgaca

SEQ ID NO: 9500 - DNA, 240 bp, Unknown
  gut microbiota DNA sequence
ccatgcatatggtaaggtaagttggtatcaaccattcttagacaccgtcacatcgatcggagcgaagcatagtaccggcaagaacattcagcccttcacggcttcaaccgatgatgtttgcctgggcgttcgtcatcgcgttcacctgtacggtcgcaacgaccacgcatcccggatcctcgcgggctttcgccgacgagttcgccacgttcggcaagcgcgtcgtgaccgtcgcctact

SEQ ID NO: 9501 - DNA, 932 bp, Unknown
  gut microbiota DNA sequence
caccggcaagaacattcagcccttctcggcttcaaccgatgatgtttgcctgggcgttcgtcatcgcgttcacctgtacggtcgcaacgaccacgtatcccggatcctcgcgggctttcgccgacgagttcgccacgttcggcaagcgcgtcgtgaccgtcgcctacttcgaagacggcgactatatgtccaccgacgaagaagggcgctacgttgggtacaacatcgagtatctcaacgaaatcgcacgctacgccgactggacatacgaatacgtcaagtaccctagttgggaagaggcctgtgccgcgcttgaagcgagcaaggtggatctgcttcccatggtgtactacaccgaagaccgagagaggcggatgatcttctcggcatcatcgctctgcgagatttccaccacgctcaacgtgaggctcgacgacacgcgttacgcctacgaggacttcaaaacgttttccggcatgcgcgtgggcgtgatcgcgaacagccaggacgccgaagcattcgcacaatacagcgagaagaacggcttttcggcggatatcgtggcctacagcgctaccggagacctgctgagagcgctcgacgaaggagcggtggatgccattgccatcacatatctcgggacgaattcgcgcttccgaaccgtagctcagttcgcccccgagcctttgtacatcgccctctcgcccgaacgcaccgacatagccgatgagctcgacagcgcgatgagccgcctcaagctgcgcgaccccgacttcgccacgttgctgtacgaccgctacttcagcatcaacaccgaccaggatcccgtcttcaccgaagacgagtacgcctatctggcgtcggctcccaccctgcgcgtggcctacgattcgtatcgcgcgccgctttcctacaccgaccccgaaaccggc

SEQ ID NO: 9502 - DNA, 217 bp, Unknown
  gut microbiota DNA sequence
ggtaatcgcgaacagccaggacgccgaagcgttcgcacaatacagcgagaagaacggcttttcggcggatatcgtggcctacagcgttaccggagacctgctgaaagcgctcgacgaaggagcggtggatgccattgccatcacgtatctcgggacgaattcgcgcttccgaaccgtagctcagttcgcccccgagcctttgtacatcgccctctcg

SEQ ID NO: 9503 - DNA, 787 bp, Unknown
  gut microbiota DNA sequence
actgcgcgaccccgacttcgccacgttgctgtacgaccgctacttcggcatcaacaccgaccaggatcccgtcttcaccgaagacgagtacgcctatctggcatcggctcccaccctgcgcgtggcctacgattcgtatcgcgcgccgctttcctacaccgaccccgaaaccggcgcgttcgccggcgcggtcgcattgctgttcgaagacatcgcgcagatcaccgggctgaagttcgaattcgtggctgcggactgccacgacgaggccgtccgcctcgtcgaacgtggcgacgccgacatcgtgtacgacgtcgatcgagaatccgacccccaggcgatcaaaagcctcgacaccaccggcctctatctgcgcgaccccatggcccttgtcgcaggaccgaatccttccggttcgcgcgtcgcgctgccaagcggcttctcgctcgccgcgagcacggcgtactcttcgtacgccgaatacgacatcgtgtactgcgacaccccgaaagattgcttcgatgcagtgcttgaaggcaaagccgatatcgcctttgccgatacccacgtggcgaactacttgctggcggaaccccaatacgagagcctgagcgtcaccaccatcacctccttcttcaacagcatgagcatcggcgtgagccgcaacgccgaccgacgactggtgagcatcctcgaccgctgcgtgcagtacaccgccgaaagcaagatgaccacctggctttcgcaaagcagcctcgccgtacatcccatcagccctttcgacttc

SEQ ID NO: 9504 - DNA, 642 bp, Unknown
  gut microbiota DNA sequence
aagccgcaacgccgaccgacgactggtgagcatcctcgaccgctgcgtgcagtacactgccgaaagcaagatgaccacctggctttcgcaaagcagcctcgccgtacatcccatcagccctttcgacttcttgcgccagtatccggtgcaattcatggccggcatcgtcgcactgctcggctccgtgctcggcgttgccctgtacgtcagccatgtgaagcttcgcgcggcgcggcgagtggaggacttctcgttcaccgatccgctgaccgaaggctggagtctcgcccgcttccgctccgaggtgggcgctcagatggcgaacgcccgcgatggcgcttacgccatcgtgtacctcgacgtaaagagctttaaaggcttcaacgcagcattcggctacgccacgggcgatcgcgtgctgctcgacctcaacggcacgctggccggcatgaaagcagccgacgaacgatacgcgcacgtcatcgcagacgaattcgtgctgttggttcgctggagaggctgggacgcgctgctggagcgcttcgatgaactggatcgtcgcttcaacaacaccgaaacgcttaccgagctatcgcaccggctcatgctgcaggccggcgtctgcatcatcgagcgcagcgc

SEQ ID NO: 9505 - DNA, 8895 bp, Unknown
  gut microbiota DNA sequence
acttcgatgaactggaccgtcgcttcaacagcaccgaaacgcttaccgagctatcgcaccggctcatgctgcaggccggcgtctgcatcatcgagcgcagcgccgaaacgccgcgcatcgacgtgcaaaccatcatcgagttcgtggacgccgcacgctacgcccgggacagcattggggaggcctcgcgcagcaccgcagcattatactcggcgagcatgaaggatcgcgacatcgccgaacgcgcgctggtggccgccgcgcacgacgcgctcgagcgcggggagttcacggcctattaccagccgaaggtggaaatagcgacgaaccgcctcgtgggcttcgaagcgctcgttcgctgggaatcgcctgaacgcggcctcgtgccgcccgacgagttcattcccctgttcgagcgcaccggcctggttgtcgacttggacttgcaggtatttcgtctcgtctgcgcccgtatccgggagcagctggacgcgggagaacacccgctcgtcatcgcctgcaacttctcgcgcttgcacatgcgaaacgacgcgttccctgaaacggtgaagagcatcgtcgacggattcggcgtgcccatcgagctgctggagctcgaactgaccgagaacatcgtcatggaagacctcgaacgcgccgaacggctgtgccgccgtttaaaggatctgggcttccgcatcgccattgacgacttcggcagcgggtactcgtcgctgggcacgctgcagaacctgccgatcgacgtgctgaagctcgaccgcagcttcctcatgagcagcgagagcggcgagcgctgcaaggccatcctggacggcgtggtgtccatcgccgacaagctggccgtgaacgtggtggtggaaggcgtggaaacgcgcgatcaggcgtccatgctcgtgcgcatggacgatcgcatcatcgcgcaggggttcctctactcgcgccccgtcccccgggacgtctcggacgcgcagttcgccgtcggcttcatcgagccgaacgaacgcccgtagcggccacgcggttgccggaacgagaaacgggggcggccgttcacgcggccgcccccgtcgtcgttacgctttttcagatgcgtagaataccgcttggtcgaacacgtcggtcaccgacttgccgtcgatgaaggggagcgtcaagaactcgctcaccgtcggcaccagctcgctcgcgtcgacgtaatgtcccttttcgttgagcttcgcggtgtcctgcgcgcgccagtatcgatcgttgacgtcggtcaggtagtacgtctcgctgccgatctccatgtacacggagtgcttcgcgtgcaggtagttcggcagctcgtcgaaggatacgtcgagcgcctccgctgctttcgttcccataacggcccctttcgtccgaaaaacaccttggcgctatcatagcaagaactgtcagcggtttcatcggaaatgggagaatcggtcagccggttttgccggagaagaagccttctgcggacgcaccgccccgccaagccgcaccttttcaccacgagcatgctgcaggatcgctagttctgccgcacgagcttccgcatcgagccgatgggggcgaacgtcaggatggctccgaccacgcacagcaagaacacgacagccgccgtgaacgccgacgcgcccgacacgttcacgcccacgccgatgagcgcccacaggaacacgagctggaacgccatgtcgtcgtaggccttgcgcatcacgtaaccgaacgccagcacgcccgccgtcaagaggatggtgaacaacccgttgaagaacgggatgccgccgtccagcgcgcgcgtgacgaggatggccatgttggccagcgtggccaccgtgacccacgcggtgtagatggacacgggcacccgtcccgaggcggtcttcatcgtgcggcgcacgttcaggtacagcgccgccagcaccagccactcggccaggatgacgatgaacgacacggccaccagctcgaagtgccacagggcaagccacagcacgttgagggcgcagcttgcgatgaacaggatggacgtcatggtgaagcggtcggcgcggacaggcgccgtgcgcgtgtacgcgacgagccacacgaccatcgccacgtagatgagcgaccagatggcgaacacgtagccggcgggcgtgaaccacgtgaacacgccgtacgcgatatccgccgacgtggtgcctcccacccggcctccttcgatgacggcattgccgatgagggtcagagcgtacacgatccacatggtgacggtctcgacggtcaggtaaccgccgcgctcgagcttgcggccggtgcgcgtgttgcgggcacgctgcacgacgctgggcgccgatgcggcgcgatacgcatgattgggcatgatgcacctcgctttctgaaagaaggatgattccgttccttttcgtcagggtgcaacccagtgtagcgccggcgcatgcacgcgccttgacggctacttagcagtactttatcgctttagcgcagatcagaagcctatcgctcaacgttgatacgcatgcgcagaaagtcgccgggagccagctcctcccccgtttcgaacgcatagcgctcggccgagcggttcgccacggcaaccggcacccgctttggctgcgcgtcgtccccgtcgggctcggggagccaggcgaggttacgcacgcgcacgcgagggacgtgcggacccggcgacagcgcctccagctcgtcgccttcgcagaagcggttgtagcaccgcgcgatcacgcggaacgcgccttcgccggccggttcgcacgcttccaccgtggcggcatgccggcattcggcggtgtagccgtccacgtcgggcgactgcctggcgtcgccgtagtagaagcccgtgccgtacgggcgatgcgacacggccagcagctcgtcggccagctcggaggagggaacgccgtccagggccagccggtaagcgcgcaccaccgaagccacgtagaacgccttcttgttgcggccttcgatcttgaacgagtcgatgccggccgcggccaagtcgtcgaggtgcgccagcatgttgaggtcctgcgcgttcatgacataggttccgcgcacgtcctcctccacgggaaagaactcgccgggacgctgctcctccaccagcgcgtagctccaccggcacggctgggtgcaatggcccttgttgccggagcggccggtgagcgcggcgctgatcaggcagcggcccgacacggccatgcacatggcgccgtgcacgaacgcctccagctccagctcgcgcggggcgccggcgcgcagtcgcgcgatgtcctccacgctcatctcccgcgcgcacaccacgcggctcgcgcccagctcgtgccatacgcgcgccgcctcggcgttgcacaccgaggcctgggtactcacgtgcagctcgacgttcggcgcgtaccgctgagccaggcgcagcgcgcccaggtcgctcacgatgaacgcgtcgacgccggccgcggcaagcgcttcgaggtacgcgggaagcgccttgaggtcgtcggcgtccatgagggcgttcagcgtcacgtacgccttcgcgcccgcatcgtgcacgagagctgccgcagcgggaacgtcgtccagcgcgaagttcgccgcgcgctgccgcagcccgaaccgatcggcggccaggtacacggcgtccgcaccgaagcgcagcgcggcctccagctgcgcaagcccgcccgcgggcgcgaggagctcgggagtccttgtcgattgagttcgcatgcgccgtattgtagcgcatcggcgaacccgcgagccggcgaccaccgaaacccctcgcttcgggcgggacaacgcccctacctggcaatcctccgcatctccgagccctgcggcacattcccgagtctttcgcaccctatcgcattcccatcctggacatgagcgcgcaagggaaccccgacggcgagcgattgcacgttccgcaggcgctatgtgcagcagaatcgggtttttggcagtgcgaacccgcttcgcactgttgatttgcgaatgccgaaaaaacgcgatctggggtttcacctcgaaacgattcggagaaagacgcttctcctgccaaaaactcgattttgctgcacatagggaagagaatccgtgcacgacgacgaagggcggccaacgcggccgcccttcgagaatgttccactcgggataacgctcgccttacccctcgtaggtcacgcgcgcaccctgcggggtgtcctcgatcacgaagcccaaaccgcacaggccgtcgcggacggcgtcggcacggctccaatccttcgcggcgcgggcgtcggcacgggccgccagcagggcgtccacggcctcggcggcatccgcgccttcgtagcccgcgatatcggccgccaaccctacgacctcgggcgggtaccctcctgcggcgcacgaggcggatgcggcctccacgtcgatgccgaacacgcccatgagctccacgatgacgccgcgggcatcgcgcacgggcggcacgtcggacagcgagatggtcttgtcggccgtctgcgcgttcaccgcggccacgaagtcgaacacctcgcccagcgccttgcaggtgttgaagtcgtcgtccatggccaggatgaacgccagcttcgcctccttcgtacgcttcatcagctcgcgcgtgtccagcggcgagggaatgtcctgggcgttctgcagctgccaatcgaggttcttcaccgcgttctcgatacggcacagcgccgcgcccgcctcggccaggcgctcgtcggagaagtcgagcgggctgcggtagtgcgtctgcagcataaggaagcgcagcaccttcggatcggtgaccttcagcacgtcgcgcagcagcttgaagttgcccagcgacttgctcatcttctcggagttgatctgcagcatgccgccgtgcatccagtagttcgcgaacgtgcagccgcacgcggcctcgctctgcgcgcgctcgttctcgtggtgcgggaacacgaggtcggcgccgcccccgtggatgtcgaagggcagccccaggtacttgcgcgacatggccgagcactcgatgtgccagccgggacggcccatgccccagggagactcccaagccggctcgccgggcttggcggccttccacagcgcgaagtccagcggatcgcgcttgcgatcctccactcccttgccgtcggcgcgcagctcgcggtggccgctctccatctcgtccacgttgcggcccgacagctcgccgtaagccgggaacgaacgcacgttgaagtacacgtcgccgtcggcatcgtaagcgtggcctccgtcgatgagctcttggatgagctctatcattgcggggatctcctcggtggccttcgggcggatgtcgggatccagcacgccggccgcgcgcatgtcctcgatgaacgcctcggtgtactcggcggccacctcggcagcgctgcggccttcctcaagtgacttgccgatgatcttgtcgtccacgtcggtgacgttctgcacgaacgtcacgtcgaagccgcgccacataaggtaacggcggatcacgtcgaagctgatgaacgtgcgggcgttgccgatgtgaatgtagttgtacacggtaggtccgcacacgtacatgcccaccttgccgcgctcgagcgtctcgaagtcgaccttcgtgcgggtcttcgtattgtagagtctgatcatggcgtcctcgcatcctgccttgcccttgcgccgcgctcgcgcgacgatgagtttcgaccgtaaattgtagcacaggaaggttacggagcccgcctgtccaccaaagtcagcgagggctttcgtagcgtttcggattggcgtgaaaggccgacgaagcgtgcgcatgcacgcgaggagggcttggagcgccaagccgaggcgctaccaaagcccgcagcgtcggctagttccgctgttcgtcagaacggcggaacaatatgcagacggcggtcgccgagatgccctcctcgcggccttcgaaccccaggtgctcggtggtggtggccttcacgcccacgttctccaccgcgatgcccatggcggcggccagattctcgcgcatcgcctcgcggtacggcgagagcttcggcgcctgcgcggcgatgacggagtcgacgtcgaggatatcgtagccctccgcgcgcaccttgtcggccacggcggccagcagcttcagcgaatcggcgtccttgtaggccggatcggtgtcggggaacagcttgccgatgtccccgccgcggatgcctcccaacagcgcatcggagatagcatgcgccagcacgtcggcatcggaatgccccaagaggccgcgcacatgagggatgtccaccccgcccaagataagcttgcgcccctcggcgaacgcatgcacatcgtacccctgcccaacacgcaacccggcaggatcgaaaacaacaggttgcatcattcggttcctccgataacgacatgcgcggccttgacgacggtgcccaccaagcgagttccgcacgagccgaaacgcccagcgggcgtttcgtgcgagcaggactgtctgagcgactgggcactgtcgccaaggcctccgcggatgatcattcttccgcccccttcatgtacatggtacgcaccgcagcggccagcatgaggtagtcttcggggacggtcagcttgatgttgtcgcgcttcccttccactaccagcacgcgcccgcccaacctctcgatgagcgacgaatcgtcggtgcccatgaagccgtccgacagcgccgaggcgtgcgcgcggcggtagatgccggcgcggaacacctggggcgtctgcgcgttccagaacacgcggcggtcgggcgtgcccacgatcacgccgttctccaccactttcagggtgtcgacggccggatgcgccaccacggcgccgtcgcagtcgatgttgcccttcaacgtggcgatggtatgcgcgatgaggtcggggctgatgagcgggcgggcgccgtcgtgcaggatgacgtactcgtagtcgtccggcacgaactccagccccgagaacgccgattcctggcggctggggcccgacggcgccaccacgatgggcgtgacgaacgggaacgggtcgatggcgcgcttgaggtactcgctgcagcggtcctcgggacacacgatgacgatgagcccgatgtcgcccacggcgtcgaacgcctcggccgaccaggtgaggatgggcttgcccgcgatctccacgagctgcttgccgccttccttgccgaaccgctcccccgtgccgcccgccaggatgatggcggccgtctgcgggttcttgtcgacctcgcccttgagccctcccatcgcctgcgacagcgcgtcgaagtcgaggtcgttcagcgcgagctcaggggcgctgagcaccgcggacgagaacaccgggtcgattgtctgcgtcataaggttttcctctccgccttgcatcgttcttgccaccgctccatttccctcgcttgccgatcgaagcgcctagtcacgctcgcccggctggcgcacggtgatctcctgcgccttcagcgacacgcgggaattggggggaaccgaagaggtgacgaacgtggatcctgcgacgaccgaaccggcgcccaccacggtttccccgcccagaaccgaagcgttggaatagatcgtcacgttgtcctcgatcgtgggatggcgcttcaccccggcaagccgctgcccgccgcgcgtggacagcgcgcccagcgtgacgccctggtacagcttcacatggtcgccgatgacggtggtctcgccgatgaccacgcccgtgccgtggtcgatgaagaagtactcgccgatctgggcgccggcgccgatgtcgatgcccgtgccgctgtgcgccagctcggtcatgatgcgcgggatgatgggcacgttctgctcgtacagcacgtgcgcgatgcggtacacgtagatcgcgtacagacccggatacgagaagatgacctcctccttcgacccggccgccggatcgccgtcgtacagcgcctgcacgtcggtgagcagcacccgctggatgctgggaagctcgtcgaagaacaccgtgcacacttccgaggcgcgctcgcagatatgctcgggcgtggtgccgccgcacaggtagcgcgccgggtcgacctccgcagcatcgcgatcgtccgaggtgtacgtcatggcgagcacgatctgctcgcgcagcacgcgttcgatctgtatgagcgtctcgccgatgaagtactccggactggtgaacggcgtcagcatctcgtcgccgaaatagcccgggaacagcacccgacgcaagtccttgatcacgcttttcacggccaggcggctgggaaaccgccggccgggcttcgtgaagaatatctcgtcggcctcgtagttcttctcgatgcttttcacgatgcgatcgaggttgtctccgaacatggaacctcctggaatcgagttgatccgctgcacttcccgcagtgcacctcggccgccttgcacgtgaaagcggccgctccgcggtcggcttgcgacgtgcctagtatacgacaaatgcaagcgcagaacacaagaaacccctgctcctcgggcttcgaatttcaagccgaggagcaggggcgcttaagaggcgaagcttagtcggccgcgccgcccgagaacgagccgccggaactgacgccggcatggcccagatcgtaattcgtcagcaacagctccgcttcccgcgcgatgctgtcacgcttgcggggcgccgggatggagcccgatccgacggtgaacaccagctcgccgtccaccgcgtccacgtcgatgaccgagccgctcgtccacgtgccttcgagga

SEQ ID NO: 9506 - DNA, 955 bp, Unknown
  gut microbiota DNA sequence
gttcgtcagcaacagctccgcttcccgcgcgatgctgtcgcgcttgcggggcgccgggatggagcccgatccggcggtgaacaccagctcgccgtccaccgcgtccacgtcgatgaccgagccgctcgtccacgtgccttcgaggatctgctcggacagcggatcctccagcaagcgctggatggcgcggcgcagcggacgcgcgccgaacgtggcgtccgtgccttccttggcgatgagcttgcacgccgcctcggtgaggttgatggacatgttctgctcgatcatgcgctcgcgcaaatcggccaccatgagcttgacgatctcggaaatctgctcgtcgttcagggacttgaacacgatgatctcgtcgatgcggttcaggaactcgggcctgaacagcttcttcatctcggccatgacgcggctcttgatctccttgtcggacagccccgcgtgctcctcggtggagaagcccagcgtggtgggctgcgcgatctcgcgggcgcccacgttcgacgtcatgatgatgacggcgttgcggaagtccacggtgcggccctgcgcgtcggtcaagcggccctcctccaagatctggagcaggatgttgaacacgtcggggtgcgccttctcgatctcatcgaacagcaccaccgagtaggggcgctggcgcacggccttcgtcagctggccgccctcgtcgaagcccacgtagcccggaggcgagcccacgagacggctcacgctgtgcttctccatgtactcagacatgtcgaaggacagaagcgcgtcctcggagttgaacaggaactcggcaagcgccttcgaaagctcggtcttgcccacgcccgagggacccaagaagatgaacgaacccgcggggcgcttcgggtctttcaggccgctgcgcgagcggcggatggccttcgacagcgccgtgacggcctcttcctga

SEQ ID NO: 9507 - DNA, 2135 bp, Unknown
  gut microbiota DNA sequence
gcccaggaagatgaacgagccggcgggacgcttcgggtctttcaggccgctgcgcgagcggcggatggccttcgacagcgccgtgacggcctcttcctgaccgacgacgcgctcgtgcagcacggcttccatgcgcagcagcttctcggtctcggcctcggtgaggttcgaaacgggcacgcccgtggtcatggacaccacgtcggcgatgtcctccaccgtcacctgatgcacggacttctgggcgtcctcttcccacttcttctcggcttcgatgcgcttggccttgagctcggactcctggtcgcgcagctgagcggcgcgctcgaaatcttgggaagcgatggccgaatccttttcgccgcgaatagtgcgcagctcgtcgtcgagctcgcgcagctccttcggcagcgtcatgttgcggatgcgcatgcgcgctcccgcctcgtccagcacgtcgatggccttgtcgggcagaaagcgatcctggatgtagcggttcgataggttcacggccgcctgcagcgcctcgtcggtgaagtgcacctgatgatgcgcctcgtagcggtcgcgcagaccctccatgatgcgcatggcctgctcctcgttcggctcgcccacggtgatgggctggaagcgccgctcgagcgcggagtccttctcgagatgcttgcggtactcgtcgatggtggtggcgccgatcacctggatctcgccgcgggacagcggaggcttcaagatggcggcggcgtcaatggaaccctcggccgaacccgcgccgatgagcgtgtgcatctcgtcgatgaacaggatgatatcgcccacgtccatcacctccttgatgcacttcttcaggcgctcctcgaactcgccgcggtacttcgacccggccacgagcgcgctcacgtcgagcgtgaacaggcgcttgccgcgcaggatgtcgggtacctggttcgacacgatgagctgcgccaggccctcggccacggcggtcttgcccacgcccggctcgccgatgagcagcgggttgttcttctggcgtcggctgagcacctgcatgacgcgctcgatctcgccggcgcggccgataaccgggtccagcttgccgtcgcgcgccttctgcgtgaggtcggtgccgaactccttcagcacgctgtcggacgtgttgccgttcggatcgaacgggttgcgcccggcgtagacggggctctgccccaccaggtcgttcagcgcgctgcgcacgtcgtcgcccgacacgccgagacgcgtgagcacttcgagcgcggtgccgtcgccctcgcggacgatgcccagcagcagatgctcggtggagatgtacgattgccccatttgcatggcctcgcgcaggctgttctccagcacgcgcttgacgcggggcgtgaaggacagatgccccgacacgtcggtgtcctcgtcgatggccaccacctggcggatgacctgcacgacggcatcgtacttcacgttgagacgatcgagggcctgggcggccagaccgtccttctcctgtatgaggccgagcaggatgtgctcggtgcccacgtagggctgatgaagcgagcgagcctcgtcctgagccaggacgagcaccttgcgcgctttgtcggtgaatttctcgaatgacatgctagcctctattctcgcagagtctatcgtatggttccgtgccatcttagcactcttgtattgagagtgccaataccgcatatgaccgcacacggctgctccacaagcgccgacggacggcccgctatccatcctaccatgtccgccgcccgcatgagcccctgccccactatgcctccaaacgtgctcgcttctgacaaagacccgaaacgtgcgtgggcgattgaaagctcggaaacgcgtgcaagcgcgacgacgtgcggcgcagcgcaggcctccgaaccgcggaaaggccgcttgcgcggcatatgcgcaagcggcctttcggaagcgattatgcggcggcgctttagtacagcttggcgccggcggggatgtggtcgtcaaccatcaggaggttcaggcgctcttcgccctcctcctcatggatggccgacagcagcatgccgcacgattccacgcccatcatcttgcgcggcggcaggttc

SEQ ID NO: 9508 - DNA, 2004 bp, Unknown
  gut microbiota DNA sequence
cggtcgtcaaccatcaggaggttcaggcgctcttcgccttcctcctcatggatggccgacagcagcatgccgcacgattccacgcccatcatcttgcgcggcggcaggttcgtgatggcgatgagcgtgcggcccaccagctcttccggctcgtaataggcgtggatgccggacaggatgacgcgatcggagcccgtgccgtcgtcgagcgtgaactgcagcagcttcttgctcttgggaacggcaacgcactccttcaccttcacggcacgaaaatcggacttgctgaacgtgtcgaagtcgacctcgtcctggaacaggggctcgacgaccaccttcgagaagtcgatgggcgcctcggcaactgcgggagccgcagcggcaggcgcggcagcgcgcggacgcccgccggccggagcctcgtccctcatgtgggggaacagcagcacgtcgcggatggacggggcgtcggtgagcagcatgaccagacggtcgatgccgatgccgcagccgcccgccgggggcatgccgtactcgagggcgcgcacgtagtcgtcgtcgtagcccatggcctcgtcgtcgccgaggtccttcgcctccacctgcgcgcggaagcgctcggcctggtcgaccggatcgttcagctcgccgaaggcgttggcgtactcgtggccgcagatgaacagctcgaagcgctctgtcaggttcggatcgcccgccagcttcttggccagcggcgacacctcgatgggatgctcggtgacgaaggtgggctggatgagcttctcctcggccacggcctcgaagatctcggcgatgagcttgcccttgccccatgcagcttcggcgtggccgccgttgcgctcgaggatatccaccagctcgtcgcgcgtgcgctggaagctgacatcctcgccggctccttcgctggccagctcgatcatggtggcgcggcgccacgatccgctgagatccacctgatggccctgatactccacctgcagcgtgccgcacgaggcaagcgccgccgcctggatgacgccctgcgtgagctccatcatgccttcgaggtcgctgaacgcctggtagaactccatggtggtgaactcggggttatgatacggatccatgccctcgttgcggaactggcgcccgatctcgaagaccttctcgaagccgcccaccagcaagcgcttgagatgcagctcggtggcgatgcgcaggtagaagtccttgtccagcgcgttgtggtgcgtgacgaagggacgcgcgttcgcgccgccgaggatggggtgcaggatgggcgtctccacctcgtagtagccgtgatcctccatgtagcggcggatggcggaaaccaccttgaagcgcttctcgaacgtgtcgcgcacctcgcggttcatgacgaggtcgacatagcgctggcgatagcgcgtctccttgtcggccaaaccgtggaacttctccggcagggggcgcagcgacttgctgagcagctcgaacgatgccacggacacggacagctgcccgcgcttcgtgcgcatcatcgtgccctcgacgccgatccagtcgcccacgtccaggtccttgagctcggcgaacgcgtcctcgcccagcgcgttgatgcggcagaacagctgcatgtcgcccgtggagtcgcgcagctcgaggaaagccagcttgccctgatcgcgcttcgccatgacgcggccggcgaccttcacctcgtcctcggtggacgcgccgtcctcgaggtcggcgtactgttcggccaggtcggccaggtggtgcgagtacgcgaacgcatggccgtacgggtccttgcccgctgccatcagcgcctcgcgcttagcgcggcgcacggcgatggggtcgtcttcgatgatctgctcggtggtgtcgatggtatcgctcattgattgtcctcgaaatcacgggttggcgtagtaagtcagcgagaggcgccctggtgcccgagatcgtggggagggcgagggcgaagcg

SEQ ID NO: 9509 - DNA, 1846 bp, Unknown
  gut microbiota DNA sequence
gcgccgttcgcagaacggcgcaactcactagtgttccagcttgagaatggtcatggtgatcttgcggccggtgggacccgtggtctccaccacgtcgcccttcttgtggcccagcagcaccgaacccaccggggactcgttggagatcttgccggcggcggcatcgctctcggcgccgcccacgatagtgaacacgcgctcgcgcccacccatgtcgaccgtcaccgtcgagccgatgtgcacgctgttcgagcgcttcggggtgttgaccaccgtcgcctcggacaggatgcggctgatctcggcaatacgcgcctccatcatgccctgctcgttcttggcgtcgtcgtactcggagttctccgagatgtcgccgaactcgcgcgccaccttgatgcgctcgccgatctcggcgcgtttctcggtttccaggaagtggagttcttcctcgagcttgtccttgccttcttgcgtgagaatgaaattgccgtctgccatgaatgctcacctgtccatttacaaaaacatgcacgctcgtccgcaagcgtgctaccggtacctgatatgaaaaaagcggtatgtgcagagcgccgagcgactgcacataccgcgaaccagacgaatgtaaaactactcggctttcttcttagccgcggtggtggtcttcttggccgcggtcgtcttcttgacgggctcctcgacctcttcgatcacttcttcctcgtcatcggcctcgacgatgttcttatcgccgccgcccatgccttcgcgcaggttcttgacggtcttgccgatggcgccgccgagcttcgggaggttcttcggcccgaagatgagcaggattaccgcgagaatgatgagaagctcaggcattcccattcccaggattttcatacgttcctccaaattgctcgtgcgaagcgcttctgcgacctcgctccccctgacgcagccagggtcacatgcctatgcaaaaaagggatgttccccatcccctttagcaaccaaataactgctttcgcagcgacggttatgatagcacaatgttacagaaggtaaaagaaaatgcagcgataatcccctttccacgccttctccactgatatgccccgccccgccttcgccatggcgagaagcctttgccgtagagcacagccaaccggacgagacgcggtcatcaaccaattgaatccattttgaaccccgttttgaaaccgctattcggtcggagaccaccgaccctatgcagaaatcttgagtatcgaggccctacttcgcagagaacagccccgaaagatagctataactaccgggcattttatcaatcggcttgcttccgatgagctctacgctttcggcattgtattggtatatcgcccaatctccgagcacgtatatcgacccttcagtcacaaccatttgcatcgcttcgtgctcgaaagcatgctcttcgatagcccccgtctctagatccacgatgctcagcgcgctatcgtcttgaccttgaacgacattgtagtgggcaatgtaaagcttgccgtccgcgatagccacgcttgaaggaccgcccttgctcaatggaatgaagctcaacgtgttgcctccggtgtcgagtacgccaatctgtctttccacaaggccaacgctgcagaaatagattttgccttcatgcacaaccgcccggtaggcgtccgcaaccctataggcgttcgaatcataggtgctgcaatcgattgattctttgagggccaagtcttcgtcgtagcaataaatcatcgaagagtcgtcatcgagagacaatgcgaaagcatacagactgtcttcgcaccaaacgattttcgataca

SEQ ID NO: 9510 - DNA, 1672 bp, Unknown
  gut microbiota DNA sequence
gtgttttggatgcaagggaagctacatcgacctgaaggacggcctcgccgtctctaaccttagaccttccttggggaataacaaaaagactgccctggtaaaccaggggattgtgaaaaacgtcacccaagttcgcatagcgcagcgaaagctgcgccacctcgttcaactccccatcgtagaagacgatcctgctcgtttcatccgtccctcgcgtttcgatgatgccgatagaggcgtcgacgggcgcaacccgctcgccatccgaagcgcaaccatacaagccgatcaccgtgaagagcatcgcgccgattagaaagggtaccgaaactcgtttcatagctaatccttcgatcgcaggcatcagggcaacttctggagacccgaaaaacccgatcggatgaatgatcgaccctaagaataacacgagccgagaacaaaacctgtatgtttgggtatcgacgggagccaaagacaacgttggtcagaagagctcaagcgaagcgccgaaggcgtgctgaccgtgcgatgcgaagtgagggttttctgcccggagccgtttatgttccgattgaacccacacgggaaaagaaaaaggtcagccgcgaacggctgacctgcaatttctggtcgggttgacaggatttgaacctgcggcctctgcgtcccgaacgcagcgctctaccaagctgagccacaacccgatgtactgcttcaagcagcgacggatatgatagcacaatgtaatcgaaggtaaaagaaattgcgacaatatttctttttccacgccttcttcaccggtgctgtaggaagtatttgcatgcattgggaaactgaccgttcttgcgaggcgcggcgacttgtaagcgatcgggcggcgcagcttattcggtgcgcaaagcctcgatggggttcttgcgggacgcccggtaggcggggaagatgccgaacaccaggccgatggccgtagctgctgcaacggcaaccgccaccacgccccacgacaccacgaacgccagccccacggtgcccatgagcagtcccagcgcgatgcccgccgcgatgcccagaacgcctccgatgatgctgagcacgagggcttcgagcagaaactgcacgaggatgtcgaagcggcgcgcgcccagagctttcttgatgccgatttcgcgggtgcgctcggtcaccgacaccagcatcacgttcatcacgccgatgcccgcaaccacaagcgatatgcccgcgatgcccgccaacagcaaagtcatggtgccgtcgatctcgttgccggcccgcagcatctcgtcctgggagatgatgtcgaaacgtccggggggaatatgcaccgtgcccgtgaggtacgagcctatctcccctttcgccgcctcgatggcgtcctcgccgcgcgctttcgcgtagaaagaagtgatcgtgccgccctcccccatgctcacggcagtagagaagggaacgagagcaacgttgcccgtattgagccccatcgactggccctggttctgcagcacgccgaccacggtgaactcatcgccgtcgagcttgacggtacggccgaccgcgccgtcggccgagccaagcagcgtcctcgccacatcggagcccagcacgatgaccttgctacgattctcccggtcgacagcgctcaagttgcggcctt

SEQ ID NO: 9511 - DNA, 924 bp, Unknown
  gut microbiota DNA sequence
ggtgatcgtgccgctctcccccatgctcacggcagtggagaagggaacgagcgccacgttgcccgtgttgaggcccatcgactggccctggttctgcagcacgccgaccacggtgaactcatcgccgtcgagcttgacggtgcggccgaccgcgccgtcggccgagccaagcagcgtcttcgccacatcggagcccagcacgatgaccttgctacgattctcccggtcgacagcgctcaagttgcggccttcctgcaatttgaggttgcgcacgtgcaggtagtgctcgtcggtggcctccacgaacgccttgttagcaaccgtcgtgcccaccgaaagcttcttcatcagggacttcgagggcgccacgccatccacggcaccgaggtcgttcatgcccgaaaggtcgttgtagcccatgtcgccgtcgaacaggtaagccgacagcgcgtctccgccgagagctttcatcttttcgctcacctgccggttcgtcccgtcgccgatgcccacgaggatgatgaccgacgaaatgccgatgacgagacccagcatggtcagagccgagcgcaacccgttgccgaacacagcctgaacggcagttcgcgccaattgactataccgcatgcgaacccctttccatttcctgtatcaagccgtcagcaatgcgcacaacacgctgcgcctcgtcggcgagctcctggttgtgcgtgatgaggataaccgtctggccctcggcgtgcaggctcttgaacagctccatgatctccacgccggtgcgcgaatcgagcgcgccggtgggctcgtcggccaggatgatctccggctcgcacaccaacgcacgggcgatggccacgcgctgctgctggcctccggacagctggttcggcaggtggtgctcgcgcccttcgagacccacgagcg

SEQ ID NO: 9512 - DNA, 200 bp, Unknown
  gut microbiota DNA sequence
ctacaacaagatgtgcgaagcaggcgtggacactgatttctacaagaccgccgacaagctcatctccattggggcagacgacggtcccttctacggcgcatccttctctcccggcttcctgacttctctgggcggcctgcgcaccgacagcgatcttcgggtgctcgacgagaacgaccagccgatcgaaggcctgttca

SEQ ID NO: 9513 - DNA, 8369 bp, Unknown
  gut microbiota DNA sequence
gccctgagaggtgcgcataagtcgggcacatggtgtttttcggcccttttcgatgacgcgagcgcgcacaactcaaggacttgtccccgtttcggtttccgtgcgctgcgcaaggggtgctggggagaggggcggaggcggttgcctttcatagcgctcgcttcgcctatcgctgcaccagtaagcggtggagctcgatgcgacggtttgcccatgcgtcccagcccggtccgaacttcttgcccagggcgctggccaccagcagcgcgacgcgttcgaattcgtagtagtttcgagcttgtccccaagtgagggtcacgacccgcgtgcccaggtgctcgatgccgttgcgccggatggcgtcctcggaggcctttcggtcgcctcgatggtgcttgtcgctgtcgtattccacggagatgttcgcgcggggccaaaacagatcgggaaggtacgccgattgcggcagcgcacggcggtttttcctcgtcacttcgaaacgcgggttcagctgcggtttctccaggccgaagcctcccatgcgcggatcgaataccatggtttccgcgatgtcggtctccatcggcgacagcgagttgtcgcacgcgtagcgcaaggcccgcttcacgtcggcggctccgcgcactcctcgagccttgtcggcgaagcgctcgatgccggcgacggtcgttgcgggtggcaactcggtggcgtcgcctcctcggccgtcgggcaggcggtatcgtccgcagagctcgtacaggaattcgacgagcaaggggaacggcgtcgacggcgcgatcgacaggcaggtgagctcgggcgaggcgaccatcacgtggcgcgacagcttgacgaaggatcgctccggtaatcgatgcgagcacacgtggagcttcgtcctcttgcatcgacggcgcgacgacgcatcgggcacgaggaggtggattggctcggagagccatccgacccccgcctcctcgagggctgcgaggtccgaggcgctgaacggaggcgtctcgcgatcctgtccgaacggcgtggccgccctcgcacgggtcttcgcgctcggatcggctctcctccagtattcgacggccgacgcatcggcaaggtacaaggtcatgtcgctccttcccggtggggcctactgggaaacgaatgacatcttaccagttcaaatactaaaaatataccgattttggcgctggaaacgcgctgggttttggctagatccgcgtagcatttccgctagatccgcgtcggttctgcgcggtttcgcaggtgggaggggcgccctacgcccatttgcggcgcagcaaggcgccgacgacgatggatgcgatggacagcaagcccgtcgcagcgagccacaccgcccccatccctatccagaactcgggcgggtacatggtgatgagcagcgagtcgtaggagaacgtccacgtgccgttcgcgaagaacagcgagtggaaggcggcgaagaagccgttgaagtccacgaccacccatgcggccagaagcgcgaacaccgcgacgaccgcgatgcccgccgcctgagccacgccgccgagcgcacggcgccccacgcggacggccatgtgcgcgcaggcggctacggccacgagcgcgacgacgatgagcccgatgcgcgcgcccgccacgacgtggtacacgtcgtcgaggtgcgacagggcgtcggccggcagcgtgtactcctcgggcgcggcggccagctcgtccgggcttgcttcggcgtagggggtgcccgcgctctcgttgatggcgtgcagcatggagaacacggcctcgcggtcgttcgaccctacggtgtagtcgcgcgtggcgacggcggcctgcaccagctcgtcgtgcgagaacggcgtgcccgggttgccgttgccggagaatgccccggccagcatctcggtggtctgcgggaacgccgcgcatgcggcgaacccggccgctacgagcgtgatcgccagcgatgcggcggccaccacggcggcgagcttgttcatcagatcggtcatctctcgtctctctcttcttgcgacgctcccgcggcatgctgcgccggcagggcgcccccgccccgccggcgccgaagttcctagtccacccagatcgtggcggcggtcatgccctgcatgtccttcgagatcgtgggcagcggccccaggcggctgaacacgccctggaacacgccgtcgtacaggtacagtccgttcaggttgttgtacagcttcggggcgtcggacacctcgtcgtcggccagctggtcgatgcccgtgtccggcggcagcgtctcggtcttgaaggggtggatgtagcgctgcacgatgaacgggaagcctgcgcggccgttcgcgaacttgtcgatgaggccctcccattcctcttgcgacacgtagcagccagcgtacacgtcgtcggcgccgtagtggtcggtgggcttgatgatccactcgtccttgttcgcgcggatctgcggcacgttgatgtagtcgtcgtccagaaacgccgtcatcggcacggtctcctcgatgagcgagatctcgtcgccgtccaggaactccagggttcgctcgtcgaacagcaccttgaatatctgcttgtcgtgcacgatgtgcccggcgaagctgccgatgagcgccaccttctcggcgcgcaccgcgttgagaagctcctgggagtcgtcccagtggtcgatgacgtcgttggtgacgcagcgccgccagatggcgtcgatgcgctggccgtccttgtcgtgcagcgcctcgccgtcgaaggaaagctcgcgcacgtcggccaccacgcactcgacgccgcgctggcggaacagatcggcgtagatgtggaactcgtccaccacgccgttctccaggtagtcgcagatggcgatgcgcgggttctccacgcggcgggcgtaggtggcgtagatgtccaagaacgcctgcacccacgactcgaacagctcgcatccctccacctggtggcggctcgcgaactccttgaacgtttctgactgcgccaccgacgtggtgatctcgcggttctcattcatgcccgacgagccgtcggcgttgaactcgcagaacttcacccggtagtcgtcctcgtccaggaacgtgtccacgcgggcgaacggcagaaccgagtcgtagccgcgcggcagcaggatgagctcttccagacgcgggtcgaagtcgaaggcgcgccggtactcggggtcggccaggtaccgctcgatgaccttgacgaggatgcggtgcgcggtttccgccgtctctttcatcgtgtcgtaggtttttctattgaacaggcgggggatgaacgagcacgctaccacgcggtggtgcacgatggccgtggagctctgcatgtagtcgtaggcggcgcgacgtccggcgacgtcgccgccgagcgcgtccatgatctggaagtactcgcgcgtgtagtcggcgttggttggcatggcgatcctttcgggacgccgctcccgaagcggcgggacgtgctcggggcggaggctggatttcaaccaaaaagtctaccacgagccgcgcgccgcgatcggggaagttgccgtatcgccatatgaacggcgaggaggcggaatgttgagaagggcggtgctttggggtgatcatgggacttgaagaaacagaatcgaagtgtctggatgttgataaaattggctttgaaactgcaaaagcgtccaatcgaaggaaggggtagcttatgagggaggatgagccccgaggcagcgaaaccacactttcgttatctttgtccaaatcaatcaacgaagaagcgctgtcttctttatcgggcattgccgaggtcggattggattcgatcttcgaagaagggtttctgaaagatattcccattctcgcaacggttgcttccgtctacaggattggaaaatcggttagagagcgccatcatcttaaaaactttgcgatatttcttgacgaactcaacactgttgatgattctcccgagttccaggacagatataaacaatactttagttcaggagatcgagacaaagagatcgaatacttgatcattatcctcgatagattcgctgaatcagagaaggcggtattcttggccaggttgtatgctggctatataaaccgtcatttaggatgggacgattttagaatgtacgcaaacatcattgaccgcatccttcccggtgattatgaaatgttgaaatcgcaacggtatttttcgcttaatcgttttctcccgacggacaaaaagaattgggagaggttgccgaggctggctggattgggattggttgatagaagatcaacgcagtttgatgacaagggtaacgggactctcgctattagcagtggtgatgcttactttgttaccgactttggttcgctgttcgtttcgattattgaaaagcggttttgatgcacacgattgggctttgaatttcggaatacgcgccaatcaagaagcggagtttgtttcgtggcattccgaatactatttgcatgcatcggcaaaggtgttcttcgacatgatgtgaagcaaagaagtagtcgaatgcgtttatagaccgaatgcccggatgcactttgtgtttattttggcgtctgcgttttcacatttttcggctgcgttgtgctcgctcgtgggggttgcgcgcatgcgggactttcgctattgcgcgcatcctcctttcggggtaccatcggcaaggtttcacggggattccggcttttcgcgcggttctctgttttatcaagagtcgggggagagagttggctctgtgatcccgacaccaacctggcggatacgccaaggtggtccggcctacagcgatgaaggaggaacgtatggccgaagaatgctctacctatttgttcacgtccgagtcggtcaccgagggtcatcccgacaaggtgtgcgaccagatatccgacgcggtgctcgacgccatcctggccaaggagatcgagctggcggccgccggctacgtggcccccagcgggcagcccgccgatcccgcgcaggtgcgcgtggcctgcgagaccatggccaccaccggcatggtcatcgtcaccggcgagatccgcacgcaggcctacgtcgacgtgcccgccatcgtgcgcgaggtgctgcgcgacatcggctacgaccgcgcgaagtacggcttcgactgcgacacctgcggcgtgctgaacgccatccacgaccagagccccgacatcgcgcagggcgtcgacgagagctgggaggcccagcacggcctggacgagggcgacccctacgagcgcgtcggcgcgggcgaccagggcatgatgttcggctacgcctgcgacgagacgcccacgctcatgccgatgccggtgtatctggcccaccgcctggccgagcgcctgaccgaggtgcgcaagaacggcaccatgccgcttctgcgccccgacggcaagacccaggtgtccgtgcgctacgagggcggccgccccgtgcatgtggagaaggtggtcgtgtccacgcagcatgccgaggagatcgcccacgacgagctgcgcgcccagatcgtcgagaacgtggtgaagccggtgctcgagcgcgagggcgtggcgctggccgacgacgccgagatccacgtgaaccccaccggccgcttcgtggtgggcggccccatgggcgacgcgggcctcaccggccgcaagatcatcgtcgacacctacggcggcatgggccgccacggcggcggcgcgttctccggcaaggactgcacgaaggtggaccgctcggcggcctacgcggcgcgctgggtggcgaagaacgtggtggccgcgggcctggccgctcgctgcgaggtgcaggttgcctacgccatcggcatggcgaagccggtcagcgtgatgatcgacacgttcggcacgaacgcggttcccgaggccgacatcatggccgcggtggacgcgacgttcgatctgcgtccgggcgccatcatcgacgcgctcgacctgcgccgccccatctaccgcttgacggccgcctacggccacttcggccgcgagcttcccgagttcacctgggagcgcaccgacaaggccgacgagctgcggaaggcttgcggcctggcgtaagcgacaaccgtagaagcttgtggcgaaccgcccgttgcgatcgcgcagcgggcggtttcgcgtttgcggcgcgcgggacggtgccctgaggggggatcggcgcttcgcgtgaagcgtgagcgttcggctaggcgcttggcaggtctggaagggtttctgtcccgcgttctctcccgcgtgccgtttcgtgctgccagccgggctcttcgctgttgaaccagggttagcagggaaagcggggatcgtgggcgcgaatcgacgtccgtgacaatttcgggggtcgtttcgagccgtttcgagccgtttcgagccgttcgcgccgggtttccgggaaggcgctcgacatatgcccaggtcgctgaaactcggaaccgtcgcaatatgagttcgccgaaggcaacattgtcatggtggtcgattcgtgcccacggatcccgtcgcccgccgcccggccgggagcggcgccgcccggccgggccccctccgatcccggctcgacggcgaaaggccgattccaaccctggtttaacagcggagcgggctcgaaatggcgaaaagtcgccgaattcggaagacatcgtgcgtttcggtcgagctcgttgcgcgatatcgaaagtgatctttccggtgacctgtccttattcgacaggagctttctctgtgcgcttgaggttcgcttaagaacttccgaatccgatggtttttcgtcaacggtagcgtgttccgcggttaaaccaagattgacatagcccaggtcggctcgtccctctcgccggcggttcggaagccctcttcggccatcgaccaggtgctcgtctcgcctgatcgccagccgcccgatagggaaagcggcgtgcggcggtgcatgtcgatcctggtttaacaacggatagcgtgttcggatgcgggggcgagcggaatgccaagggatttcctgcggtggagcggtagggctcctgcggcagctcggggttgggatatactgggggcatgaaactcgcatccgtcatcttggacatacccacgcaggcgctcgacgcgccgtatacctacgccgtccctgaagaagcgggcgaccagccgatcgaggtcggctgcgccgtgctcgtgccgttcgggccgcggcaggccgtcggcttcgtcatcggcatcgaggagcgcgccgaaggcgattggcccgcaggtctcgaccctgccaagctcaagggcatcgtgcgcgcggtgagccgcccgtacttcgacgaggagggggctgcgtgcgcgcagtggctctcggaacgctacatcgcgccgttgtcgtcgtgcgtgcgcctgttcacgccgcctggcggcgtgccgcgcatggtgcgcgcgcagggaggctactggcgtctcgaagagccgacggtgggggaagtcgacgaccgctgggtggtgccggggcctgcgctcgcggacttcgagccgcgcaagaacgccgtgaagcaggcgtccatcgcggccgcgctcgagcgcggcgagctgcgcgtggccgagctgacggccgagttcggcgcggtgtcgtcgcctctcaaggcactggagaagcagggcgtcgtgcgcatcgagcaccgccgtcgcatgcggggctttcaggttccgtcggcctgccggccgacggagcgggccgacgccgcggcttcccgcaacgcccgatatacggccgtcgacgaaggctcgcgcaccgaagtgcgccacgtttccgtcatcgaccccggctcaagcgctgcggaaacgctcgctgactcactgcgccaaccagcggccgtccaacctgcgagcctccagcccgcaggcgcagtccaacccgcaggctccttcaccccctcgcccaagccgccgctgacgcgaggacaggccgatgcgctcgcggccatcgacgcggcgcgctcgcgcggcgcgggcgaggtggtgctcgtggacggcgtcaccggctcgggcaagaccgaggtgtacctgcaggccatcgaggagacgctggccgccgggcgcacggcgtgcgtgctcgtgcccgagatatcgctgacgccgcagaccgtggcgcgcttccgcggccgcttcggcgatctggtggccgtcatgcactcgcgcatgagccagggcgagcgctacgaccagtgggattttatccgctcgggcgcggcgcgcgtggtcgtgggcgcccgcagcgcgctgttcacgccgctttcgaacctcggtctcatcgtcatc

SEQ ID NO: 9514 - DNA, 160 bp, Unknown
  gut microbiota DNA sequence
tggccgcttcggcgacctggtggccgtcatgcactcgcgcatgagccagggcgagcgctacgaccagtgggatttcatccgctcgggtgcggcgcgcgtggtcgtgggcgcccgcagcgcgctgttcacgccgctttcgaacctcggtctcatcgtcatc

SEQ ID NO: 9515 - DNA, 1089 bp, Unknown
  gut microbiota DNA sequence
ccgttgcccgaggtgcaggtggtggacatggcgaaggagttcagcggcgggtcgcgttcgatgttcgcgctgccgctggcccgcgcgctcgaggaggagctggccgccggccgcaaggcggtgctgctgctcaaccagcgcggcttcgcgaaattcttgctgtgccgggaatgcggtttcgtgcccgagtgcccctcgtgctccacgtcgctcacgtaccacgaacgcggcaacttcctgatctgccatcactgcggctatcggatacccacgccgcccgtgtgcccggaatgcggcagcccctacctcaagaagttcggcgcgggcacgcagcgggtcgaggccgagctgcgcgtgctgctcgacgagatgcccggcgtggacccgggggtgcccatcgtgcgcatggacgccgacaccacgagcggcaagggcgcgcaccagcgtctgctcgaggagttcgccgccgccgacgccgccgtgctgctgggcacgcagatgatcgcgaagggcctcgacttcgaggacgtcacgctcgtgggcgtcatcaacgccgacaccatgctgaagctgcccgactaccgcgcctccgagcgcacgttcgaccttgtggagcaggtggcgggtcgcgcgggccgcgccgagctgccgggccgcgtgctggtgcagacctacgaggccgacgctcccgccatccgcgcggccgccgcctacgaccgcgccctgttcctgcgcgacgagctgccgaagcgccgcctgctgggctacccgccctacgtgcgcatggcgaacgtgctggtgtggagcaaggacgagccggccgtgcgccgcgtggcggccgagctgcaggcggcgctggaggaggcggtgcgcgacttcggcggcgacggttggagcgtgctgcccgccacgccgtgcgtgctggcgaagctgcgcggcacgtaccgctggcacatcgtggtgaagtgcccggctgacgccgacctgtccgatgcgctgctgcccctcttccgccgccgcaagcccgacagggatgcgaacgtggccgtggacgtcgatcccgacgatctgctgtagcgcgctcgcgcc

SEQ ID NO: 9516 - DNA, 301 bp, Unknown
  gut microbiota DNA sequence
tattgtggtgaagtgcccggctgacgccgacctgtccgatgcgctgctgcccctcttccgccgtcgcaagcccgacagggatgcgaacgtggccgtggacgtcgatcccgacgatctgctgtagcgcgctcgcgccgcggcttggcggacgttcggcctaccagccctccatgaaccaggcgaccgtgaacgccacgcgctcgccccaggccgcgatgtcctcgtccgaaatgggcgcgcgcagcgaggatcggttcgcgtacgcccagtcgtacagcgctgcggaatcgacgaatcgctg

SEQ ID NO: 9517 - DNA, 2828 bp, Unknown
  gut microbiota DNA sequence
ctgacgttcggcctaccagccctccatgaaccaggcgaccgtgaacgccacgcgctcgccccaggccagactcgcgatgtcctcgtccgcaatgggcgcgcgcagcgaggatcggttcgcgtacgcccagtcgtacagcgctgcggaatcgacgaatcgctgcggcttcgaggacgaccccagcaccacggcgtagtactcgtgcccgtctccgcggttcacggccgtcgccgcgcagggcccggcggccagcgtgtagccggtcttggccgcgcacgcgcccgggtagctgcccagcagggcgtcggtgttctccagcgccagcgtcacgggcgccccgtcgcgctggaccgtgatgtctgcctgcgagaacccgatgttcgctcggacgaggtcgatctgcatggccgcgcgcagcattgtcgccacgtcggccgcgcagctgtactgcccctgggcgaacgcgtcgaagtccaggccgtgcgggttcgcgaagaacgagttctccagccccagctcggccgccttcgcgttcatggcctcgacgaacgccgcctcgcaggcgtacgcgtcgccgcccgaccccttctgcgccagcatccgcgctccggccgcttgggcgatggccgacgccgcgtcgttgcccgaagccgtgagcagcgccttcagcgcgtcgtcgaaggtcatcgagtcgccttgcgcgagcccggcgctcgattcgccgacgctggcggcttcgggcgtgacctcgatcatcgtcgatgcgtccagccagtccgccgccacgatcgcggtcatgatcttcgtcagcgaggcgatctgcgcggcgtcatcggcgttgcggccgaaccacagcgtgccgtcctcgtccatgagcgcggcacaggatgcgtcgaggtcgggaagccggtcgggcggcaaggcgcgctcggcggcgctgagacggagcgccatgtcgtcctcgtccacggaaccgaaggcggccgcgagcggcaggcacgccaggaggccgaccagggtcaggcaggcggctgcgcggagatggcggcgtcgggcgttcatcggctgctcctcgggtgcgtgcggagggttcgtctgcgtaacagtatacgcgctggagagcgtcgcatgggaagcggcttaaaacggttttatcggttctcgcgggcctccgttcatgtcggatcgtaggttttcggcaagaccgtggtatcctagctgatcgtgaggcgttctcgcgggtgtcgaaggagggatgggctgtgggaaagaaagcggcgcgttgcgtctgctcggcgatggccgcattgctgatggcaacaaccgtcttcgtcgttcccgcggcggccgatgtcggcggttcgcgggatgcatccgaggacgttcgagtggtgcgcgtggcgttccccgaggtcgaaggcatcagcgtgaccgatgccgacggcgtgcgctccggcatcctctacgattggctcgcggaggtttccaagtacaccggatggacctatgagtttgtggacggcgatgtccaaagtctcatgaaacggacgtctgcgggagagatcgacctcatgggcggcatgtactatcgggagcagctcgtcgattcgttccagtattcgaacttcgccatcggtgcgaaccacgccctgctcatcagcctcgaagagaacgacgatgtcgtcgtcttcgactctcgcacgctcaacggcaagaccatcggcgtgttcgagaacgctaccgagaagattcgccgtctcgaaaactacctcgatttcaacgatatccactgcatcgtcctgccgctcgactacgatgcctactcgaaatgcctggacgacggcaccgccgacgtggtgctgggcggtgacgtggacgtcaccgaaggccgcagggtcgccgccgagttcgacggcgaaccgtactacatagccatgccgttcggaagcgatctgaaggacgatctggatgcagcgatgacgtcgatctacacggcgaatgccgagttcgcgaacgagctcgatgcaaagcacctgccgtcccgccgccaatgcgccatcaagttctccgaagccgaccgtgcgttcatcgacaacgcaggcgagatcagcgtggccgtcatgcagggccgctacccgctgtactacgagcgcgacggactgtaccagggcatcgagaaggatgtgctcgacctggtcaccgagcgcacggggctcgcgtttcgcctcgtgcatgccagtacgtaccaagatgccgtcgacctggttaaatcgggggaagtggacatgatgggcggcttcttggacgacggctacgcggcggacggccaacagctcgccatcaccgagagcttcgcgtcgctcaacgaggtggtgttccgcaacaagctggcttcctccggggaaacggtcttcgcccagatcgaagggcgtgatggcaccgacggcgtggaggcttccgaggtcgtgcactaccgtacctacgaagactgcctcgaagcggtgaactccggacgcgccgacgccaccagcatgcccgtcgcgttcgcggaaggcctgttcatcgaccactcgttcagcaacatcacgccggcaacctccgagcatcatgaggcgggcctttcgttcgccctcgccaagcccgtggacacggagctgtactcgatcatgagcaaggcggtgaatagcttctcgcaggacgagctggacaccatcgcgtcgcacaatagcatgccctcgttcggcaagcagcgcactattcaagcgctcgtctccgagaaccccttgctcgtcgtggcgttgagcctcgtgctgtgcctgttcgtgggc

SEQ ID NO: 9518 - DNA, 542 bp, Unknown
  gut microbiota DNA sequence
cagcttctcgcaggacgagctggacaccatcgcgtcgcacaatagcatgccctcgttcggcaagcagcgcaccattcaagcgctcgtctccgagaaccccttgctcgtcgtggcgttgagcctcgtgctgtgcctgttcgtgggcgctatagtcatcgtggtgtcggtggcgaaggtgcgcaaccgcatgatggagatgaagctggagaaggtggaggagatgggccgagcgaagaccgacttcctctcgcgcatgtcccatgagatccgaacgccgatgaacgccatcatcgggctttcgagcgtggcgtcgctgtcgggggaagccacgccgtccattcgctcgagtctcgagaagatcaacatgtcggcccagttcctgctgtcgctcgtgaacgacatcctcgatatgtcgaagatcgaggacgacaagatgcgcatagagacggcgccgctccgcctgcgctcgctggccgagcgtctgcagagcatgttctttctccaggccgaggacaagggagtcctgttcgagacccgctgcg

SEQ ID NO: 9519 - DNA, 6419 bp, Unknown
  gut microbiota DNA sequence
aacgacaagatgcgcatagagacggcgccgctccgcctgcgctcgttggccgagcgtctgcagagcatgttctttctccaggccgaggacaagggagtcctgttcgagacccgctgcgatgccgacgacgtcgtggtgggcgacgacgtgcggctgcagcaggtgctggcgaacctcttgtccaacgcgctcaagttcaccgatccgggggacgccatccggctgagcgtggtcgtgctcatacgcgacgagggaagcgcgcgcgtgcgcttcagcgtggaagataccggcgcgggcatccgcgaggaggatctcgagcgcattttcgtgtcgttcgagcaggcgtccgagaatcgccgcaacgcgcaggggacgggtctcggcctggctatcagcagcaacctcgtacgactcatgggcggaaggctggacgtgcagagtcgcgtcggcgagggttcggagttcttcttcgtgctggagctgccgacggccgacgaggaggctttgggggacgaggagacccctgcggaaacggccgaccgatcgcttgcgggcacgcgcgtgctgcttgccgaagacaacgatctgaacgccgagatcgccgtggcgctgctcgacatgcagggcgtcgaggcgcggcgtgcggcgaacgggcgcgaagccgtggacatgttcgacgcttcggagccgggagcgttcgatttcgtgttgatggacgtgaagatgccgttgctcgacggcctcgaggcggcgatcgagatccgcgcgctcgatcgggaagacgctcgcacggtgcccatcatcgcgctcacggccaacacgttccaggaggaccgcgaggacgcggccgctgccgggatggacggcttcatccccaagcccttcgatgcccagcagctctacgagacgctgcgcagctacctgccgcgcaaggggtaggcccacggttgcggcgcaagttcgcgagcctcgcaaaacctgcgcaagcgttatattcgtcagcaagatgacggaaaagtgtggtatattatttggctgtatctttgcgcctggtgcgtatgtatactcatgccctgcgcgcagtccggtcggaaaggaagatcacgtggcccaagcctcaagcaagcaagcccaagagcggaacaacgcggcggttgcctcgatcgaagccgaagacatcctggaggaagacgccctcgacgacgagcctgatgtggtcgacgccggcgacggactcgacgacgataagcttgaaagccccctgtccgatgacagcgacgacgaagacctgctcgaaggcattcctgaagaggagcttaaggcgacggtcgaggttcagctgcccaaggtggcgggcaagagcaaggtgcgctccgtgcgcaagcgcaatgccgacgccagcgtgaccatgctcacgggcgaccccgtccgcatgtacctcaaggagatcggcaaggtcccgctgctcacggccgccgaagagatcgacctcgccatgaagatcgaggccggcgtggccgccatggaggagcttgagaaagcggaagacgagggcatcgagctcgaacgccgcgagaagcgccgcctcggccgcatcgagcaggtgggcatcgacgcgaagcagcagcttatcgaggcgaacctgcgtctcgtcgtgtccatcgccaagcgctacgtaggacgcggcatgctgttcctcgaccttatccaggagggcaacctcggcctcatccgcgccgtcgagaagttcgactacacgaagggcttcaagttctcgacgtacgccacctggtggatccgccaggccatcacgcgcgccatcgccgatcaagcccgcaccatccgcatccccgtgcacatggtggagaccatcaacaagctcgtgcgcatccagcgccagctgttgcaggagctcggccgcgagcccagccccgaggagatcggcaaggagatgggtctgcctgccgagcgcgtgcgcgagatccagaagatctcgcaggagcccgtgtcgctggaaacgcctatcggcgaggaggaggattcccagctgggcgacttcatcgaggacgatgccgccgtggtgccgcccgacgccgcctcgttcagcatgctgcaagagcagctgtcgaaggtgctcgacggcctggccgaacgcgagcgcaaggtgatcagcctgcgcttcggcctggaggacggccatccccgcacgctcgaggaggtcggacgcgagttcggcgtcacgcgcgagcgcatccgccagatcgagagcaagacgctggcgaagctgcgccacccgtcccgctcgagcaagctgaaagactacctggaagattaaggttccggcggcctgacggccgtcggaacgggccgacgctgcgaaggaccctggcgccccgctttggcgcgatggcgaagactcgcgtacgcaacgtacgcttcgccttctccatcccgccaattcggaacaccagggtccttctcgctgacttactacgccaacctgcggcatgcgaagattggatctgcgctgtatggataacgaaaacctcgaactgttcgctagctgcctgtccggtttggaggcgccgctcgccgaagagctgaagcgtctgggcatcaagcgcgtgcgccccctcggcgggggcgtcgcctttttctgcgacgtgcgccatgcgttgtcggcgtgcctgtggtcgcggctggcttcgcgcatcctcgtggtggtggggcgcgtgaacgcaggcgatgcgaacctgctgtacgagggcgtgcggcgcatcgcctgggagggcgtcatcgttccgggcgcgagcatgtccgtgcaggcgcacggcatgaacgacgagctgcgcaacacccggttcacggcgctcaaggtgaaggatgccgtatgcgaccgtttgcgtgagatgcgcggcgaacgtcccgacgtcgacgccgatcatgccgacgtttcggtggatgtgcgcgtgcgggaggggcgcgccacgatctcgctcgacctgtcgggcgaatcgttgtaccaccgttcctacctcacgcccgacgacggtcccgacgccccgctgtcgtgcgcgctcgcggccggacttctggcgctggcaggttggcgcacccgcggaagccgcggcgaggcgctggtcgatccggcgtgcggcgacggcttcctggtggtggaggcggcatctgccgcgtgcgacctggctccgggccttacgcgcgagcgctggggtttcttcggctgggtgccttcggatcctgacgtctggaacgagctcatcgacgaggcggacgagcggttcgaacgcggcctcgcgtcggccacggcgccgggcgcgctcgacggccccgcgtcggcaccgcccgatccggcgcatgtgcgcttcgcgggcgcgtccacgtcgtctccggccatagcgcgggcgcgcgtccacgccaagcgcgcgggcttgcgccaggccgtcagcatcgagcttgcggacgcgcagagcgtcgacgagttggtgtcgcgcgtgtgcgccgctgccggcagggcgcgcggcggagaggcggcctcgtgcacggtcgccagcgtgctgcccacgggcgagcgggcccagtccgacgcgcgctcgcaggctgacgcggccgcgttcgtgcgcgcggcttcggtcgctccggggggctcgacgttcgccgtggccggcggcgagatcgtggaggcgcgctttggcgtcgcgcccgcggtgcgcgccgtgctcggccgcgaccgcgtggagaccgaggcgctcgtgttcgacaagccccccatggaggccgtgaaggtggtcgtgcccgatcccgcgggcggcgccgagcatgtggtggaggtgctggagccgacgtccgagcagttcgccgcacggctgcgcaaaacggccaaggagcgccgcaagtgggcgcgccgtgaaggcgtgtcgtgctaccgcgtgtacgatgccgacctgcccgactacgccgtggccatcgacgtgtatccgggcgcgggcgatgccgagggcaacctgtacctgcacatcgccgagtacgcggcgccctccaccatcgatcccggcaaggcgcagcgccgctacgacgacgtgctggcgctcgcgcccgtggtgctgggcgtgcgccccgaccacgtgttctcgaaggtgcgccgccgcgacaagggcggcagccagtatcgcgactcgagccggcgctcctacgtcacccaggtgcgcgaggacggctatctgttcgaggtcgatctggtcggttacctggatacaggcctgttcctcgaccatcgtctcacgcgcgagctggtggggaagaaggccgagggaaagcgcttcctcaacctgttcgcctacacgggttcggcgagcgtgcatgcagccggtggcggcgccaagagcactgcgacggtggacttgtcgcagacctacctcgactgggccgctcgcaatatggcagccaacggcttcgagggggagcagcataccttcgaacgcggcgacacgatggcgtggatcaccgaagcgcgccgcaccggccgccgcttcgacctcgtgttcgtcgatccgcccacgttctccaactccaaggccatgggcaagcgcacgtgggacgtgcagcgcgaccatgtggagctgctcatcggcgtgtcgcgcctgctgtcggaagagggcgaggccgtgttctcgtgcaacctccgttcgttcaagcccgacgaggaggcgctggccaagtacggcgtcacgctcgaggacatcacggcgcagaccattccccacgacttcgaacgcaacccccgtatccataaatgctacctggttaaaagaacccagtaacccgtcttcctgttcctcgacgcggcgtacgggctgtcgacggtgccggtgatggcgaaaaagcatcgaattcggaaatctcgcaccggctttcgcggacgccggtcggcttccttttgcgaaacgcctggtcgcgcagtcgcctttcctgcatgcactgttccgagtgtgtccgaaaggacgcggcggtttccaaattcgacgtcttttcgtcattttcagcccgatgcgctgcagcgtcgggcttttgctcggtcttatcgtattgcaagatattcgcagatcagatatatttagtattgctaggtgatagagggaagggttcggaatgcagctccggttcgcgcagcagatgaagaagggcgcgctcgacatgctcgtcttgaagctgctgcagcacgaggagaaatacggctatcagctgatcagcgagcttcgcgaccgctcgaacggcgcgctcgcgctcaaggagggcacgctgtaccccatcctctaccggcttgaggacggcggcctcgtgaccagccgcatgagcgcgcacgttgcgaaggagcccgcgcgcaagtactacgcgatcaccgaggcggggcgcgacgcgttgcgcgagatgtacgagatctggaacgaattcgacggacatgtgcggtcgatcatggaggaggagcgatgaacaaggaatcctatgtgaaggcggttgcgaagcgtctgacctgctcgaaagcgcgccaagccgagttcgtgcgcgacctcgaatccgacatcgccgctgctctgtcagcaggcgagacctgggagcaggtggaatcccgcatgggcgacccgcgtcaggtggcgcaagagttcaacgaggatctctccgaagcggagcgagccgccggcaagaaacgcaagcgcaccaagacgatagctatcgtggcgaccgtcgcggtggccgtggcggcgatcatcggagccgcgacctggtgggcatcgccgaaaaccgcccctgcggggcaaagctcccaccaaaccgagcagcaggtaatcgagcgtgcgcaggaggtggtcgcgctgctcgacgcgggcgattacgaaacgctgcagtcgatgtcgatcgacgaaatgaaagcgggtctcaacgccgagatgatggagcaagcgagggagatcacggttcccggtgattggggtgccttcgggtcgttcggcaatgcgtacgcgacggagatctcgcaatccgggcaggtgttcgatgtggtggaggtcgtcgccgtgtacgagaaagcgacggtaacgtacggcatcagcttcctgaacggcgaagagcttgccggaattcgtatgaggtaggcccatcatggaaacgttcatcgccctcatcgtcgtcggtgttctcatgtgcgtgtatggcgcgttcgtgttcgccggcaatgtgaaatgcttcagcatcctcgccgggggaaacaactttctggcgctcaacccgagcgaggcgcagtatcgccgggaggctcgacgctcaggtgtggccatcttcctgctcgcgatcgatttttggtgcttcggggcgtggagctacgcccaacaggacgacgcggtgcg

SEQ ID NO: 9520 - DNA, 1438 bp, Unknown
  gut microbiota DNA sequence
tcgatgagcgggaagaagcccagcacgaacgcggcgatccagttggccgcgtcgcccccttccccgccgaagcgcccgcccgcccacaccagcagcagcacggcgcagatgccgaacagcgcctgcagcaccacgtcgcggcgccgaccgaagcgctccatgcgctcctgcacgtcgcgcatccgcagctcgcgctccttatggcgcgtgaggtactcctcgccgcgcccggcgaacacccagtcggacacacccagcacgttgtcggccagctcggcgtacagctcgttcttcatctgcttgtggcgcgcctggcgcgcggcgttcgccagcaccgacaccagcggcacgaggaacaccgccgtgcccagcaccagcagcatcgccagcgcgagccagagcgagaaccagcccaggcatgccaccagcacgacgaacagcagccatgccgtcaccgtggggaacacggtgcgcaggtacaggttctgaatgtgcccgatatcctcggccagaaggcccagcacgtcgcccgtgcggtgcgtggcgcggaagaacacggcatcgcgctccagcgcgcggtacagcttcaaccgcaatccgctggtcatgcgcagcacccagtcgtggctggtcaagcgctcgaggtactgcaggatgggcttgcccacgccgaagatgcgcacgaagatgagcggcaggtgcagaaagaggatggtctcaaccaccgccgaagcgctgaccaggtagcctgaggtaaacatcagcgccgaggcgaacccgaacgtcagcagccccaggaaaagcgccaacgccaacgccttgcggtaacggaagaagaacggcttcacccaggcgtcgcggcgcagcacgctcgcgaacccctcctcgcgcggcacggcgccctgcacggcttcgccttccctgctcatagcgcgcctccttccaaccgcgacgccaagcgcgcgtacgcgccgtcgcgcgcggcaagctccttcggcgcgccgaactcggccacgcgcccgtcctccatcaccagcacggcgtccatgtcgtgcacccaatgcagccggtgcgtggcgaacaccacgagacggccttccatgagcggcagcatgcgctccttcagctccaactcggtctcgatgtcgaggtgcgccgtgggttcgtcgaacagcaggatgcgccgcgagtcgtccagaagcgcgcgggccagcgcgatgcgctgcgcctggccgcccgacagcgcgcgggcgccctcgcccaccagcgtgtccagcccgtccggcagctcggccacgagatcgcccagccccacgacctccaccgcgcacgcaacctcatcgtcgtcggcatcgggacggtagagcacgatgttgtcgcgcagcgtggcgtggaacaggtacgggtcctgcgggatgtagagcacctggcgctgcca

SEQ ID NO: 9521 - DNA, 1117 bp, Unknown
  gut microbiota DNA sequence
gcgcaacctcatcgtcgtcggcatcggggcggtagaacacgatgttgtcgcgcagcgtggcgtggaacaggtacgggtcctgcgggatgtagagcacctggcgctgccacgaaggctcgcgcaggtctgccagctgccgccccgaggcgcgcaccgtgcccgcgctgggagccgcgaagccgcccaacaggttcacgagcgtgctcttgcccgagccgctggccccgatgacgccgatgcgcgcgaaaccgcgcacggcgaaggacacgtccgaaagcgcctcgtgctcgggatacgagaagcgcacgccgtccagctcgagcgtcgcatcttcgctccagacgggaacgtcgtgcggcgccgcggcctcgtcgcttgcgacgtccggcgcgccctccgccgccgacgcgatgatcccctggatggaggcaagcgcgttcttgccgtcgagcgaggcgtggtagtcgctggcgaactcgcggatgggcttgaagtactccggcaccagcaccagcacgaacagcgcagggaagaaggcgatcgaaccgtccacgaggcggaatcccaacatgatggccacggccgccagcgacagcgtggagatgaggtcgagcacggagcccgacaacgtggcgatgcgcagcgtcttaaccgttgcctcgcggaagcgctcgctcacctcgaagatgcgctcgccgtggcgcttgccgcggccgaacagcttgagcgtatcgatgccgcgcatcgagtcgatgaagtgattcgacagccgctggtactcctcgtgctgcagcgacgcggccgccttcgctgtcgcgccgatcagccccatgtagaacacgatgaccgggtacatgaccagcatgatggaacccgacacccaatccaccgggaacacgcacaaaagcacgatgagcggcaccacgaccacgcacacgatcttcggcaggatgaggcgcaggtacgtctccacctggtcgatgccctccaacaccatcgcagtgacgctgccggtgccctgagcttgcacgatgcgcgcaccctggccgaacaccgcctgcagaagctcgcggcgcagtgcgtcgatgcgtgcgtaggcgtagcggtcgagatagga

SEQ ID NO: 9522 - DNA, 392 bp, Unknown
  gut microbiota DNA sequence
tgacgtccgccaaccgctcgtcgcgcttgtccgccggcaccgtgcgatcgagcacgcggtaggcgtcggacaggtagcgcagaagcgttccctccgagcgcgcgatgccgtagcgctgcacgtagcccttgaagtccgacgcgctctccagcatgtcgcgcagcaccgacttcggctccagccggaagtcgcgcgcccacggcacctcccggcagtagcgctcgaacgccgcgtccagcagctcctccaacgggcgcgggtacgtgatctcggcgaggcgctccaagcgctcctcgtactcgacgccgtcggccttcatgtcctgcatggccttgtcgcgcgcggcgcgctcctgcgcgcgcagcacctgccgcgggttctccagcgttgcc

SEQ ID NO: 9523 - DNA, 2250 bp, Unknown
  gut microbiota DNA sequence
gccagccgcacgcgctggaacagcgcgttgcgcacgagcacggtcaggccgcgacggtcgtgcaccacgacgtcgcccgccgtcggcggcgcgacgtccacggccgcgcccgcgctctcccactcgtccacgaggctcgagtccaccgagcgcaccacgaagccgagccacgcgatgacgtccgccaaccgctcgtcgcgcttgtccgccggcaccgtgcgatcgagcacgcggtaggcgtcggacaagtagcgcagaagcgtcccctccgagcgcgcgatgccgtagcgctgcacgtagcccttgaagtccgacgcactctccagcatgtcgcgcagcaccgacttcggctccagctggaagtcgcgcgcccacggcacctcctggcagtagcgctcgaacgccgcgtccagcagctcctccaacgggcgcgggtacgtgatctcggcgagacgctccaggcgctcctcgtactcgacgccgtcggccttcatatcctgcatggccttgtcgcgcgcggcgcgctcctgcgcgcgcagcacctgccgcgggttctccagcgttgcctcggccatggagatgacgtcgagggcgaacgagtcgctctccgggtccaaaagctccagcgccgccagcagaaacggcgacagcggctggtcgagcgcgaagtcctccggcaggtccaccgtgcacgcgtactcgacgacgcccccttcgccctccacctgctcgatgacgtcggcgctggtcagcgtgtcgaatatctcgtcggcgcgcacgacgagcgcccgcttctcctcgtcggtctgagccgagtcgtcgatgagcttgcgcacgcggccgtacgcgtcgccaccctgcacgacctcggacagcaccatggaatgggtgatcttcatgcgcggcttcaacgtctcgggcaccgccgcgatgaggcgctcgaaggtctgcttgttccaggtgacgaagccctcgggcggctgcttcttcttgaccttgcggatcttcttcgggtcgtcgcccgccttcgccatgagcttcgcgttctcgatgtcgtgctcgggtgcctcggcgatcaccatgccctcggtgtcgaagcccgagcgccccgcgcggcccacgatctgatggaactcgcgagcgcgcaggcggcgcatcttgtagccgtcgaacttcgtgagctgcgtgagcaccacggtgtggatgggcacgttgatgcccacgcccagcgtgtcggtgccgcagatgacgggcaggaggccctgctgggccagcttctccacgagcagtcggtagcgcggcagcatgcccgcgtggtgcacgcccacgccgctcgccagcaggcgcttgagcgtcttgccgaacgccgtggtgaagcgcgtacccttcacggcgtccttgacgagctcgcgctgctccttggaggccacgccgtagctcgacagtgcctgcgcggtagccagcgccgcgtcctgcgagaagtgcacgaggtacagcggcgcctcgcccttgcgcagggccagctccaccgtgccctcgagcggcatctccacgtactcgtacgacagcggcaccgggcgcggcgcgtcggcgacgacgtccacgtccgtgcccgtgcgctccttgagcgacgccgcgatggcgctgacgtcgcccagcgtggcgctcatgaggaggaactgcgtcttcggcagcgtgagcagcggcacctgccacgcccagccgcgatcggcgtcgccgtagaagtggaattcgtccatggccacgcagcccacgtcggcggcctcgccctcgcgcagcgcctggttggccaggatctcggccgtgcagcagatgacgggcgcctcggcgttgatgtgcgcgtcgcccgtgatcatgcccacgttctcgcggccgagcacctccacgaggttgaagaacttctcactgaccagcgccttgatgggcgccgtgtagtacgagcgcttccccgtggccagcgccatgaactgcatccccagcgccacgagcgacttgcccgagcccgtgggcgtgccgaggatcacgtggtcgcccaccatgaggtccatgagcgcctcctcctggtgggaccacagctcgatgccgcgcgcggtcgtccagtcgaggaagcggtcgagcgccgcgtcgggcgaaagccacggctcgggctccggctcaccctcggcaggctcccaccacgcgggcgcgagccgccccagcgacccgtgcgcgaaagccgcgtcctcgggt

SEQ ID NO: 9524 - DNA, 156 bp, Unknown
  gut microbiota DNA sequence
ggaaatcagggatgacgataaggttccattctacccgcaaccgccgccttcggacggtcgcgaacgggaaaagaacacgccgcactgcaggacgcttcgctcgctcgggatggcagatcgcggctgcgtctttggtgtcctttcggtgtggatcct

SEQ ID NO: 9525 - DNA, 4525 bp, Unknown
  gut microbiota DNA sequence
agaaatcagggatgacgataaggttccattctacccgcaaccgccgccttcggacggccgcgaacgggaaaagaacacgccgcgctgcaggacgcttcgctcgctcgggatggcagatcgcggctgcgtctttggtgtcctttcggtgtggatcctccagctatgatgggcgcattcggaacgcgaggagaggagccgcccatgcaagcgacgaacgagatcaggaacatcctggcgaaaggccaggcgaaagccggagcgaacccgttggccgtgctcgacggcatcatgagcggagatgcgctggaagccgtcgcgggcggcatcggcatgggcgactcctcggcagcgtacgccaagatggccaagctgcgcaccgagacgcgcgtcgttgagctgggccgctccggcaacgaagcctacgacaggctgcgcagcgcggcggcgcagatccgcaaaagcctgatcacgctgcacgaggctccgacgggcaacccctacgtcgcctacttcaacaagggcatcgtcgcgaaccccgccgtcgtcgtcgccgaactcgtgtccacgggcggcggcgcgcgcatcgagctcacagccttcaccgcgaaggtcggcctggtgcagggacactcgtgcaacgcggccatcgacaagctggccaagctgctgtagactcgtcggcgcgcgaagcccgcgatgcgggcgagtcctccgaagccttcgcctcgtcgccgtgtataatcgcatgcgaacgaaagcagccggacgtcctcagccggccttggagagaaggcagcccatgagcttcgcattgaacccctacaccgctcccgacttccaccgcgagccgctggccggcgcgcccgacgccgtgctgctgccggcgccgaaagacggcgtggcgcccgaaggctaccacgcgatgagcatctaccccgagtacttcaagatcgacggcgcatggctgctcgcggaagacagccgcatggactgcgttcccgtctgcgaggacggacgcatcttcgtgcgcgagttccgccacatccgcgcgggagatgccatcgtgtgcgggcgcaccgagtcgggagagcagggcatctacgtccacacgaccgggttcgaccccgcgccggacggcgaaggcgagctggccgacgcggggcgccacgccgacaacttcgccttccgcttggggcgctcgcgcgagacggcgttctcccgcgagtacgacgagctctacgagctgctgaagcacgagcgcgaacacggctacgtcgtgtgggtgatggggccggcgttctcgttcaacggcttctcgcgcacggcgttctccaagatcatcgaggcgggctacgtcgacgcggtgttcgccggaaacgcgctggccacgcacgatctggagggctcttacttccacacggcgctcggccaggacatcgagacgcaggagaaccgcccgctcggccactacaaccacctggacaccatcaaccgcgtgcggctgtacggctccatcggccggttcatcgaggaggagcaggtgtcgggcggcatcatgcacgcgctggagaagaagggcgtgccctacgtgctggccggctccatccgcgacgacggcccgcttccgtgcgtgctgggcaacgcctacgatgcgcaggacgccatgcgctcccacctgcgcaaagccaccacggtcgtgtgcatggccaccatgctgcacaccatcgccacgggcaacatgacgccatcgtaccgcgtgctcgcggacggcaccgtgcgccaggtgtacttctactgcgtggacatcgccgagttcgcggtgaacaagctcatcgaccgcggctctctggcctcgcgcggcatcgtgacgaacgtccaggacttcatcgccaacgtggcgaagggtctggggctgtagggaaaaccgccacgaatccggagtcgggcgctcacgcccgtcgcgcgcgccgcctgtgctcagcgagcgaccacatcgcacccgccgccgcgcccgcgatggcgaccacaagccatccgaggcccacgtcggcaagcggaagcgcatcgaggggcagccacgcgcccggcgcgaacgcgtcgcgcaggcccacggccacgctgaacgccgccgtcgccagcacggcgcagggccacatgcgcggcagccggtcgcagcgcccgtgcgcgaggcccatgaccaccagcacgatggccggcggatagagcgcgcccagaagcggtgcggaaaatgcgaggatggcatcgagccccaccagcgacaccgcgcagctgaacgcggcgaacgccgccgcccacgccggaagcgggatacgcggaaaagcctcggagaagtactccgagcagcacgagatgagccccgtgcatacgttgaggcaagccagcaggaagatggccgccacgatgaccgtacccgccgggccgaaatgcgcgctggccgacgccgcgaggatggaagcgccgttggccgcgtcgggcatcgtcgagcccatcgccgagcccacgaacgccagcccgcagtagatggccatcatgagcgctccggcgatgaggcccgcgcccgaaatggagcccgccacgcgcttcgggtcgctcacgcccagctcgcgaacgttcgcagccaccacgatgccgaagcacagcgccgccagcaagtccatggtctggtaccccgtgagaaaaccgttcgacagcgggctcgcgtcatagggcggctgcggagccgtcggcgcgggcgcgccgcccagcacggaggcgccgaccaccaacacgatgagcaggatgagggcgggcgcagagaaacgccccagcacgcgcgacaacagcccgggtcgcagcgccagcgcgaacgccacgccgaagaacgcgacggagaacgccgccgttgcgacgcccaggccagccgcatcggttacgggcagcaggggcctcagcatctcgaaggcggtcgaagacgtgcgcggaatggcgagaaacggcccgatggtcaggtacatgagcgcgatgaacaccgaggcgaacagcgggctcacgcgcccggccagctcgcgcacgccgccgcacacggccaccgccacgatgccgagcaccggcaagccgatacccgcgatcaagaaacccgtcatggcggggatcgcctgatcacccgcctgcaatcccagaagcgggggcaggatgaggttgcccgcaccgaagaacatcgagaacagcatgccgcccacggccagcagctgacccggccgcagcgcgactgcgcgccgcccgctagacaccgagcaccccttgcgaaacgagcagccacacgagcgccgccacccacagcacggccacgacgacgcgcacgggattcggcacgcgcaggctggctgccgggatcatgaacatggcgacgagcccgccaagcgcccctcccagatgcccgctcacggagatattcggcacgagcagcgtgtacgccacgttcacggcgatgacccccaacatgcccttgctgtactgcgtgaagagcgaacggttccccttatgcagcacggctaacagcgccacggccacgaacaggccgaacacgctggtcgaagctccggcgctcaccgcggagccgccgccgagcagcacatcggccgcataggacaccgcattgcccgttattcccgcgatgaagtacagcgcaagatagcttcccttgcccagggtgcgctccaacacctcgcccacgctgtacagcgccaccatgttgaaaccgaggtgcatgaggtccatatgaaggaacatcggcgtgacgaaacggtacaggtcggccggcgactggacaagcggcgcgtacatcgcgcccatgtccacgagggtgcgcgtggaaatgtcgatgcgcatgccggacagcaccgcctcgagcgcgaacacggcgacgttgatcgcgatgagcgcgagcgtgaccagccgataacggttgcgctcgaagaagctcggctggctgtccgccatcatccgtttcagctggtcgtcatcgatgaccgccctttgttgcggctccaccggctcgttcaccttgtatggcacgtctgtctcctcgaacgtcgtactccgaaagtcggaacatactaccacgaggatagagccggtcgatgattctgcacttcacgtccattcctcccgaaagcggaaaggctgcgctgcgggccgaggatgcgcctgaaaggatcgcttcgacatggcggaggcgcgggcaaaggagggatgacacgcaccgacgtgcgccgccttctggttcccaacgcgccagaaccgtcacctgaagccgtcgcccagccttcttcgccgcgaacgcacggtttcgacgccttgcgtgcagcgaaagcgccggtttggcagtcccggctcgatcggacggcgcatcccggggcggcgacggaacgccacctgggattacgcctcgccgatgctcgggaaggagcgtcgagcgcggtcgaaggccgccgaggactgccaaaccggcgatttcgctgcacat

SEQ ID NO: 9526 - DNA, 1712 bp, Unknown
  gut microbiota DNA sequence
tggcgacggaacgccacctgggattacgcctcgccaatgctcgggaaggagcgtcgagcgcggtcgaaggccgccgaggactgccaaaccggcgatttcgctgcacatcgtcttgcgaaaccctgcagcgaggcgtcgccgagacagccgaaagggcgaggttgggcgcgaatcgcgcgacaaaaggaacggggcgagccgaagcccgccccccacgtgcaacgccaagcggtttctccgcctaggcggcgaccgtctcgctcttgtccttcttgcccggcacgagagcggcgatgcaggccagagccgcgccgaccgcgcccacgatcaggagcggcaggctccctgcgttccaggcgcccgcgtccaggtagaggatggcgcggatgccctcgctcatgaagcgctgaggagcccacgggtacacccagtcctgccagaacgccggcagagcctcgaaggggaacgtgcccgtcatcatacccaacgcgaacccgacgagcgcaagcaggccgccaagcgccgtggagatgttgaacgcgccgatgaacacgagcatcacgcagaagctggcaagccacatgaacggcacgatggcgtccatgggagcctcgataccggcgatccacagcagcatgcagaacgcgcacaggctgacgatcagcgaggccacgacggcgtaagccgcctggatcccgatggacttccagcgctccgcgctcgtcgcatccgtcttctttccgaagatgcggctgaggaacagacccgtcattatcgacaccatgaacagcggcatgatggcaagctgcagcgacaccatgccggacatgggattggccgccgctccatcgccatcggaagccgacccttcgtgaatggtctccacgtccacgtcgacgcccatctgctggaacatcgaggggatgctcgcgcccatctggctggccacgagcgggctcttcgccttgtcgatgagcaccttgagagccggagcctccacttcctcagcctcggaagccccgtcgtcttgcgcggcggcggccaaagcagcggcctgagccgcatcgccttgcgcggccgccgccgcatcccctccctgcgccgcagcggcggcagccatcgcggcagcctggtcgccacccgcagcctccccgcctgcggcggcagcagccatggccgcagcctggtcgccacctgcggcagcttcgccgccggctgcggctgcttgggccgccgcagcggcctgggcctgcgcctgcgcggccatcaaagcctgggcttgcgcgagcgaggccttcgtctcggcctgcttgaccgccatctgctgggcgctgaaatcagcgggaacgatgatcgcgccgtagtattcgccgttctcgagagcttcgtccagctctttctggctgcccaccttcgtccaggcgatgggcgattcctcgccgtcctccgcagccgtcgcggacgtgatgttctcgaccagggtatcgcccacgttcatatcgccctgcggcgtctccacgccctcgtcgagcgacagaaccgcgaacggcagccccttcatctccatattcgccatcgggtagaacatgacggacatgacgcatgccgccacgatgccgatgagcagcggcactacgtacttcgctttcccgagtttctcgaacaccgggagcctccttccgaatgcgtcgccggcgcttgaccgcgcccgc

SEQ ID NO: 9527 - DNA, 285 bp, Unknown
  gut microbiota DNA sequence
gcctgcttgcgctcgtcgggttcgcgttgggcatgatgacgggcacgttccccttcgaggctctgccggcgttctggcaggattgggtgtacccgtgggccccgcagcgcttcatgagcgagggcatccgcgccatcctgtatctggacgcgggcgcctggaacgcagggagcctgccgctcctgatcgtgggcgcggtcggcgcgatgctgacctgcatcgccgctctcgtgccgggcaagaaggacaagagcgagacggtcgccgcctaggcggagaaaccgc

SEQ ID NO: 9528 - DNA, 333 bp, Unknown
  gut microbiota DNA sequence
caccagatcgtgctggatgctgcgcgcgaaggcgtagggaatgtcctcctgctcggcgatgtcggacaccgacacgtaggaatccccgctcttgtaggcggccctcagtatccggcaggcgtagtcgcagcggcgcgtgacgtccattagtttccctcttccccgtcgagcaggtcttccagatgctccaactcgcgcctgaagtcgttcacgaccgcctcttcgagcgcgcggtactcgtcggaatcgagcggctggtaagccgccagcttgtcgtacaggttgtccgccgtcaccggcaggtagcggcgcgcgacgaggctggccttgtaa

SEQ ID NO: 9529 - DNA, 1239 bp, Unknown
  gut microbiota DNA sequence
aacgtaggcctccccgctcttgtaggcggccctcagtatccggcaggcgtagtcgcagcggcgcgtgacgtccatcagttcccctcttccctgtcgagcaggtcttccagatgctccagctcgcgcctgaagtcgctgacgaccgcctcctcgagtgcgcggtactcgtcggaatcgagcggctggtaggccgccagcttgtcgtacaggttgtccgccgtcaccggcaggtagcggcgcgcgacgaggctggccttgtaagcctcctcgatggcctcgcgtgcggccatgtacatatcgtagcgcggcatctgcgctgaatagcgcacaagcgatgcacggtcgatgccgcgcagggacggatgctcgcgggctatctccatccagatgtcgtcgcgctcggacaccgtgggaaagtcgatgtcgatcaccgacagcggctccaggaggtcgaagaagaacgggtcgatctcccccgcctcggacgaggaggccagcacgaacacgtcggggttctccaccgccgagcggatgaggctgatggcctcgcgcgcgccccgcgacaggctggccatgatgaacccgcccagatcgtcgccggccgactccaccatgggcgacatccacagatccaagtcctccagcatgagcacgccagcgccctcgaaggcgttgcgcgccgcgttgagcttcggctggcggtcggcctgcgccatgacgcacagcaccggcatcccctgaaggttctcctccatgtgcatgcggatggccggcagccccagctcgcccagcgtggccgccatgaatcggttcgcgtcctcgcgcgccggagaacggaacagcagcgcgtcggaggccggcatgcggtccaggccgtggcgcgcgttcagcagctccaccagctcttggaagcgctcgtcgtgctgcatgcccaccccgaagtcgcgcatgagcttcacggtctcgtcgtagcccacgagctcgcgatacgttatgttctcgagggacgacaccaccgcatgagcgtccgcgtcgtcgccgcaagcctggatggcctcggcgagcgacttctgcacctcggagacggacggggccttttcgccctcctcgccgccctcgtccgccgcagcactctgagcggcctgcggcgcagcctcggcgacgcacgccgaagacggctcggtgacgtgctccacccgcatgaggcgcgcggcatcgaagcccaggaagtcctgggag

SEQ ID NO: 9530 - DNA, 851 bp, Unknown
  gut microbiota DNA sequence
tacctcggagacggacggggccttttcgccctcctcgccgccctcgtccgccgcagcgctctgagcggcctgcggcgcagcctcggcgacgcaggccgaagacggctcggtgacgtgctccacccgcatgaggcgcgcggcatcgaagcccaggaagtcctgggagatcatgtcggtcatgtcctccaggtcctcgcgcgaaaggccgtactcctccagcttgtcgagcgcgaggctctgcagctgctcggcgcaagccgcggcctcgtccgaggacaggtagggctcgaggcgctcgaacgcgtattcggcgatggagcgctccttgagcttgcaggccagctgccaggcctgcttcaggccctcgagcgccgcttcgtcgacggcggagccttcgccgtgctgcgcgcgctcgaacgccgccagatacagatgcatgccgaggaccgcgtcgcccgaagcgcacgcctgggaagcgagccgcaggtactcggtcgaggaattgctatgctcgtcgttctggctgggcgagctgttcgcatcgttctcaaacatggacccaacctccttttcgatgtgatcgcacgtcgcgagaaaatgactatgtccaggtcacattttacccaagaagaaagcccccgcataggtcgaaccgcaaaaaccccaaaacgtaagcaacccgaagggtatgagcgcaaggctctaccagtcgaggatctcccagcccttttcgcgcgcggtgcgggcgagcggccgatcgggcgacacggcgcgggggtgctccgcggccgacagcacggcgcggtcggaatgatggtcgccgtacgcgtaggcgagctcccagttgcccg

SEQ ID NO: 9531 - DNA, 4132 bp, Unknown
  gut microbiota DNA sequence
tggtgctccatggcgcgcaggatgataggctcgaacgtggccgagatgaccaccacggtgtcccccgcctcggcgtgggcgcgcatggcggcatccgcctcgggcctgaacagcggcgcgatgcgctcgtcgtagaactcggcgaggaaggcgtccacctcggcggcgggcttgccctcgaacgccgtgaacacgagaccgcgcacagccgcctcgttctgcggcaggcgcagcttgtaggcggccgcccacagaaggatgcggaagacgactcgcttcttcagcatcttgcgactcagaaggtggctgaccagcagcacgggcgagttgcccgcgatgctggtgccgtcgaagtcgaacacggcaaggcgcgccttgccttcaggcgcgccttgcatctgcgctgatgcgctctcagttcccgttgcgggcatacgtcgctgttcccattccctgagcgagggggcgaagacgcgcccgtatgcgctagtcctccacctcgtcaatcgtctcggtgaactgagaattatacaactccgcgtagaaaccgccaagcgccagcagttcctcgtgcgtgccctgctccacgatgtcgccgtcgcggatgacgaggatgagatccgcgctcttgatggtggacaggcgatgcgcgatgacgaacgaggtgcgcccggccatgaggttgtccatagccttctggatacgctcctcggtgcgcgtgtccaccgagctggtggcctcgtcgaggatgagcatgcggcggtcggccaggatggcgcgcgcgatggtcagcagctggcgctggccctggctgatgttgctggcgtcctcgttgatctcggtgtcgtagccctgcggcagcgtctggatgaagtggttgacgtaggccgccttcgccgccgcctccacctcctcgtcggtggcgtccagcttgccgtagcggatgttgtcgcggatggtgccgtggaacagccacgtgtcctgcagcaccatgccgaacaggctgcgcagatcgtcgcgcgcgaaatcgcggatgtccgtgccgccgatcttgatgcagcccgactgcacgtcgtagaagcgcatgagcagcttgaccatggtggtcttgccggcgcccgtgggaccgaccagcgcgacggtctggccttccgacacctgggccgagaagtccttgatcaccggcttctccggatcgtagccgaagcgcacgtggtcgaactgcacgttgcactccacgtcggcggtacgggcggtcgcatggtcgggctcctcctcgggcgcgtcgaggaactcgaagatgcgctcggcggccgcggccatctgctgcagcacgttggacacctgcgtgagctgggtgatgggctgcgtgaagttcttcacgtactggatgaacgcctggatgtcgcccaccgtgatgatgccctgcacggccaggaagctgccggcgatggcgacggccacgtagcccaggttgccgacgaacgtcatgataggctgcatgaggccgctgaagaactgcgacttccacgccgacccgtacagcttcgcgttcgtctcgttgaaacggtcgaccgtgccgtcctcgcggttgaacgccttcacgatggcgtgacccgagaacgtctcctccacgatgccgttgatcttgccgagcgtgcgctgctgcgccacgaagtacttctgcgagcgcttcaccaccaccatgatgagcacgatggaaaccggaagaatgaccacggtgatcagcgtcatgagcgggttgatggacagcatcatgatgagcacgccgacgatggtggtcaccgacgtgatgagctgggtgacgccctggttcaggctctggcccagcgtgtccacgtcgttcgtgatgcgcgacagggtgtcgcccacgctcgtgcgctcgaagtagcccatgggcatgcggtcgatcttgtcggcgatggcgccgcgcagctggtagcacgtgcgctgcgaaaccgagctcatgatccagccctgcacgaacgagcatgccgcggacagcaggtacaggcccagcgtgaacacgaggatccgcgcgatcgcgtcgaagtcgatgccgcccgagccgtcgatcttcgccacgatgccgttgaacagctcggtagtggccgtggacagcaccttcggccccacgatgttgaagatggtggagcccacggcgaatacgagcaccaccacgatggccgccttgaagcgacccatgaaggcgatcagcttggcaagcgttcccttgaggttcttcggcttctcgccgggcatcatgcgcccgccgggaccgtggcccatgggtccgcggcgaggttcctgcgcctgggcgttctcctgcgcgctcatgccgcatcacctccgttcagctcggcttccgacagctgggacatcgcgatctcccgatactcctcgcaggtttccatcagctcctcgtgcgtgccctggcccacgatgcggccgtcgtccagcaccacgatgcggtcggcatgcagcaccgtcgagatgcgctgcgccacgatgaccacggtcttgccgcccaggcgcgtgtgcagctcctggcgcagcgcggcgtcggtcttgtagtcgagcgccgagaagctgtcgtcgaacaggtaggcgcgcgcctcggtggccagcgcacgggcgatggccaggcgctggcgctggccgcccgacacgttcgagccgccttgcgacacgcgcgtgcccaggccttcctccttcgaggcgacgaattccgacgcctgggcgatgtcgacggcctccctgatgcggtcgacgggcatcccctcgtccgcgtaggccacgttcgactcgatggtgcctgagaacagaaacgccttctgcggcacgtagcccaactgctcgcgcagcgcctgctgcgtgacgtcgcgcacatccacgccgtcgatggtgaccgagccctccgtcacgtcgtagaagcgctcgatgagcttgatgaccgtcgacttgcccgatccggtggagccgatgagcgccgtggtcttgccgggctcggccgtgaagtcgatgtgctcgagcacgcattccttcgaatcgccgtagcggaagctgacgtcgttgaaggcgatggtcgcgccctcgcccgagcggcgcagctcggcgtcgcgggccttgtcggcggccgggtcgcagatggtgggctttgtttccagcacctcgttcacgcgctgggccgccacgtcggcgcgcggcagcatgatggagatcatgccgatcatgaggaagctcatgatgatgaccatcgcgtaggtgatgaacgcgatgaggtcgcccgtctggatggtgccgttgtcgatgtagctgccgcccacccacacgatgagcaccgacacgccgttcatgatgagcatcatcaggggcatcatgaacgtcatgacgcggttcgtgaacagctgcgtcttcatgagcttggtggaagcctcgtcgaagcgcttctcctcgtagggctggcggtcgaacgcgcggatgacgggcaggcccgtgaggatctcgcgcgacacgaggttcacgcggtcgatgagggtctgcatgatctggaacttgggcagcgccacgcgcatcagcaccatgatgagcacgaagatgaccgccacggccaagatgatgatccagctcatggcgaggttcgtgcgcgaaaccatgatgatgccgccgatggcgaggatgggcgcgtacagcaccatgcgcagcagcatgacggtgaccatctgcaccagctggatgtcgttcgtgccgcgcgtgatgagcgaggcggccgagaaactttgcacctcggcgtccgagaacgacaccacgcggcggaacagcttcgagcgcagcgtggcgcccaccttcgcggccgtgcgcgaggcgatgaagcccacgagcacggcggcgaccatgccgagggcggcaagccccaacatcaggaggccgatgcgcacgaggtagcccatctgcatgtcggacagattgtagccgagcgactcgtactccgccttggcggcggcgatggcctgctggtcgacgatggagtcgcccatgccccccatatgctgcttggcctcgtccagcatatcgaggatcttctgcttgtcgatagcgccggcctcgtagg

SEQ ID NO: 9532 - DNA, 1370 bp, Unknown
  gut microbiota DNA sequence
aaggccgatgcgcacgaggtagcccatctgcatgtcggacagattgtagccgagcgactcgtactcagccttggcggcggcgatggcctgctggtcgacgatggagtcgcccatgtcccccatatgctgcttggcctcgtccagcatatcgaggatcttctgcttgtcgatagcgccggcctcgtaggcctgcatcacctggtcgaggtcgaggtcggggatctggctggaataatggatggcaaccagcggcagggccaccatgcggtcgagctcctcctgctccttcttgccctggtcgttgagcttgtacgtgccgtcgtccgtctcggtgtaagcgtcgcggaacgtctgctcgtcgtcgaccggaagcatcatagcgatctcgtcatgggtcttggccgtcatctcgtcggtggccgcatgctccacgccggactgctggatgcccacatcgacgatatcggacgtgtagtgcggcagcgccaggtcggtgaacgcctgcacgacgagcaggcacacgatgagcagcacggccaccttgcagttcttcagatagcgaattatgcgcacggcgcctcatctccttccgcgcggctcttgcacgtcgcctcaggatccagctcgtggaactcgaccactttgcgcaggatgcgaacgagatgccgcatgtcctcgatacccacgtgctccatgaccgcgtccatgtgctcgtcgcgcaaacgtctgccctcggcggcgaagcgctcgccctcttcggtgaggcttaccgacacggcgcggtaatcgccgcttgcgcggtgccgctcgatgaggcccttctcctcgagggtcttgaacgtctgggacaacgcgctcggcgtcgtgtgcgtcagctccgcgacgcgacccggcctgacgtcctcgcacgtatgctgaagagcgctgaccgtcatcatcgtgcgcgcctcggacggcgtcacgccttcgggcgttggcggcgtgaaccgctcgcgccgtgagcgctgcataagctcgtacagctcgcgtttcgtctcattgaacgaatccgtcatctcatcttccttgccttcgattcctgtcgtatacaatttagtcgctaaactttatcactactgtgaaatttcacaccaaaatgtttccctcatcacagaacctgcatgcgaacccggcgcacgctttcccaaactttttcaaattggggtattgcgcgaatcggcgacacccggtaatatattccgcgctgcaaagcacggggtgttagctcagttggttagagcgccggcctgtcacgtcggaggtcgcgagttcgagtctcgtacatcccgccatctgaatacagaaagcccgccgatcggcgggcttttttt

SEQ ID NO: 9533 - DNA, 1191 bp, Unknown
  gut microbiota DNA sequence
gcatgaccgacagcacgcgcaacggcgcggaggcttcgggggctacggcatcggctgcttcgcagcacgcgcgcagcagcacgtcgggacgtagcgagcccgtcggcttcgattccagcgagaacgtggccacggcgccggacagctccagctcccccacgaggaaatcggccgtgcacagcaccttctccttcttcttgcgcaccaccgtaacttcgtctggcaccggaaaggttgcgggagggtgcgacagcagcgcgcggtagacggcgatagggtacgccgccgatgcggccggcgcgtgcggctcgatgtagtcgcacgccttcaccatcaggtcgggcacgcttgcgcgctgcagagcctcaagcgcctcgtcgacaggcacgtagcgcgtcatctgcaggtctgccagctcgtgcgtgccgcccacacccacgggcaacgccgcgccgaacgcgatcttcatatggggcgagaagccctggctcactgcgaacggcaggcctgcgcggcgcaccgcgcgctcgagagcgcgcgccacttcgagatgagacagcatcgccaggcgtccctgcttgcagaacgtcatgcgcagacggaacaggttcggatcaggcatgggtcgcctcctttccggcgccttcgcgccgcgcgggatccttcgtctcgcttcgctctcccaggatgacggaggaggcgtcggcttcgccgctttgcccgggatggcgaaggagctcggcttcgccgcttcgtccatgacggcacgagggctcgaccgcgttcgagccggacgccacgcggggctgggccagctcgttgtccaccccgagcgtcgggcacgcgccgcaggccgagcagttctcgaacgtgcagtcgggcgtcgtgcgcccctcgtcggccaagcggcgctcgcgcgccagccaccgcgtcgacacgccggtggaaatatgctcccacggcatgacgcgggtcgtgggatacgccgtctgcgcgatggcggccgggtcgatgcccacctcgtccgccgcctcgcgccaagcggcctctgcgaagcactcggtccacgcgtcgaagcgcgcgcctcggcgccaggcggtctccacccacgcggcggcttcgcgccccgcgcggctcatcacggcctccacgaagctggtggccggatcatgccagtgcacgtccacggcg

SEQ ID NO: 9534 - DNA, 2431 bp, Unknown
  gut microbiota DNA sequence
ccggcgccaggcggcctccacccacgcggcggcctcgcgccccgcgcggctcatcacggcctccacgaagctggtggccggatcatgccagtgcacgtccacggcgcggtacttcaccgagttgcgcagcagctgcacgcgccgcagcgcctcctcgggcgggatctgcccgtcccactggaacggcgtctgcgccttcggcacgaacagcgcgcacgacacgctcatgcgcaaggatccgcgctgctcgggcggcgtggcggccttcatgcggtcgtaggctcgctgcgcgaggctcgcgatgcccttgatgtcgtcgtcggtctcggtgggaaggcctatcatgaagtacagcttgcagcggcgccaccccgccttgaacgcggcgtccaacgcgccgaacaggtcgtcttcggtgacgttcttgttgatgacgtcgcgcaggcgctgcgtgcccgcctcgggcgcgaacgtgaggccgcccttcttctggccggccaccagctcggccatgtccacgccgaacgagtcgaggcgctgcgaaggcaccgagatgcgcacgcccttcccgtcgcaggcgcggttgatgcgcgtgaggatagaggcgatctgcgagtggtcggtggacgacagcgacgtgaggctgacctcgtcgtagcccgtctcggccaggccttgcaccaccgattccaccacgttgtcggccgagcgctcgcgcacggggcggtacatcatgcccgcctggcagaagcggcagccgcgggcgcacccgcgcaggatctcgacgttcagccgatcgtgcaccacctcggtgaacggcacgatgcacggctcccagccagggctttccgcgaagccctcgaacaggctcttctcgatgcgcagaggcaggccctcttccaaaggctcgatccacgagcccgcttcctgcgcctcgtcctcggcacgccagcggtacagcgacggcacgtaccagcccggctcgtcggccagcgcgcgcaggatgtcggcgcgcgcagcgccctcggcgcgcaggcggcggacgacggccaggccgcgcggcaaggcctcctccccttcgccgatgctgaacgcgtcgaagaacggcgcgtagggctcggggttgtaggcgcaggggccgccccccaccacgagcgggtcgctttcggcgcgctcgtctgcatgcagcgggatgcctgccaaatcgagcgtctcaagcacgttcgtagccgccagctcgtgcggcaatgtgatgcccacggcgtcgaactcggcgagcggcgcgcagctctctatgctgaacagcgggatgccctcggcgcgcagcgtgtcgcacatggcgggcgcaggaagaaacgcgcgctcggcggccatcccgtcgacggcgttcaccacgttcacgaggatgcgcagcgcctggttcgcctgccccagctcgtaggtatcgggatacaccatgcagaagcggaagtccgcttcgggcttgtacacgcagccgaactcgtggttgaggtagcgcgcggggcgctccgcagcggcgagcagcggctccagacgcggccagagatccgtcatcgaactcgtttcccttcttcggtttgctttagcgggagaatcagcggactttgccggaagcgaagcgcgtgagggcggcatcgcgcaccccgccggccgcctgtgccgcgcgcccggcgcggtcgcgcacggcgtccatggccttcgccccggtcgcctgcgccttctgcgcagcgcgcttcgcggcggcctgcaccaccttgtcgcgcgccgcggccacggcgtcggtgagcttgcccagcgtggctccgtcctcgtagtactcgatggccgcgcgccccatggcgacggtgcccgtgtagccgatggcggctttcacggcccagccgagcgcgggtacgaacgccaccagctggcgcgccaccgcgcggcaggcgaacgcgccgcccacgagggccgcaagctccttcacgcgctccatgttgagctcttctccgtacgcggcggcaatcatgagcagcatcttcgcttggttgagcgtcatgaccggcatgtcggcgcccggaatgatgaccagcaggcccacgcccgcgttctgcagcgccgtggagttcacggcttccagcgacaggggcttgcgcacgaacgggaacgccagcgcgaacgcgaggcgcttgtcgttgcacgcggcgatcacccagccgcccatgcgctcgctgagcgagccgacggcggcgccgtcgagagcgtacggctcgttcggcgaaccggcgcccagagcctgcacggcctcggcgccgcccgcagcggcatcgggcaccggcagcacagccggctcggccttggggggcttggggaagacgaggtcgccctgcgggatgggcgcgccctgcgccttcgcgatgtcggccacgag

SEQ ID NO: 9535 - DNA, 3160 bp, Unknown
  gut microbiota DNA sequence
gtgaacgggcggccgtcgaggtacatgagcgacacgcgggcgtgcggcgacgcgctggcgaacgcttggcgcacgtgcgcctgcacgtcgcccggcgcgctgtcgtcgaggtagacgctcaccgacagcgtcgtgcgacgcgcctcgtcgatgttggtggcttcgtcgataaccgctttgatgtcaacgggtagctgcataaccgccccttttcctagcgttgcttctggatgttgtgagtccataccgagccgatcatgccgagcatgatgaagttcatcaccatgcccgtcgctccgtagctcacgaacggcagggggatgcccgtgatgggcatgagcccgcaatccatgccgatgttttcaagaatctggaacaaccacatgccgacgacgcacatgacgatggtcatgccgaacagatcgctcgaagcgccggcaatgcgaaagcttatcaaaaccaggccggcatacaaggccagcagcgccattacacctaaaaaccccagttcctcggccagcacgcagaagatgaagtcagtgggagcctcgggcaggatgcccagcgtatgctgcgttccctggaacaggcccttgccgaacaggccgcccgacccgatggcgatctgagcctgcttgaggttgtagctctcgcccgtagggtcgatgtcgggatcgaggaacacgagcaggcggttgcgctgatattgcttgagcagcttgtactcgccggtggagttgtagatgatctggtccacgacgaacacggcgatgacggccgcaacgaaggccgcgagggtgatcagcaggtacttcggacgcgcaccgcctaccacgagggcgaccgcgccgatgcataggtacaccaggcccgtgcccaggtcgggctgcgtcatgatgcaggcgaacggcaccagcatgaggccgagcgccttgacgtactcgcgcgggtcgtccagcctgccgccgtagcgcgccatgatgctggcgtccagcaggatgaccgtgatcttggcgaactcgcccggctggacctgtatgcccagcttgagccacgactgcgcgcccatgcccgcgtcggttcccagccccggtatgtggggcgagaggatgagcgccacgttgacgatgaggaacagcatggtgaagtccgacaggcggcggtagtcgaacctccagaccagcaccatgaacacgattcccaacgcgacgcccgccagctggttcgtgaacgagtagtcgcggtcgttggccacggccgacatcacgacgacgagcccgtacgacaccagcagcgccaccacgaggatgaacgggatgttgagccacgggaagcgtcgcgcgcgcgtggcctgcgccacgatcttgtcgggcgctttcactgaatcgatctgcggtagctgcggcataacgcctcctttcctcgcctcgtctagtcggtacggccgccggacgtcgcggcgcccgcgccttcgaggaccctgccggtggctccggcgatcacgcccatgccggcgcccggatcctccgcggactcgctggcaagcgcagccgccagaaccttcgcgcccagcggggccgccacggccgaaccgccgccgccgtgctcgaccacgcaggccaccacgtactgcggatcgtccaccggcgcgtagcaggcgaaccacgcggtgtcggccatgttggtgtactcggcggtacccgtcttgcacgccaccgtagcgggatcgatgccctgctcgttgagcagcttcgacacgtcggcgttgtcggtcgccacgccgttgagggcgtcgcgcatgaacgcgaggtcggcttcgggaacgtccagctcccccgcggtctccaccttgaccgaggcggccacgtcgccgctggcgttgcgaacctccttgagcaagtggggcttcagcagcttgccggtggcgacggcgccgtaggcgacggccacctgcaagggcgtgacgagaacgtaaccctggccgatgatcatgttcgtcatgtcgccgcccttccacaccgcctcttcgggcgtgttgcggaaatgctccagtttccattccggcgtgggaatgacgcccaccgattcgccaccgagatcgatgccggtgtagcggtcgaagtggaacttcgcgaggtagtcctgaagggcggtctggctgacctgaccgtcccgagccgcctcgaagaagtcatgggcgatctggtagaacacgacgtcgcacgactgcacgatgccgccgcggaggtcgagcgtgccgtggcccgagtgcttccagcacatctgctcctgacccgtgccccagccgtcccacgagccgttgcacgtccacgtgcgcttcatgtcggcgaagccgttggccagcgccgcgaggcccgtgaacgtcttgtacgtcgaggcggcgggatacgtgcccgagatcgcacgattgagcaggggcttctgagcttcgttggaattgtacacgtcgtacacgtcgctcgacacggcgccgatgaattcgaccgggtcgaacagagggtagttcgccatggccacgatgcctccgtcgcgaaggtccatgaccaccaccgagcccgccacgccgctgcccgtgccgatagtcccattctcaggggcgatgagcgcggccagctcgcggtcggccacgtactgaaccggccccttgatggcaaggtgcacgtccgagcccttggttggctgcgtctcgctcaccacgcgcaccacgttgccgtcggcattggcgaccaccttgcgcttgccgtgttcgcccgccagcagatgatcgtactgcagctcgatgcccgacgcgcccatgtcgtcgcccagctccacctcgcggccttcgccgacggttttcagaccctcttcggtgacggggcccgtgtaccccaccacgtgcgcggcgagcgcgccgtaggggtagtcgcgcacgtagcgctcctcgatcttgaccttagggaacgcgtcggagtgctcggtgatgaaggcgacgtcgcgaagccgcacgtcgcttgccacgacgcgctggctctgcgcgccggccgtcgcatcctggatgcgctggcgcaccacgttgtacggcacgccgagcaccgcggacaggcgctgcaccacgtcgcggtcgttggccacctccgcatcggccaccacggtcagc

SEQ ID NO: 9536 - DNA, 13779 bp, Unknown
  gut microbiota DNA sequence
cgccacgacgcgctggctctgcgcgccggccgtcgcatcctggatgcgctggcgcaccacgttgtacggcactccgagcaccgcggacaggcgctgcaccacgtcgcggtcgttggccacctccgcatcggccaccacggtcagcgacacgcggttcttcacgagcggaacgccgttgacgtcgcagatgtagccgcgcggcgctggcgtggagacggtggcgtactggttgtcgtccgctttgctgcgatacgcctcggacgacagcacctgcatggtccacagcttcgccgtcagcgtgccgaagatgcccgccgccagcacgcccatggcgacgaaccgcgacttgaggttgtcggccgggttggacgccggacgctgcgccgagcccgggtgcgcctgcatggatccgttgacgcgaccgcccgcgtttccgaggctcgatttcacgcccaccgagctgattgagcgaacgtccttcttcacgctcacgttcgacgacttcgcgttgttgcgcacgacgaacacgacggataccacgatgacggccacgaccagcgtggcgacggcggcgatgatggcggcgatcacggcaaacgccccctatcgcagccggggcgtgcgcggtccgcggtcctgagcgccgctggcaagcagacgcgcgatgatcggatacagcacgagacccacgacgcagtcgtacagcgtgcacggcagcgcacggtacaggaacgcgtcaacagggcttgccgacaggcccagcccgatgagcagcgcgccgtacagcatctcggcggcgaacgtcgcgacgacgaaaatggtcaccggcatgaacagcgtgtcgttgtcgagcaccgagaacgcgcgcgatgcgatgaacgacacgatgacgaacaagaacgcgtagccgccgacggggcccgagcccaaaaggtcgcagacgagccccagcgcaaacggcagcacggggccggcgtcgagcgggcgcgcgatagcgactaccagcacgtaggccagaaggaagttcggctgcgccgagaacagcgcaatgttgggggctacgacgatttgcagcagcaaggcgacgaccgcgcctacggcgatgacgatgccttcgcgtcccaggttcacgatgcatcgcctccttcgttaccgtcggcctcgcctacggcgcccacgccgaacaccacaagcacttcttcgagggcacccgtcgtgtcgttcggcgatacgatcacgcgcctcgtggactcgccctggcgggtatccaccttcacgacggtgccgatgatgaggccgggcgcgtagctgccgcccagacccgacgtgaccaccacgtcgccaggattgaccaccgcgtcggcatcgaggttttccaaatacagcaggccttcgagagacccgcgcacgacgccctccgcacggctcgactccacgcgcgccgcggcgccggaatcggggtcggtgagcaggcgcacctcggcggtatgctcgcccgcgctgtacacctggccgacaacgccggaagtgcccatgaccgtaaggccggtctccaccccgtcggccgtgcccttatcgatggtgaccgcctggctccacgcctggtcgggattgccgatgacgcgcgctcccacaccgtcgatctcgtagaggtccttgagctcgagcagtttctggagacgttgagcctcctgcttgtactcatcggcctggctcagcagctcgcgcagctcggcgttgctctcgcgcagacccgagagcgtgctctcgtcggccgtgaggttgccgaaaccctcggcggcatcgttcacgcccgcgcttgcagccgcgccgacgaacttcaaaggcgcaactgcgccggacacgccgctctggaccgcgtgcagcgggccgtcctggccttcgcgcgagtacaacgtgaccagcgcaagcgaggctacgagaaatgcgacgagcagaactcggcgcagaaacaccgagcttctctgttggaaattaagcgccatcgataagccggctcaaccctatttcgagcgcatgagcgtctgcttgagcgccgtaggcgtctcgagcaccttgaggcagcccataaccacgttcgtgagcgccgtctcgctcgtccacacgggaatctccagcttgtcggtgagatagcggtcgagaccggacaagaggccgccgccgcccgtcagcaggatgccgttctgaatgatgtcggaggcgagatcggggttcgttttcttgaacgtctccttgatatgcacgaccatctcctcacaaggctgcacgagcgcggagcgcacgtcctcggattggatggtgacctccttcggctgctcggtgatcacatcctggcccgagatgatcatgtcgcgctcgcgaccgtcctcgaacggcaggatggagccgatcttgatcttgatgatctcggctgttcgctcgccgatcttgatgcccagcaggtcgcgcaggtgcatggcgatggcctcgtccatgcggttgccggccaggcgcagcgacgaggaggtgacgatgccgccgagcgagatgacggccacttccgtggtgccgccgccgatatccacgaccatcgagcccgtcggctcggtgacgggcaggtcggcgcccatggccgcagccatgggctcctcgatgaggtacgcctgacgagcgccggcctgaacggcagcctcgaacaccgcgcgcttctccaccgaggttgcgccgcacgggatgcagatgacgatgcgaggcttggcctgccagggatacttgcgcggcgccgctttgctgatgaacgccgagatcatggcctcggtcacgtcgtagtcggccactacgccgtcgtgcaggggatgctcggccgagaacgcctcgggcgtatggttgatcatgttcttggcttcgtggcccactgcgagcacgcgatgggtcgccttctcgatggcgacaactgagggctcgttgacaacgatgccctcgcccgggatggcgaccagtgtatttgcagttccgaggtcgatggccatatccgtggacatctggccagtcagacccgagaacatgtctaaaaaggacatacaggaaaccccttgaatctcgattccaggtgaaaccgaattctagcacaggcgttgacgcgatgatgaaaatccacgaggggcacacccgcgcctccgcctcaccgcccctctgtctcaccctcgtctcagaccaaaaaaagctggaacccgtaacggatcccagcctttccatcataagggaatgagacgttaacacgtccctttgtctcggtttagtgcacgctgcagctgaggcagggatcgtaggctcgcacgagcttctcgatctcgaggcgcacgacgtcttccgcagccccgtcggccaccagcttctcggccaaaaggcgcatgtcggcttccaggttcgccacgttctgcgccgtaggcgtgagaatggacgcatgcgtcacgcgtccctcggcatccagcgtgaggtcgtggaacagcgcgccgcgcggagcctcggtgaagcccacggcgcgccccgccttcacctcgaagggcacgggcaggctggagctggcgatggcgcccggctcggcaagcttgcggcacaggtcggcgcagcggtcgagcgcatccacgatctccacggcctgggccacgttgttcatgaacgggttcgcctcaggcgggcgcaagcccgccttcgcggcggccaccttcgcgttctgccccaggttctgccacgatgcgttgacgcgggccagcgcgccggtgaagtacgggctctgcgtctcgcgcacgcgcgccaacagagccgccgaatgcggcaccgcatgctcctcgatatgctcctgcacctcgttcgcatcgaagacgatgcccgcgttcaggaaaaacgcttggtcggagcattccaccgggtaatagtcgtcctccaccatggccagcatgtcgccggccgtagcgatgtcgggcacctcgaagccgcggaacagatccaccgcctcaagggcgaagtccatcgccgcatccatcttgtctgccagctccagatactcggccggctctatctcgtgcgtgaagccccccaccacggcggtgataggatggatgctgcgacctcccaccttcgtgcacagctcgttgcccagcgctttgaggcccagcgcctgctcgaacagctcgggatcggtctgagccagcgggaacacgctgggcatgccgaggaagtcgggtgcggcgaacacgaacagatgcgacgcatggttctgtaaataggagccgtacaccagaagctcgcgcagggcgcgcgtgcggtcggtcacctccacgccgaacacgcgctcgatggccttgaggtcggtcaccacgtggctcgacgagcagatgccgcagatgcgcgaagagatgtaggggatctcctcgaagcggcggccgcgcaccatgctctcgaacaggcgggccggctcgacgacgttcatctcgacggttttcacttccccgtcctcgatgaccacgtgcacgttgccgtggccctcgacgcgggcgatatgatcgacgtgaatcgctgttttcgtcatagaatgcgtcctcactcgctgcccgcaagggcggggttcgtctggttgaacatctcgagcgcctggtcgaagtcggcgaccgacacgccgtagcgcgccaccgcctcgcgcgccgacgccaggttcgcgtcgggcgacagccccctgcacccgttgcacggacggcccaggttaacgcacttcgcgccgcacccggccgtggtcacgagccccaggcacagctgcccctttccgaagaagcagctcgtctcgttgcgcttgcagtcgccgcacatcgtgcgcgagggatacgtcttgttcgagccgtacagcgcgcgctgcagcacgtcgatgaagtcgtagctgtcgatggggcacgcacgcacctcgaagtccacgtcgatgacggcgcccaccgcgcgcggcgccaccatgtcgccgcaggccgacggcacccgatcgtacacctgcccaggacgctcgaggaacccctctgcggccatgccgggaatgccggccgtcgtggcgcacgcgcccacggcgatgatcgcgcccgccttctcgcgcaggctgcgcaccgtcgcttcggattcctcggtggtgacggcgccctcgatgatggccacgtcgaagtcctcgggcatgggatcgctcgaggccagctgccaatagcgcagatcgatctgaccgagcacgtccagcaggtgcgcctcggcgttcgtgatctgcagttggcagccgaagcagctggccaggcccacgaccaccacgcgcggcgcggacggcttctcctggcaggctatgcagtttccgttcatgtcgcgcttctccatcctacatcgacccctggatgttcttggcttcccaatagttgaacacgggcccgtcgatgcacacgtactgatgcccgatctggcagtggccgcacttgcccatgccgcacttcatatggcgctcgaagctcacgtagatatggtcgtagctgatgcccttcttccgcatctcgtcgatggcgaacctatacatcaccggcggcccgcacagggcgccgaacgtgttggcggcatcgatctccaaatgctcgaaaggctttgtgaccaggccgacctcgccgtcccacgtgtcgtcgggatgatccaccgtcaggtacaggtcgaagtccttgcgatggcgccacatctcgaactgctggcggaacatcacctcggaggggttcttcgaaccgtagatgatggtgaccttgccgaactcggaacgctcgtcgtggatgttgttgatgagcgagcgcagaggagcgatgccgaggccgcccgccaccagcaggatgtcgtgccccttcatgtcctcgaacgggaagcctcggccgaacgggccgcgcaggcccacgatgtcgccgcactgcatcttgtgcagcacctcggtgaagtggccggtgcgacgcacgcacagctcgatgaagccgcgcttggacggcgagctggacatggagataggcgcctcgcccaccccgaagatggacacctcgacgaactggcccggctcgtgcgagaacgcatcgcggatgcgctcgtcgataaggcggaactcgaacagcttctccgtctcggtgaggtcgatgatggacgtgatccgcgccggccaaggccgatacgggttcgccgccatcatctgctcgcccgacaggggagccgcctcgtcgaagaacggtttgacctggacggtggacaccgcgcagctactgggcatcttgcatccccttcctctcgaagaactcgagcacctcgatggggttgatgttcgccttgcacgccttcacgcagcgaccgcaccccacgcacagcatgcggtcatggttcgcgaggaacccgttgagcttgtggtacatgcgatgccgcacgcggttgcgcccgtcgccgcggaagttgtggccgccggccacctgcgcgaactgcggcgcagtgcacgcgtcccacacgcgctcgcgccgacccgcctcgccggagggatcgaacgtgtcctggatgtcgaagcagaagcacgtggggcacaccgccgagcacgccgtgcacgacaggcagcgtccgcccagctcctcccagaacgggtccttatggaacgcgtccatgagcatggccacgtcctggatgtcgggaatagcgtcgttgaacgcctcctggcgccgacgcgtggcgtggcggaactcgatacggtcctcgtcggtggccacgcgcgggttgcacgccgcctcgaggatgttcgccgcctcgacgctggatatgctgaccaggtactttccgccgatatcctgcaaaaacaggtcgtagccgaaacgcgcctcgtcggagccccacaaatggcagaagcacgtctcggagggcatgcagctgatccccacgatgagcgtggcgttgcgccgggcgacgtagtaggggtcgggatagcggccgtccttgaacacgaggtcgagccggttcaccgcgttgatgtcgcaggcatgcgcgccgaagatgacgcgcggcgtgatctcggcggcgaagtcggtcacgctgttcgtgcgcgcgtcgaaggacatgagcgtctcctcgggcggcaggaagtacttcttcggcgaagccatggtggtaggataggcaagctcgatgtcgtcgggcgattcgatggtctcgaaggcgtagccctggtcgcgcttgaccggagccaccacttcgtaggtttccatgaacgccgacacgagcgagggaagttcagcagcgtcgatgactcgatagagcatgctcacgtccttttctcgtctggtatcccgcgcaaccttcggtgcgcgaagctccgaaaaacaaaaagcgcgccgtcgctcgagcgaaaggctcgtacgcggcggcgcgctcggaacgtgctttacgcgaagaagatgccgatctcgcgctcggcggattccggggaatcggagccatggatgacattctcgtccatgatgaggccgaaatcgccgcgaatcgtgccgggggcagcttctgccggattagtggcgcccataagggagcggcacttggccaccgcgccgtcgccggacacgaccatcttcacgaccgggccgctggtgatgtaggaaatgaggccgtcgtagaacggcttgccctcatgctcggcgtagttggccttcgcctgctcgtcggtcaccatgcccagctccatgcgctcgatcttgaggcccgcgcgctcgaagcggttgacgatctcgccgatgtggccgttgcgcacgccgtcgggcttgatcatcgtgtaggtcttctgctgtgccatgttgtagtgccctttctctctctttatacgagggtgtcatcctgagcggaggcggcgaagccgccgcagtcgaaggatcccctatggcgccgaccgacggcttccggcttgcgccgcacgggatccttcgacttcgcttccttcggtcgctccgctcaggatgacaaaaacggcgtatgccgcttttgtcagttctggctcgggaagtacagctccacgttcgacaccttccacccgatcatgttgcgcacgagggataccttgtactgcacgtcgccgccttcgggcgtcttagccgtcacgtacacggtggaatcgctcatggacttgtccatgccgtcgatcgcagggctgcccaccgtcgagaggagctcggtcatggacgcggcgttctcctcggtcacctcgctggcgaaggccgctttcggatccgagaacagctgctcgaccacctggtcctgcgacggatagccccagccctgcgtgtacaggaacacggcggcgccgaaagcgaccagcacgatcaggatgatggtgacgaggatcttgagacccacgttgcggcgcttgcgatcctgcttggcgagacccttcgaccactgctccagctcttcgtcgctggcgttgaagaaatgatcctccgcgcccggggcgccgtaggggttcgtctcggcctgggcgtacggatcggcgtagtagtacggttcctggccgcccgccgcgtacggatcctgatccacgtacacggccgtgccgtcggcggccacgtcgagccccgacatgtcggcaacgggcgccaccggagccatcacctgagtgatctcggacgtgccctgggcgaccgcggcgattgcgcgctggtagtcgacgctggccgagtcgctgaggaagtacgtcttgtcggcgatggactcgtcgaaggcgttcacggccttctgcatctggccgctggccacgtaggcctggccgaggttcgcgtacagcttgttgcgcgtgtcgggctgcatgtcgaactgcagcgcgctttcataggaggccacggcgtcggccggacggtcgagcgccatgaagcacacgccgaggttgagcagcgccttcgtgggatcggggttggcctcgtcgagcgcggcctcgcgaaacgccacgccggcctcggccgacttgcccagcttcaacagcgcgttgcccatgcccgagtaggccttgtaggacgcatcgtacttggcgtcggacacggcgatctcgaagtgcttgacggcgtcctcgtaatcatgcagcgaggcgtaggccatgccgaggttgtagttcaccgcgccgcacgcgtcgtaggccgcatcggcggtcgcctgcgtgtaggcgtggatggcctcgttcgggttcttgagcttgaccaggcagttgccgatctggtggtacagcagccccacctcgccgggtgcaagcgagctgcccgcatcctgcaagcactgcgtgtaggcagccagggcgccttggaagtccttgcgcgcgtacgccgcccgggcttgctggaataagtcgttgttcatctgcttccttcgtatcttcgcggaatcgcctcggcgtctcggatcgctattcggcggcgttctcgatctcgacgctctcgatcacgtcgcctacgcgcagctggccgatgacgtccatgccgtcgatcgtctggccgaacaccgtgtagcccgagtccagcatgggctgggcgcccaggcacaggtagaactgcgagccggcggagttgggatcctgggagcgcgccatggccagcgagccgtcgaggtgcttgttgttggggttcgtggagaactcctccttgatggaatagcccgggccgcccgtgccgaggcccgcgaacgggttgccggccttcttgacgacctcttcgggcgtgaggtcgcgcgtgttcgggcagccgccttggatcacgaagccgggaacgtggcggtggaacttcaggccgtcgtagaagcccttgcgcgccagctcgacgaagttgcccacgtggatgggggcgtccttgcccgccagctgcacgcggacggtgcccttcgacgtggtgatgacggcgacctcgtcgccggtcggctggtattccggagtgtactgcgccatgggtcggctccttttcgtttgcttgctatcatgcgcccacgcgaaacggggcgaaagtatcgcatacaaggttgaagtttagcaggtcaagtccgccagaccggaaaaatcgtagaacatccacggcgagcagaagcgctgcggaaacgggggcggatcggcacggcaaccgccgatgcgcgcggagatcgacagggcgcgcctgcgctagcgcgctgcctccggatcgaggtacacgcgcgagcccgtagcgccgcgctggccctggtacttgccggcgtaggggttcttcgccgcctcgtccagctgggcgaacaccagctgccccacgcgcctgcccgagcgcagctccagcgcgcagcggttcgcgttgaacagctccagcgtgatctcgccttcgaagcccggatccacccaaccggcgttctgcacgaacagccccatgcgccccagcgagctgcgcccttccacgaaggcggtgaggtcggcgcccaggcgcacgtactccatggtggttgccagcacgaactggcccggcagcaggatgtagcggtcggtgcggatcgtcttgtaggcgatctcgtcctccagccccacgatgccgctcggcgtgtcctcgacgatgccgaacgtgtcgcccaggcggatgtccacgctggcgggctggatctgctccggctcgaggggctcgatggcaaggcttccttcggcgaggagcttctctatggtcttgtcagacaggatcatgggctttcctttcgcgagcggttcgtgcgttcagggacgagtcgggggcgacagcggggctagaggcgttcgaagacgctgaccacctcgacatggtaggtttgcgggaacatgtcgacgggctggacgctagtcaggcgatacccttggctctcgaagcgcgcgacatcgcgcgcccaggtggcggggttgcagctgacgtaggccacgcgttccggcgcggcggcggcgatgctctccaccacgccgtcggccaggcccgcgcgaggcggatccaccaccagcgcgtcgaggccgcccagctccggaagctcgcgcgccgcgtcgccgccgatcacctcgagatccacgcggttcatgtcggcgttgcggcgcaagtcgcgcaccgacgagcccgcggcctccacggccaacacctcggcgcccgcctgcgcgagcggcaccgagaacgtgccgccgccagcgtacaggtcggcgatcagcaggtcgtcgagcccttcgggcccgtcctcgcccatgcgtccgcccaagccctcgatcacgcaggcgatcagcttctcggcctgcgcggtgttcacctggaagaacgacggcgcgctggccaggtagcgggcgtcgcccagctgttcctcccagcatcccttgccgtcgagcgtctcgacgcccttgatcttgcgggccttgccggggtcggccatgacgcgcacgatgctggtggccttgacggcgctcttgacggttttggcgatgtgtccgcgcgggaaggagccgggactcgtccacagggctacttccagatcgcccgtgtgcaggctgtggcgcacgcccacgcggaagatgccgaggtcggccgacccttgcgcgaagcgcagcgcgccgcgcagcgccttgggcgccttggcgatggcgtcgtgagcgagggggcaggcgcccggcgaggcgatgtcgtgcgcgccctcgcggtggaaccccagttggaacgtgccgcgctcgtccatggccgcgcccagctccagcttgttgcggtagccccactggcgcttgctcggcagacaggggcgcaccagctcctcggcgcgctcgcggccgaacttcgccgtgcgctcgagcgccgccgccacgttggcgcgcttggcctccagctgcgcgtcataggacaggtgctgccaggggcatcctccgcaggccgcgcccgcctcgcagcgcgggcggacgcgcagctcggagggcttgacgagccgcgcgatgcgcgcgcgggcgaacgtcggcttgtcctcgacgatctccagcgcggccacgtcgccgggcgcgccgccctccacgaacacggccttgccgctctccaggcggccgaccgcctcgctgccgtagcccatgcgctcaatcgttatggtttcttccatgaatacgcccaaatctcgtttttgtttttccgtttcgtccatgatagcgtataatctcctccaccgtgcccttgtagctcaggggatagagcgtctgcctccggagcagaaagccgcaggttcgaatcctgtcaagggcaccaggtaaacgatacgaggccggaatccgttcccggcctcgttttttattgtcggcgcatcgtctgattcgacgctgagacggcgatgacgccgagatcgccgcgccatggcgaaaacggggcggtttggtaaccccaaaacctttccgcttcccaattcgccggcgcgccgaagcggaagcccgacatcagcccaggtcgattttttcggcatcccgtcgcgagttgcaaccgattaccaaaccgcctcgtttttacccggtcacgcccttttcgccgtcatcccgcgctaacaccagcagggagcaccccggctaacgccgcgcgggttccttcggctccgcgctggcgcgctgcgagcaggatgacaggtggaggcttcgctcgttcggggcagcttcggccgagacggctactcgatgtccgagaggatctcgccgggcgcatcgccggcgtcgaggaagatcttgcgcgtcacgaagttccacaccatgacgatgaacgtggcgccgatcttcacgatgaggtagtggatgcccagaaactccacgcccgcccacatgcagccgttgttgaggcccaggccgataaccgacagcacgacgaagatggcgaactcgcggcggcggctcatgccctccttatgggtgaacacgtagcgcatcgacgccgcgtagttgaacacgaccgaggccgtgaacgaaatggtggcgctgacgaggtagttcacgccgaacgcctcggtgagcagagcaagtaagccgtagtcgatgacgaaagcgatgacgcccaccacgccgaacttcatgatctgagcaacgagcttcttcaccgcgcgcgtcctttcgctctacgcgccccctccccgcgagcgccctctcaaaaacctgtccattgtggcatatacgagatggatatcaaggggtttgctcagatggccatccattccgctcatgcggctgcgctcctcgtcctcgacgaacgcgttggccgtcatcgcgacgatgggcaccgaacgcgcgtcgtcgcggtcgagcgagcgaatgacgcgggtcgcctcgtagccgtccatctcgggcatctggatgtccatgaagatcaggtcgacggagcccgggtgcgagcgctcgaacgcgcgcacggcctcggcgcccgtggacgccgccaggacctcggcacccgccatggccagcacctcggtggctatctcgcggttgagctcgttgtcttcggcgacgatgacgcgcctgccggagaaatcgtacgaaactccgtcgccgtgcgttcgggaccgcgcggcgaacgcatcgtcgcacgtggcggccccttcgcccgaggctcgcccgaacggcacgtccaccgtgaaggtcgaccccttccccacctcgctcgacaacgatatacggccgcccatcatctccgcgaaccgcttcgtgatggcaaggcccagacccgtgcctccgcgtctgcatgaagactcgtcgccctgctcgaa

SEQ ID NO: 9537 - DNA, 820 bp, Unknown
  gut microbiota DNA sequence
tccgaacggcacgtccaccgtgaaggtcgaccccttccccacctcgctcgacaacgatatacgaccgcccatcatctccgtgaaccgcttcgtgatggcaaggcccagacccgtgcctccgcgtctgcatgaagactcgtcgccctgctcgaaagacgagaatatccgctcgcggttctccggcttgatgccgcaacccgtatcggtcaccgagaagcgcagccagatcgcgtcgtcgtgcgcagcatcctcttccggcggcgcgggaagctcctctatgcgcagcgtgacgctgccgtcgcgaggagtgaacttgaaagcgttgccaacgagattgtaaacgatctggttcagccgaagcccgtcgccgacgagcagcgagggcagcgcgcccacttcttccgtcttgtagcgaatcccctgttcgagagcctgcgttccgaacacgtcgtcgagcgaccctacgaacgtcccgaaatcgaacgtctcgcgcttgatgtcgatcttgccgctctcgatcttgctcatgtcgaggatgtcgttgatgagcgccatgagatgctcggacgtcacgtcgatcttctcgaggcaggctcgcgccttctcctcgtcgtgcgcattctcgagcgcgatggcggtcatgcccatgatgccgttcatcggcgtacgaatctcgtgcgacatgcgcgagaggaactcgcttttcgccaagctggcgcgccgcgcttcctcggaagcgcgctcggcacggttcttctcgtccgacagcagacgcgtgttgcgcttgaccagctgatagtagatcgagaagaagatggct

SEQ ID NO: 9538 - DNA, 4636 bp, Unknown
  gut microbiota DNA sequence
actggcgcgccgcgcttcctcggaagcgcgctcggcgcggttcttctcgtccgacagcagacgcgtgttgcgcttgaccagctgatagtagatcgagaagaagatggctatgaccgcgatgatcatggtcgccatgagaacggcgttctgcatgagcacccagctgagtcccgccacgtcctcgtccaccacgccgtagggcatggcggtacacagataccagtcttgattgctcatcggccgaaagtacaggtactcgtgatggcccccgcaccagaagggaagcaggaacgtctccccgttctccacggcttctcgcacctggtccatgctgtaccccttgtcgaggcgagcgctcgattccaacgcgtcgaacaggttctcgccgttgcacagcccctcggcatcgcatcctgcgatgcaagtgccgtcgaagccgatgacgctcgaccgcgcgctgccattgaccagatcgaggttgagcttcccggaaacggtgtcgacgccgaacccggcgacgacggcggtgaacgtgacgcctccgcaggtaacgggctcgaaggaatccacgagcgcgatggttccgttgtatagcatcacgtcgtggccgtgcgcgtcccgatacgacagccccagctcgctgcgggcggcaagctcctcatccgaggcggcgtccgagccccacgacgtgtagtagagcccgtcgctgccacgcagcgcaaggtaggcgtactcgtcatcgtccgcctccatgcaggcgaggaaatccctcacctcgtcgagattctccgggtcgtacagctcaagcgagctgcccacggtttccagctggcagaacttgccgtcgatgccggtgttgaaatgggagatgacctggttgctgagctcttgcaagtacacttcgctcatggtttccaccgcggccgccgtcgcctgacgcgacgagacgatcgtgtacgcgagcgcgatcagaagcgcaaggacgagcgcgaccacgatgatggcgatgcgccgccgctcgcgcgagcgggtaatcagttccatagggaggacgcccctcttccagtcgtagcgggcgttcttcattgtagcaggaggcgccgggcacaatattaccggtcgaaaacggcttccttaccgggtttcatctggaaaacaacggagccgtctggcgcaagcccgacgtttcgagtaggatgaacctcacctatacagaaccgaggagtgattcgtggatcagaagatcgatacgccgcgcgcccagagcggcaccgtcgccgtgctcatcccctgctacaacgaggccgtaaccatcggcaaggtggtcgacgacttcaggcgcgtgctgcccgaagcgaccgtgtacgtctacgacaacaactcctccgacggcaccgcttccatcgcggccgagcacggcgccgtggtgcgggccgaacgccgccagggcaagggcaacgtcgtgcgccagatgctgcgcgacatcgacgccgactactacgtgatggttgacggcgacgacacctaccccgccgaggccgcgccggagctcctggcgccgctcatggccgacgaggccgatatgagcgtaggcgaccgcctgtccaacggcacgtacggcgaagagaacgaccgcgccttccacggcttcggcaacgacctcgtgcgcacgctcatcaagtggatctacggattcgagttctccgacgtcatgaccggctatcgagccttcaacgccgtgttcgccaagaccatgccggtgctctcgcccgggttcgagatcgagacggagctttccatccatgccgtcgacaagcgctggcgcatcgccgaggtgccgatcgactaccgcgaccgccccgaaggatcggagagcaagctcaacacgttctcggacggcatgaaggtgctggccatgatcatgtcgctgttcaaggactatcgcccgctcgcgctgttcagctggctcgcgcttctgttctgcttgttgggcctcatcgccggcatccccgtcatctgggagttcgccgcgacgggcctcgtaccgcgcctgccctccgcattgctggccgtggccctcgtgttcgtcggcatcctcgcattcgccagcggcctcatcctggacacggtggtcaagggcactcgcaaggagtacgagctgcaggtgacgcaggcctacgagcgctacggcaggcgcagggcgtaagccccggaaacgcctcgaggggcgcgggtgttgacaatactcgctacgcactccatcacaccgcgcccctgcccgtcaatcatcctagcaaatgccttgaacaatgttcagtcgtgatttatgacctttttgctgagagaataatcttttgatacattttcgccgttttacctgatagaccgtcgctttatcaaagcattgtgtatccgttcggttacattctaggcaacgataacctgctgtcaagccgagcaggcggaagaggctacgcccttcgggcgcttaggatgcggacggccagcccgtcgagatcttcgtcggtgaagcggtaggtcacggtttgcatgccccccgccgaatcctcgcgctcgacgcgcgcgaagcgcagctccacctcgacgcagccttgccgcagcagcgcataggcgtagcattgcgcctgcaggaggtgcttggagcgcagcgcttccggcgcctcgccgtccgaaccgccggtcttatagtccaccacgagcgcacgggcgcccgctagctgcgcgtcgtcggtgcagagaagatcgatctccccttctacgaacgcatcggatatcggcacgaagaacggcacctcggcgcgccgcagcccccactgcagcgtttcggcgtacgtcgcgctggagaaccagcgctcgcaggcatcggccagccgcgcgcgctgtcccgtcgatagagcgtacgcctcggagagcacgccgaggcgcgcagcgccgggaacccttcccgtctcgacggccagctgcgccgcccgatggaaggcgctgcccagatccgtcgccttgtccgcgtccgcggcgaaaggcacgccctcgtccgccggagccggaagcgggttcggggcgatcgacgagtacgagaacgcatcgtcgcgcgccaagcctcccgcgaagagcgtcgaccgcgaagcgtcgtccacgacgggcacgaagaacagccgcggttcgggcgcaggctcggcgccctcctcgacgcgcggctccggcggctgtacgaggatgcgctcgaagcgggccggcgcggtgccgccgtagggaagctcggcaacgccctcgggaaaatcgccgtcgccgcacagcgcgctgcggatatcgtcgacgagcggggcgtacgccggaggcttgcccgccgagggagctttcgcgtccatcgccaccacaagcgcttcgctggcacgcgtgaggcccacgtagagcttgcgacgcgcttcggccagctcctcgtcggccgcacggcgcgcgagctgggcgcggtaggccgcctgcgtgcacgacgaagcgccgagagcgcacgcgggcccatcctccccttctacgagacggcgagcggccagcagatcggcatcatcctcgccgtcgccggccgcagccgcgcccgagcgcttcgccagctggggaaacgcctccaacgacgctgcgggcgccaacgaggcgcgcgcgatggcaccgcacgtctccaccagaagcttgccgcttcccgcgcgcgcgtcggcgaagtcggccaacgccacgacggggaactccagccccttcgaagcatggatggtcatgatcttcaccacgtcgccgccggctcccgacaacgcgccgggcgcctccttcaatcctacggccaactcgtcggccagcgcgcgcgccgtggaggccagccccaggtggcgctcggtttcgaggcgatcgacgagccggacggccttcagcacgttcgcggctcgcgccgtgcccgccgcgccttcctcctcgagccgcgccatccaccccgaacgcaccacggcatcgcgcaccacggtcgccaccgggcgcgtgcgcgactcgtcacgcgcccgctcgaacaggcgcacggcgtgcgccagccgcggcggcagtccgtcggcgcgcgatgcgaggcgcgcgaagccccggtcgagatcgcgccgccgcacgcatcccgtctcaggatcctcctcggtggtcagcacgaggaggtcgtctgccgacagacgcatcatgtcgctggtcagcacttcgaacagcgcagccgtgttcgccgggttcgccagcgcctccacgaagcgggcgaccacgcgcacttcgggcgcggacgcgaacagcgacccgcccgtcaccacgcactcgaagccctcggcgcgcagcgcctcggcatacatgcccgcacggctcatcttgcccagcagcaccaccatgtcgccgggagcgtggccgtcctcgcgcagcacggcgaaccggcgggcgatggcctcggcgccggcgcgcttcgcatcggccgtgcgcacgccggtgccgcgccccgcgggctgcaccgacagcacgaggtcgatgcgcggcgcgctgccccgatagcaggaggggcgctgctcgttcggctccagcgacatgaacgcctcgccgaacaccgtcg

SEQ ID NO: 9539 - DNA, 207 bp, Unknown
  gut microbiota DNA sequence
ggcgccgcggaagcggtagatggactgctgcgcatcgcctaccgtgcacaggtgcgcgcaccgcggcccggccaggcgcgcgatcatgtcgatctgcagctggctggtgtcctggaactcgtccaccatcaccagtttgaagcggcgttcgtagcgcgcggcgatgtccgggcagcgttcgaacgcgtcgagcgtgcgcacgagcag

SEQ ID NO: 9540 - DNA, 203 bp, Unknown
  gut microbiota DNA sequence
cttcatggggtacttgttgcgacaggggttgtacagcgcttggatgcccgaaaggcccttcgcgcacaggcctccgcggctgatggggctttccggattgccttcgagccgaatgacgcgtccgtcgcgcgccgtcgcgatgacggcgcagctgcagatgcacgcttggcacgaggtgtagaccttctttgtttgggaggtcg

SEQ ID NO: 9541 - DNA, 388 bp, Unknown
  gut microbiota DNA sequence
cgtacatacgcgtatcctttcgttttgccggctattgtaccgcttgttagacatcgcgaacatcggaaagaggaggaagatcgggagatcgcatcccactctgcccgtcctgcccgctccgtgcgccagcaaatcccgcgccatacccctggaggacgttcgtaattatgaccaaaacacctatggacaaaatgggaagttttctctagattctgaagaccgtcgcgccgccccgctaagcgcgttgaccgcctacttcgccgctcctcccgcacccccgtcgcgctggcgcttgaaacgatggtatgcgagcgcaccgatcaccacggccgcggcggtgacgctgaacacgatggcggtcgcccgccaatcgcctgcggcggcgaac

SEQ ID NO: 9542 - DNA, 433 bp, Unknown
  gut microbiota DNA sequence
ctcttctcgatgatatgagagcaacgcgcgccggtctggtatgatgcggacaacgcaagctgccggatgcccgtgcatcccgacctgggaaaggagcactttccgtgttcgctcgactgttgcgcatcgtcccgatgcttatcgtgttggccgtggtggcggcaatcgtatacatcgtggccgcatggcgctattccccgaaccgagcgaaagagctgctcatcaggatattcacggctatcacgggcgccgtttcggcgttcttcctgctggtgtgcgcctacgcgtggctcgagcgcaacggagccgtgttcgatctgtcgttcagctttttgttgacggctcttatcgggcttgcggcgacgcggatatgccgcgcggtgtttttgcgccacaaccccgcgtaccgcatcaaggccgcgaagacgacgac

SEQ ID NO: 9543 - DNA, 2423 bp, Unknown
  gut microbiota DNA sequence
tgccgtgtcggcgttcttcctgctggtgtgcgcctacgcgtggctcgagcgcaacggagctgtgttcgatctgtcgttcagctttttgttgacggcgcttatcgggcttgcggtgacgcggatatgccgcgcggtgtttttgcgccacaaccccgcgtaccgcatcaaggccgcgaagacgacgactccgggttcccgtgtcaggcgttggcggaagaaataggaaaaccctcttacgagggtttgaaatgcggtggcggagagctggggattcgaaccccagacacccttttggggtgtactcgcttagcaggcgagcaccttcggcctctcggtcagctctccgcggtataataggtgcggtttgctatgataccgtgaccacctccaagttgcaaggagcatgatcatgcaaaacatgagcggttcgcaactccgcgaatccttcgctttttcccgacgaaacgccgtgctgttttgcgcggcgctcctggcgctcgcatgcgcgcttgtggcgctggctcccgggcaggctcacgcgaaatcgtacaccatgccgaaggtggatatccaggcccaggtggaaaccgacggcgcgttgcaagtgaccgagcagcgcacattcgatttcgacggcgatttctccgcggtgtggtgggccttcgacgggcttccgcagaacgcttccctcaagatcaacggcgtgcgtatggcgaacgtcgatgccgatggcacggtggtgggcgattggacgacgttgccgagcgaggcgttcgtgctcggttggcgcgaatcgggcgggcctgggaaagattcctactcgttcgacgcgccgaagaacagcgtgtacgtgttcttcaacgcctccgacgaccgtcgcatcatcgagctcgattatacggtggtcaacggggcgcaggcgtattccgacataggcgaggtgtactggaaatacgtgggctcccaatggaaagaggcttccgacaacgtcaccatgacgttggcgctgcctgtaccgcagggtaccgaggtcgtgccgggagagaacgtgcgcgcatggggtcatggaccgctcgacggcaaggtgaccgtgaacgccgacggaaccgtgacgtatgccgtgccgcatgttgcggcaggtcaattcgccgaagcgcgcgtggcgtttccggtgaagtggttaacgaacctgtcgcccgaaagcgcggcgctgcatcaaggggaaaaccgtttggacacggtgctgaaagaagaaaaggattggagcgaccaggcgaaccgcactcgcgttctttcgttggcgttcgtcatcggctgcggtgttgtctgcgtgctgctgctcgcctgggcgctgcgcgcctacttcaagtacggacgcgaataccagccccggtttaccgacgagtattggcgcgacgtgcctgacccctccatccatccggcggctatcggacgcctgtggcgctgggatcgcgagagccaagacgatttcacggctacgctcatgcatcttgcgcacgtcggcgccatccgcatcgacgcgggcagttacgaagaacccggcgcgttcgggcgcatgaagaccgtggacgactattacatcacaaggttgcctgttgccgacaacgtgaccgatcccatcgatcgtcaggcgttggatttgcttttcggcacgttggccgggggcgccgactcgctgtggttcggcactatcaagaagtacggcgaagatcatccgcaggagttcgtcgacgcgatgcagggctggcagggcgcgctttcggcggcgacgaaccgcgaggatttcttcgaggcgaaaggcaagcgataccagggctacctcatcgcgcttgccgtggtggtcgctttgtccggtgtcgccatttggatactcatgtcgaacttcatccctctgatattcatgattcccaccgccatcgcgttgggcgtgatcgggaactacatgccgcgtcgcagcgtgaagggcaacgagttgacggccaagagcaaggcgctgcgcaactggctgaccgacttctcgtctcttgacgagcgtccgcccaccgacgtgaaggtatggggcgagttcatggtgtacgcctacctgttcggcgtggccgaccaggccatcaagcagctgcaaaccaccatgccgcagctgttcgagtacgacggatctatgggcatgacgtacatgccttggtggttctggtacacgggaggccatacggctgccggctcagcgatgccttcggttagcgacatgctgcaaacgtcgatgacgaacacgatgtcaacggctcaggcggcgctttcgggcgctagcgggaacttctccagcggcggtggattcggcggcggcttctcgggcggcggcggaggcggcttcggcggtggaggcggcgcccggtaaaccaagcagg

SEQ ID NO: 9544 - DNA, 2296 bp, Unknown
  gut microbiota DNA sequence
ccgcgaacgaggttccacgttgccatccgatgggcgactggagcgcgcctggcgtccggagcgaaggcgcgaagcgccggagcatgaacaagcacgggctggccgtgtgcaccaccactgtcatccttcgactccggcccgcggcctccgctcaggatgacagggcctgctagtcagtatgaacatgacttaaaacatcatggacaaaaagcatgacttttcggtagttttccaagggaaaccaacagagtggaaaaggagcctggaagaaactccaggtaaatggaacgcctcttatcgcgcgccaaagcaaaactacggaaaagtgcctgtttttgtccatgactttttaagtaatatatagaagcgcacgaaaccagggcgtacggaagagaaactcggccggctttccggacgcaggaagcatcggcttttgagcgcccttcgccgcggcgttcctgcgaaacatcccggctttcgagcttcttcctgccggaatactctccgattgacgatacgccaagccgctggtgtcggcgctgctgttcgcggtgcacatcgtgtacgtgtcgaagttctcggggacgaacgacgtgctggtgctcacggtgatgcagttcttcatcggcggcgcgtgcggcgtggcgtgcggcgcctgcttcgagacgctccctcccgcgtgggccctcacgcccgagttcttctggaacatggcctacctggtcatcttcgcgtcgtgcgtggctctggtcatccagaacgtggcgctggcgcatgtgccgcccgcgcaggcgtcgctgttcctccgtctggaatcggtgttcggcgtgctgttcagcgtgcttctgtacggtgagcaggtggggctcaagctgatcgtgggattcgtgctgattttcggcgccatcctggtcagcgagatgttccccctgaaacgcaaggacgttgcaaccaatcaactggaagcggtgccggtcgagctgccatgatacaattgctcccaatgtgtgcagtaagggaggaacctcatggcagaaaaagacaacatcgtgctcatcggcatgcccggcgccggcaaatctaccctcggcatcgtgctggcgaagatcttgaactacgacttcatcgacgccgacctcgtcatccagaacagctgcgacaagacgctgcagaagctcatcgacgcgtgcggtcccgagggcttcatccaggtggagaacgagattctgcgcgagctgaacgcgtcgaagtccatcatcgccacgggcggctcggccgtgtactccgacgaggccatgaagcatctcgccgagatcggaaccatcgtgtatctgaagatcacgtacgaccagctggtcagccgtctgagcgacctgcaggagcgcggcgtggtgctgaagggcggcatcggcatgagcctgcgcgagctgtacgacgagcgtctgccgctgtacgagcagtatgccgaagtcaccgtcgacgtgaacgacctgtccatcaccgccgccgcccgcaaagtggccgacgccctgaagcaagcgtaatcgaaaatgaaacaaagggaatgagacaaaggaacggagatgccgtctcgtgtcgatctcgtgtgagacaccaaccccgttcccagtgtctcatccggcgtctcgtccaagcatgaaaacgccccgcagctcgttacaagccgcggggcgttgtcgttgctggccgaagcgcgatgcggctctacacgccttctgtttcgaagcgcttctcaagcgcctcttgatggatgctgtactgcagcgccatctcttttgctacgcgtccgctcttcacgagatcgaacaagctctgatccatcgtgcgcatgccctcggcaccgcccgaggcgatggcgctgtccagctgatgcgtcttctcctcgcgaataaggttgcggattgccgtgttcgtgatcatgatctcgaaggccggcgccgtgccgccgtcgacggtgggcacaagctgctgcgacacgatggcctgcagcaccatggacagctgaatgcggatttggcgctgctgcgaagcggggaaggcgtcgatgatgcgatccaccgtgcctgcggcgcccgtagtgtgcagcgtagagaacagcagctgcgccatctcggccgcagtcaccgcagtgccgatggtgtcctgatcgcgcatctcgcccagcaggatgacgtcagggctctcgcgcatggccgagcgcagagcctcgctgtacgttgccacgtcggtgggcacttcgcgctgcgtgacgatgcaggtgccgtgcttgtgcacg

SEQ ID NO: 9545 - DNA, 1289 bp, Unknown
  gut microbiota DNA sequence
gtcgcgcatctcgcccagcaggatgacgtcagggctctcgcgcatggccgagcgcagggcctcgctgtacgttgccacgtcggtgggcacttcgcgctgcgtgacgatgcaggtgccgtgcttgtgcacgtactcgatggggtcttccatcgtgatgatgtggccggaacgttcatggttcaagcggtcgatgatgcatgccagcgtcgtggacttgccggcgcccgccgggccggtgaccagcacgagccccttctggaacttggccaggcgcagcacctcgtcggggatgtggaattccgccggatcgggcaggccgaaggggatgacgcggatgaccgctccgtacgaaccgcgctgacggaagacgttcgcgcggaagcgcccgatgccgggcagggcgaacgagaagtcgtcgtcgtgattgccgttctgcatgaaggtgtccatgttgcggccggatgcctcgtagatggctccgacgaaggcctcggtgtcggccggcttgaacggtgccgaatccagtcgaacctggcggccgctcacgctgtacgccaaaggaagtcctgcgataatgaagacgtcggatgccttcgcgtccaccatctcttgcaagagctgctccagtttcatcgtgcttctcctatcgtgtttgcgcggcgcccgaccagagcgtggcacccgggccgtcgttcgtccactgcgttgtcgctttccattggctgatctcgtatgttgcgttcgcggtgatggttaattccacgtcaagcgtgcgcccgctgggggaggcgaacgtcatgagcactctcgacccgtcgcgctgcgcgtcggccggcagcgcctcgtccacggcggcaagcgcttcgtccagaccgcctccggaggctcgcacgtcttccagagccgcgtcgatgacggccaccgcgctttgagcggcttgctcgttctggtaagtgtcgttggtgaacagggcctgtttctcggcggcggaatacgtcgcttgcgcggtggtagccgaaagcacggccatcacggccaggcacaagatgatgaccaacgtgaacaggctgatggggccgatacgaacgctgccgttggtgctgttcatcgctgcaccccctcgttcgacacgtagcgagccgtgtctatctggtaggttgcttctccgccgcaggatacgtagatgtgggcggtgtaaagcgtgccacccggttggttctgggcttccacgatgcgcgtcaagtcgtacacgctcttgtcgaggacgtcgatcggcccctcgggttgta

SEQ ID NO: 9546 - DNA, 409 bp, Unknown
  gut microbiota DNA sequence
agatacgtagatgtgggcggtgtaaagcgtgccacccggttggctctgggcttccacgatgcgcgtcaagtcgtacacgctcttgtcgaggacgtcgatcggcccctcgggttgtaccagctggccgtcgacgaggacgtactctcctcccgtgttgccgctggtcggatcggccgcgaacgcttcggcgtcgttcgatgcgaggatgatggcgttcgacaggcggtcggcttcgatgcttcgttcgtgcgctccggcgatcacctgcacgatcacggcaagcgacgcaatgagaaacaccaggagcacaagcgcctccacgatgaaagccgcgccgtgccagggtcgacggtcgtgatcgttgccgcggcgcaggcgggaaaggtcgatgcccatcaggcacctcctc

SEQ ID NO: 9547 - DNA, 547 bp, Unknown
  gut microbiota DNA sequence
tgatcacggcaagcgacgcaatgagaaacaccaggagcacaagcgcctccacgatgaaagccgcgccatgccagggtcgacggtcgtgatcgttgccgcggcgcaggcgggaaaggtcgatgcccatcaggcacctcctcttacgctgcgcagggcaaccgaggtggagccttggtcggtgtgcacggtcagcaggccgtcggtgtaggtgaagtcgaaggtggaagacctcacgatctcccgagccttctcgggcgtgaacgccgttccggcgcgcgtgtactcttccacgattgccccctggtaggcgtacaaacgcgtctcgtagtcgccgttgcccaggtgttcggtcagcacgagcgccagcccttcgggaccgtcggccacgcccacggcgtcggtcccgtcggtggctcggatggagttcgctatcaacgacagccccagtcgggtattgtccgaggaagagcgcacgtcgttcgctgcgcggtaggcgctcgtgcccaccagaagcgccagcagcaggaacagcgcgatgacggcgaac

SEQ ID NO: 9548 - DNA, 510 bp, Unknown
  gut microbiota DNA sequence
aagccgtaaagacgaacatcgacggggccatgggcatcatcagcgcagcgctggactcggacgtgcggaaggtggtggcgctctccaccgacaaagccgtgaaccccgtgaacctctacggcggcaccaagctcgtgtccgacaagctgttcatcgccgcgaacgcgtatcgcggccagtccggcaccgtcttctcagtggtccgctacggcaacgtcgccggttcgcgcggatcggtcatcccgttcttcgacaacctcgccaagtcgggcgcgaccgagctgcccatcaccgacatgcgcatgacgcgcttctggatctcgctcgacgagggcatccggctcgtcgtcaaggcgctcgaggagtcggagggcggcgagacctacatctcgaagattccgtcgttcagggtgaccgacctcgcgacggccatggcccccgacctcggccaggtggaggtcggcatccgcgagggcgagaagctgcacgagtgcatggtgccagaggccg

SEQ ID NO: 9549 - DNA, 319 bp, Unknown
  gut microbiota DNA sequence
ggggggggggggctactcttcctcgctcaactcgcctttgatgaggctgcgggccacgcagatggcggctccggcggtggcggcgacgccgacgacgatgccaccgatggcgacggggtcgcccgtccgggccagcttcttcgcttgcggcgttggcgtagacgtgacgacttcgggcgcgaaggcgtcgggagcgggggagggctccggcgcaggatcgggcgtcggctcgggttcgggatcgggttccggctccgggtcgggcgtcggctccgggtcgggcgagggatcgggttccgggtcgggatcgggcttcgcg

SEQ ID NO: 9550 - DNA, 6822 bp, Unknown
  gut microbiota DNA sequence
ggcgaccccctcggcctccgtcctgacgacgtccaccgccgacccgtcgggaccgacgaccgacgggatgccctgcagctcccgtccgttcgcgtcggcgaacggcagcggggggatggcgtagacctcgcctgcggtcgccgtcccgatggcgtcggcgctcgggggcgcgaccgccgccgcaacgggcgcagccgccacgtagagttcggctgcctgcgctgccgtcgccacgccgggcgtcagcttcgcgaacgctaccttgcccgtcatgggcttctccatctcgccgttcgaattgacgtcggctcctacgaaccaacgggtcgccgaagcggtgggcgcagggatcgatcccggattgtccagcgtcgatacgagctccccgttcaggtagtagctcatggtgacgccgtcgtaggtggctagcacgtgcgtccaggcgttcagcggcacagtggcttcggtgcagcggtagcccgatcccgtgttgacgtagtgctgcagctggggcgcatagtagctgaggtcctggccggcgccttgcgcgctggagaacaagtcgaagtagccgctcgtcgggttcgccgtgaattggaacagcacttcgatcgtttcggcttgcgcgatggccgcgtaatcgtcggcggtgaaatcgtatcctacggcagatgagccgtcgaatacggctacgggcacgccgaacgaatcgctctcgtaggtcagcgtgccggtgggcacggcgttgtgcggcgccaacgcggcatctgcgtggcttcctgtggagaagtccacggacagcagcgggttgcccagagccggcgttacccgggccgccgtgcggaacgccgcctccccgacgagcgtttccttcccgaacgggttcgcggcgaacacgcgcagcacgtgcgacgtgtcctcggcaagccccgcgccgaacagcggacgctcgaacacctcggcgcggttcacctcggccttgtagtagtcggacatgaagcgcgcatcgtacaccgccgcgtcaggcgcttcggccaaggcgactaccgcgcgatacgaaatgacgatgtcgtcttcgagcccgcttgcgtcgggcgccacccgggcggcctttacgctgaacgaggcaccgttcgccgtgacggactcctcgatcaccgctacttcggcgccgtccagcacgaggggcggcttgctgcgcgcggccatgcctgcgtgcgtgtagcgaaaggcggtcgttcccttcgacggctcgatgacccacggtgcgccgagggcgcatccgctgcggaagtcgagtcggtatacggacacggagttggtcgccgggtcgatttccacgagttcgcattgattcgcgtcccagccggcgttcgggtggccgcctgcgctgccggtttcgtcgtgcccgtcgttttccatccagaagttattggcgaacgtggcggtttggatgagcgtgaacccgtcgtcctgatagatggagcgcgggtccgccatagggatgtgggtgtggccggagaagtggatgatctgcggatacttctcacacagctcctggtagaacgcgccggactgcgccgtgttggcattctcgtcgaactggccgtcccagctgttcgaacccgagtaccatacggtgttcgggaaagggtgatgcgtgagcaggaatatgggcttggccggatcctccgccgccgcggccgcgcagcgttcgaggatccaatcgcgcttcgctccgtaccagctgttgtcgtagccgcccggttcgggcgcgaccgccagcacgtggtagcctcctacggcgaagtcggcatccacctggccttcgttcgcaccgcctggcatttggaacgaaccgggcacgttcagctccgaggcgaggaacgtcttgaacgcgtcctgagcgttctgcttgctgccgctccagttgtagtactcgtggttgcccatgacgatgccgaccggcttgcgcgcgctagcgttcagcagttgcgcgagctcgacgtactggtccgggtggccggtgtcggccgagtcgcccacgaagaaatgcgcgtccacgtcgggtgccatggcgtagatggccgagaacgcttcagggatcttgtcgcggtagttgttgttcgggcttgcgccgacatgggtgtcgctgtgcacggtgaagcggatcttgtcgccggacaaaggcggccagttcggggctgcgggctgcgtgaacgcggctgcggcctgctgctccggaaagacgagcatccctgcggcggctgacacgccggtgacggcggccaacttgaggaacgcgcgtcgcgacacgccgaatgtgccgcggtcgtaggctgacgcgagctgttggggatccatggtttcctttcgatcgacggtatgacgcgctcaatcgtaggcgagccacgtaagacccgcgcaagaagcacgtcgtgcgagggaaaggatctggtaagaatttcgcgaagccttcgaggcgcggcgaaccgcgcgaaccacgcgccccgccgcgctgaaaaaggtctacccgttcaccacggtgccgccgttcacgtggatcacctggccggagacgtagctggaatcgtcgctggccagaaagacgtaggcgggcgccagctcgtagggctggccggggcgccccatgggcgtcgactcgccgaagtgcttcaccttgtcgctgtcgagcccgtacgaggcggggttcagcggcgtccagataggcccgggcgccacgccgttcacgcggatgcggcggctcacgaggtcttcgttctcggagagcgagcgggtgaacgcggtgatggcccccttcgtggccgagtagtccagcaggttcggcgagccctgataggcggtcaccgacgtggtgttcacgatggcgcctccctcgggcaggtgggggagtgcggctttcaccaggtagaacatgctgaagatgttggtctggaacgtgcggaccagctgctcttgggtcaagtcgaggatgctctcggccggtgtctgctctccggcgttgttcacgagcacgtcgaggcgaccccattcggccgcgatcccctcgaccatatcgcggcagaacgcctcgtcgcctacgtcgcccttgaacacgagcgcgcgccgtcccagttcgcggatgcgctcggccaccgcctgcgcgtcgtcgtcggacgagtagtaggcgatcgccacgtcggcgccctctttggcgaacgcgatggccacggccgcgccgatgccgctgtcgccgccggtgacgagggccgccttgccgtccagcttgcctgctgcccggtagaggtcgctttccaactgcggcttgggatcgacgttcgcgcgcgtgtcgtccatggcgtagcccgctttcggggcttgggtttccaatgctacgagttccgacatcgaagtgctcctttcggatcggttgcttcgaccgcatcgtagccgcagcggcctcgttcgcctccgggcggtcgtcaggcgttgccggaggtttttcagccggtttccttcgcctataatagacgcgtcgcgaagcgcccggcgcgcttcgtcgcttcaacgacgaaagggcgcccatgctgtcatccgagggatccatcctgctcatcgcgaaccctgccgctcagaacggcaacggggcggctgcggcgcagcgcgccgtcgggttgctgcgtgcccagctgggggaggacgcggtcgtgctcgctcgcacggcggggccgcggcacgcctccgagatcgccgagcgcgccgaaggctgctcgacggtgatcgcgctgggcggcgacggcgtcatccacgaggtggcgggcgggctcatgaggcgcccggctgcgcatcggccggcgctcggcgtgatacccgtagggtcgggcaacgattacgcgcgcacgctcggcgtttcgaacaaggttgacgaggcgtgcgcccagctgctgaaagccgaagcgcaccctgcagacctcggacgcgtcaacggccattggttcgtggaaacgctgtcgttcggcctggacgccgccatcgcgctcgacacgatggagcgacgtgtgcgcacgggtcgcacgggaaccgtcctgtacatggagagcggcgtcgatcagctgctgcatcatctcgacttgcggcgctaccgcgcgtcgttcgacgggggcgagacggtggaggcggaatccgtcacgttcgccgtgcagatcgggccctattacggcggtgggttcaagatctgccccgacgcgcgcatcgacgacggcctcttggacgtgtgcgtcgcccatccgcccgtcggcgcagcgcgcgccctctacatcttcctgcgtgccaaaggcggcaagcacgttcgtttcaagcagatcgagctgcgccgatgccgtacgctgcacctcgagttcgacgaggcccctcccgcccagatggacggcgagctcatcgagggcacctcgttcgacatcgccgtggagcccgccgcgctgaacgtgctcgtgcccttctgagaaaacgtgcgctccacgatagggcttcgcgcaatatgatacgagggcatcgctatgaaccgcctcccgtttcttggacaaggaagcaaagttcgagaggcgggaggctcctttacgtcgccggagcatgacgggaagatgcgcggatccgcggtcgagctgttcgcgaggggcgcaaagggggctggcctccttgaagatggtttgcctaggaggcaatctgctgcttgtatctttcaagcgatgcgttccaccggtcaaaggcgctgtccgaacgatggtcgggaagtccgtacttttccgataagagctttcccatataagccgaaactttggttgctccgtcgaagttcagatggtctcctttgtcgtgcgtatcggtgctccagtcgatcggaaccttgtcgggcccttcgttcaggtcgtaatagtcgacgccgagttcccgggccagctcgctcatgccgttgtgtttggccgtgttccaattgaccgtgctcggcgtgctgacgaacacgggagtagcgccgttcgctctgcaagcttcgaccatggcggttatgtactggcggttcgcaacgtctaccggcagcgcctcgctgctcggcgtcatgtgattgacggcgtcggccggattcaccccgcggttgacgacgaaccccttcagcgggtcgctccatgtggccgaaggcttccctaagaagtcttgcgcatccaggctcttccatcgatcgtggtattcgaagacgggcagcttgttctggaaaaggctcagaactgcgtcatccggcttgatcggcgagtagatggagttcgtttcgaatacgacgaccttgggcttttgggaacgaagcgctttttccagcaatcggtacccgtacgtcaatcgctgacccgacgtagcgctcacgtacgaggtgaagccatgctcttcccacatctgcaacggggagaacgagctgtacgcctcgctgtcgccgatgaatatcgcatcgagggagtggcccggctcgccgaagatcccgttggcggcttctgaaacctggccgaattccttctggttgtttttcggctggacgacgctcgataccgcccaaagaaggccgagcgttgcagccgccacgaaaaccgcggtcgcaagcaccttgaaggcgctgcgtagtttcactgctctcatgcatgctcctaaaactgcgcgtacatcgggtcgaccggcgtgtagtcaaggccgtaggctccgaacgtcacggttcccacgaacagaagaatcacgaggctccatctcaggagcgcgctttgcgcagtcgcccactcccacaaattgcagccccgctccttcactacgcctactgcgagaaccagcatcatgaacaaggttacgatgaggccgtcgccaacgccgaatccgatttgcaacgccgatcccgtcgtaaaggcttcgatagtgaaatcgcccgcaacccgtcccatcatggcaagccccgcctcaagcgagttggagcgaaagaacagctcgccgacgaagatgatcgccagcgtccggacggtctggaacgttcgataaggccagctattgcggtcgacgccgaagtgctgcgccgcacgcgcgcatggaggctcgatcaagccgcccgccatgatcaggacgaagtagtacaaaccgaagaagatgtactggctgccggcgccatgccacaagccgttgccgatccacacgcagaacagcgcaacggagcttgccagaagcggaccgtatctgtttccgaaacgcttgcgcgccttggtcgtcagcatcttgcatggcttggacaacgagatagggtagtacacgtagtctttgaaccacaggcccagcgtgatatgccaacgttgccagaattcggaggcggtgcgggagaagaacggctgcctgaagttttcgggcagcgttacgttgaacacgcggcccatgcccagggcgacgtccatcgttcctgagaaatcgcagtacagctgaatggtgtacaggatcgcagctaaggctatgacgcctccgtcgtacgaaccgtaattgtcgaacaccggcttcacgaacgcgttcagccggtccgcgacgatgatcttcttcgccatgccccacataatgcgcaaggttccggcgtacaggttctttcgattaagcggttcgcccgcgataaggctggacgcaacgtcgttgtatctgctgagcggtccttccatgattcctggaaaaaatgccaggaacagcgccacgtgcccaaggttcttgtcggccttcgtgcgttcgcgatacacatccacaacgtatgaaacggccatc

SEQ ID NO: 9551 - DNA, 1696 bp, Unknown
  gut microbiota DNA sequence
tgcgtacaggttctttcgattaagcggttcgcccgcgataaggctgggcgcaacgtcgttgtatctgctgagcggtccttccatgattcctgggaaaaacgccaggaacagtgccacgtgcccaaggttcttgtcggccttcgtgcgttcgcgatacacatccacaacgtatgaaacggccatcaacgtgtaaaacgatatcccgatgggcaatgcgaagctggggatggaaaggtcgatcgaaatgccgaacgccgccagcgtggaagccagcgacagcccgaagaaccccgagtatttcaggacggccagaatgccgatattggcgacgacggccgcgaagacgatacggcggttcttccgcttgcaggcctcgcgtatctcgcgtttgcccgagctggctgtcgccagttgccggttcttctctgcaaggttggcgcccatcatgcgggcgcacgcgtacaccactgccgtcgacagggcgacgaacgcgataagcgcgccgctgagcgcgaagaagaagccgtagctggccagcaggagcaccgcccacctaaagcgccttggcgccatgccgtacaacatgaccgtaatcggcaaaaaggccgtgaagaaaagggcggaatagtacgacgtcattaaaatgattccctactcgagcgattcgcgcaggctaagcctgctctgcttgcaggcgcgccatcagggagcatacggcctcaaccgagttgaaattgtcgggtacgatctcgacggggggtatctcgacgtcgaatgcatcttcgagctcggccacgaaggcgatcatcgtcagcgaatcgatgcagcgcgaatcgacgaggtcgacgcgtgcctcgtgatccacgcccgggttgatgtcttcgagaatgtcgataacttgatttttcatagtccgttctccttttcgtcctgttccgtcgatctatcctgcgacccgttcgatgaattgaacgaggccgtttccagccgatgccgagcaatgcgcatgtttcccgaaacgtcgcgcacgaccaccgacggaagatcccggcttaaaaacagcgcccgaccctccgttgcgcagtaggcgcctgcccgagagaacgcaagcacgtctcccacggacaaattgacgatcggcgcttgcttggccatgatgtcgttgaccgtgcaaagcgctccgcagatgttccaaggctgcgcagcgccggccgttgcgccgaccttcctgaaaacaggggacttcatggccatcgaatgcccgtagtacgaaatctgatgcatgccgccgtcgacgatcgcgtagttttgcccgctcgtcgttttgacgtcgacgacgctggtcagatacgctccacaatccgctgcgatgctgcgtcccagctcgaggacgatgtccccctcgaaagggaaaccgtccagcagcgttgcaagctcggcaacgggttcgtcctgcgcgctgcgagcccgctcctcgttctcgtcgaagtactcgacgggaagcccggggccgtattcgatctcgttcagcttcaccgagcaagcggcttccacttcggccacgatgcggtgcagcttgttcaactctctatcaagcttcttgagcgacgttttctgcgtgcccgagtagtactggataccctggatgctgatgaacgggtcgtctttgcagccggcaatcagctctttcagcgtg

SEQ ID NO: 9552 - DNA, 183 bp, Unknown
  gut microbiota DNA sequence
cgacgatcggcgcttgcttggccaggatgtcgttgaccgtgcaaagcgctccgcagatgttccaaggctgcgcaacgccggccgttgcgccgacctttctgaaaaccgggcacttcatggccatcgaatgcccgtagtacgaaatctgatgcatgccgccgtcgacgatcgcgtagttttgcc

SEQ ID NO: 9553 - DNA, 298 bp, Unknown
  gut microbiota DNA sequence
ggcctcgatgaacatgtcggagatgtccttctcaacctcggccagcacgacgcgggcgttgcgctcctgctgcgcctgggcctcggcgctcatggcgttctgcagctcctggggcatgcggatgtcgcggatctccacgtcgttgatggtgacgccccactgctcagtcttctcctcgatgctcttcttcagttggtggtcgatatgcgcgcgctgcatggacagctcggcgatctccacctggccgatggcgtcgcgcagcgccgtctgcgccacgagcgacgccgagtgctcgtag

SEQ ID NO: 9554 - DNA, 816 bp, Unknown
  gut microbiota DNA sequence
cttctccgtgatcggcgacatgttggccgacggtaccgtggacagcgtcgatgctgtgctgactgtcacctacttggaaaccacgaacggcgccgcaaccaccgccggcctcgttgaaaaagccaagtagaaaaagcttagagtcgcaggatcttctgtcatcctggcgatctattccgcttggtagctaccgatgacgaagcggttcttgccggcggctttcgcacggtagagagctttgtcggcttggcgataggcgctctggtacgaggcgattttaccgtgcagttctacgccgccgatgctgagcgtcacttcgtgttcggtgccgtactggtcggtgaacgtcacgccgcgttttacgatgccggcgcaagcgctggccaaacgctcatcgtcgatgcgtccgttcacgcagatggcgaactcgtcgccgcccaggcgtccgatcaggtcttgcggcctgaacgcggccgtcagcgccgcggccgtctgttgcagcgctcgatcgccggcaaggtggccgtacgtatcgttcacgcccttgaagtcgtcggtgtccaccaccagcacggctccggcggtgccgtttgacagcagctcccccgccgtttcttggaacgtttgccagttcaacaatccggtgaggccgtcgtggtgggcgcgttcggacaagtccatcttctcgcgcatttcatcgtcgatgttggcgattttcccgattaccgagatgggtttgcccgcatcgtcctccacgaaatgggaagtgatgcgtatccacttcctatccttgtcgggattcgcttcctcgtggca

SEQ ID NO: 9555 - DNA, 883 bp, Unknown
  gut microbiota DNA sequence
ggtcccgttccaagccagcgcgatggcgtcggcttcgcccgtaggcagcggaacagtgctcgtcaccgcatgatgatcgaagaacaacgcgctcacgccgcacggcaacaacgtacccgaagcgggcatgtcggccaggtgaacgatcaggctgacggccaggtcggcaaacgccgcggcgtaatagagcagacccatgcccgtgcaaatagctacagccatagttgtcatcacggcaatcgaccaggccactttgaaccagcgcagcccgctcatagcggccttcaaaagcggtgtcagcaacccgttcgtcttcaaaaggtagaagaacgtgatgatggttttgaaggacaccggccccgagaacagcgagcgaaacgccgggttaggcatgatcttcgtcacgatgaagttggtgatcttgttgcctccggcaatcctcacgcctgccaacacggtgagcacgccgcccaccagcagcagaacgagttcgatataccacagcgtccattcgtcgtatccttccttcgcgcacgcgatggtctgcgaaccgtcgtggtagtggccgacgaagcacacatacccatccttttccaagcggctcacgcgcagaggagaggagtcgttccccttcaggcacgcggctcggcaacgccgcagctcctcgtcgctcaacggatcgggcttcggcggacatgcagtcggcatcggagtcgtacctgcctcctgtctgacgtcgtcgaccactacgccgttgcgcaatcctataggatcgctggacacggcgttgttgatgtcggcgaagctcaagtcgtaggatgcctgcagcccttccgcgtcgaacgaaggctcttcggcggcgtagcttttcacctcctcggcc

SEQ ID NO: 9556 - DNA, 283 bp, Unknown
  gut microbiota DNA sequence
ccttgcatccgaagtcgtagaacgccgccagcgagcccgcgtaggaggacgcccggatatcggcaaagtccatcagcagcagatcctgcacttccatcccgccgaacgcgcggtcgaacaaccgcagttgacgaacccctcccttgacgcccgctcccacgacgaacggcttcgggcacgcgcttcccttgcacggcttctgcacaacgcaatcgagcgcgccgttgacgaacaggcgcaccgttcccggctcgtaggcgatgcacaggtggttccactcgcc

SEQ ID NO: 9557 - DNA, 1948 bp, Unknown
  gut microbiota DNA sequence
tggcacacgttcgtccaaagctgcggttgcacgagccccttcgaaatcatgggctcctcgtcgccgcgcagcgcgcataggcgccagctcgcttcgtcgcgcgccacgtacagcgacatgcccgcctcctccgacaagtcgccgttcgcgaacacggtatacgcgtcttggccgtcgaacggttcgagcctgatccaagcctggatggaataggcgtcgttgcgccgccccgcagggttaatccccggttcgttggagatggccaggtacgcgctgccccgcagctgaacggaagggaacagagcgcgcatcttcgcatcgccctgcagcgcgatagtcgagccggacacgcgctcgacaggagtcttgcatccgaagtcgtagaacgccgccagcgagctcgcgtaggaggacgcccggatatcggcgaagtccatcagcagcagatcctgcacttccatccctccgaacgcgcggtcgaacaaccgcagttgacgcacccctcccttgacgcccgttcccacgacaaacggcttcgagcacgcgcttcccttgcacggcttctgcacaacgcgatcgagcgcgccgttgacgaacaggcgcaccgttcccggctcgtaggcgatgcacaggtggttccactcgccctgttgaaacgtttcgccgtcgcttgaagtggaaaagatgccaaacccctcgcgccagaaggaaaaccccttcgccgtcagcctgacgtcgagcgccccttcctggtgcagcaccgatgcggcgctttccaccggaatgcctcgcaccatcatatcgagcgtgaagggcgcggttccgtccaacacgatacccggcgccggggcagaagcactgcccgcgccgccaaggcagagcgcgatgtactgctctgcgtactccatgcgacccccttacgccgacttgaagatagtgccgcaggatccaaccatcaccaggcgaaacaccgagttgaacaggcttgcgtcggcagcgcacagcacctcgcgcggatggacgccccattggtggctctgcatggatggagccatctccacgccgtagtccaaatcaagtcgagcatcgtccggccatgagggctccgacggaggcagcacagcccacacacgcacgaacccatcgaaatgcggcggcacggcaggcacggccgccgaaagcgtctcggtttcagatgaggtcaccacgctggcttcgagcttcgctggttcacactgcataccgatcgtcgttcctacgggcacgttagtcgcagtgaggtagaatgcggcatgccgcggtgtatcttccggattcttcaagccgtcgagctgctcatagttggttttcgtcgtgccgataacgttgaggttgcggacgcacacgcccggattctggtgaacccatacgacgaattcgtcgtacgtgcggaaatcttcgggcacggtttccgtgcgatcggtgttggctatcccgaccaggcagaaccggttgcttgccgtagcatcgaggacgaaaggggtgacgccgacggcgacgtcgcctttactggttgcgctgaccttgacgaatggatcgccagcaggggttttcatagcgtttccgcgccacacgctaggcgtcatgaacaagctgacgccggctcggtacaggcggaggtagccctcctgcggcgacgagtcgaggctcttcacgcgcgtgtacacgaaattggtcttgcttccgctggacacctgctggttcacgtcgcgcgcatacgagccggaaagctcggtttgcgggtcggcaatttggtcgtgggagatgatatcgggcgattgatacgtgccgccatgcgagggagtggagccgtcgtcgttcgtatcgtcgcgaaacagaagtttgttttgataggccatgatcttcgctttcctgaaaagaggggtgtgattggaaaagctatgcacgg

SEQ ID NO: 9558 - DNA, 454 bp, Unknown
  gut microbiota DNA sequence
ggaacccgagcaatttaccctcgcggtttcgctccatgcagcgcgtcaaccgattcgcgacctcattatgcctaatgttgctcgttacaaattgccttcgttgaaagaagcgcttcagaactacgtggcgaagacaaaccgccgggttacgctcgaatacatcatgatcgaaggcgtgaacgacgcacctgccgaccttaaggctcttcaaaagttctgctcgaatcttctatgccacgtcaacctcatccctatcaatgcaatagaaggttcagaattccaaccgagctcgcctgaaacgattaatctatggctctccgaaatttcaaagaaaggaacggaagctacgctgcgcgactcccgtggttctgatatctccggcgcctgtggccaactgaaaaacaccttcaagccttgcaactgaagtgtttcacgtgaaacacttcagttgcct

SEQ ID NO: 9559 - DNA, 421 bp, Unknown
  gut microbiota DNA sequence
cacggcggagaaaatggtcttcgacgtgcgcgcgtagtactgcatgaccatctcgcccatgcgcttcgtggcgcccatgacgctggtggggttcacggccttgtcggtggagatgaagatgaagcgcgcggcgccgtaggcgtcggcggcgcgcacggcgttgagcgtgccgaacacgttgttgtgcagcgcctcgcgcgggcattgctccatgaggggcacgtgcttgtgggcggccgcgtggaacacggcgccggggcggtacttcgcgaacacctcgttcaggcgcgcctcgtcgcagacgttgccgatctcgatgacgaggtcgatgtcgtcgtattcggccaaaagctcgttgcgcagcatgtaggcgtcgttctcgtacatgtcgaagatgacgatgcgggcgggcgccaccttg

SEQ ID NO: 9560 - DNA, 325 bp, Unknown
  gut microbiota DNA sequence
ctgcgacgaggacgcgctggagcagctggcggtcgtgttcgaccgcgcgttcttcggcatgggcccgcgcactgcgcagaaggccttcccgtacgagtcggtgtacacgagcgagggcggcctcatgatgcaggacgcctacgcggaagtgctgcatgtgtaccgcggcgcgggcttcgcgaagaaccccggtttcaaggagccggaggaccacctggccgtcgagctggccttcatggcgctgctgtgcgggcgcgccgtggaggcgctgcgcgcaggcgacgaggcgggggccgagcgccagctgcgcgcccagcgggagttc

SEQ ID NO: 9561 - DNA, 454 bp, Unknown
  gut microbiota DNA sequence
cgcgcagaaggccttcccgtacgagtcggtgtacacgagcgagggcggcctcatgatgcaggaggcctacgcggaggtgctgcacgtgtaccgcaatgcgggcttcgcgaagaaccccggcttcaaggagccggaggaccacctggccgtcgagctggccttcatggcgcttctgtgcggccgcgccgtggaggcgctgcgcgcaggcgacgaggcgggggccgagcgccagctgcgcgcccagcgggagttcctgagcgaccatctgctgaactggatcgaccgcttcacgtccgatgtgcgcaaggctgccgaagacggtttctatttcgacttggcgacgttcaccgaagacttcctgaccgccgacgcggccgagcttgccgaagtgctggggtagcagcatgcgatcgtggcacaaattttcggtttgggcatggtggaaggcgggcgg

SEQ ID NO: 9562 - DNA, 1654 bp, Unknown
  gut microbiota DNA sequence
tgcgatcacctgctgaactggatcgaccgcttcacggccgacgtgcgcaaggctgccgaagacggcttctatttcgacttggcgacgttcaccgaagacttcctgaccgccgacgcggccgagctcgccgaagtgctggggtagcagcatgcgatcgtggcacaaattttcggtttgggcatggtggaaggcgggcgggaaacagcgaccaggcattacgtaaatgcatggtttgctattcgccaaaaagtagaaggaatttgcgcccaaaccgtgtatttgtgccagattcggccgacctgaccgacggctgaagcgtttcacgtgaaacatcgagtttgttgttgaggggatgatgagtgtggagacgatttcccgacgcgggttcctcgccgcgggggccgtgggcgcggcgatggtgggcgtcggcgggttcggcgcggtgtcgcgccaggccgacgccgcgttcgtgcgcccgcccggcgcggagtcgaacgcgcagctggtggcggcgtgcgaccgctgcgggcgctgcctgcaggcgtgcccctacggcatcgtgacgccggttccgctggccgagaacctggtggcctacggcacgccgacgctcgccttcgatcacgggtgctgcgacttctgcatgcagtgcgttgacgcgtgccccaccggcgcgctcgcctacggcggcccgcgcgagcgcgacctgggcgttgccgtggtggtgaaggacgcgtgcgtggcctgggactgggccggctgcaccgtgtgcaaggacgagtgcccggtggagggcgccatcacgctggacgaccacgatcggccggtggtgcatcccgagtactgcgacggctgcggcaagtgcgagcaagtatgcccctcggcctcgctgcgcgcctacgatgcgagcgtcgaggacaagggcatcgtggtggtgtcgcgctcgagcgaggcggcacaggcgacgggcgccgtgtccagcgaggagcttgcgtccaagcgcacggtggccgtggcgcaggcgaacgcggcgagcccccacaccaagggcgtccatcccgacggccccgacgcgacgcgagaggcgggagcctgacatgaagacgcgcatcaaaaccatccgcatcctcgtggcgaccggcgtgctggcgctggccgtcgtcgcggcgcatctcggcggcaacgccgccatcggcaccctgtgcgcgctgtgtcccgtgggcttcgcgcagatcgtcgtcgcttcgggcaccgtgccgtggggtctcgtgcccggcgtgctggccgtgctggtcatcgtgttcctgctgggccgggcgttctgctcgtggctctgcccctcgcagcttctgaagaacgtgttcggcggccataccccgcgcggcattctcggccgcagcggcgaagcggtgcccgtctcccgcggcgggtcggaggcgaacggcccgtccgagcctcccgcatcggttggaaaatcctccggctccggctgctccacctgctcgtcctgtggtacttccagcctcaagacccaaggactcgtcctggtcgttctgctggttgtgtctttcgccgtggggttcccggtgttctgcctgctgtgccccatcggtctcgtgttcggcacgctgtgggccctcaaccgcgtgttcgt

SEQ ID NO: 9563 - DNA, 265 bp, Unknown
  gut microbiota DNA sequence
ggcctcgtcggagatctcccatacgtagcccatgccgtcgcgatggatcttgtcgaaaatggggccgttcaggttctggctcatgaagccttttttgccctcgtcgacgaagcgcttgccgtcggcgcccaccaagatcatgttgggaaggttcgtgaaaccgttgaggttagcgctggccgaggtgccgttgtgctcgctcatgatggtgtagtccttcaccacgcacatcatgtcgttggtgtgcgacaggagcgcgcctgcg

SEQ ID NO: 9564 - DNA, 676 bp, Unknown
  gut microbiota DNA sequence
tccattacaacacgtccttactcgcagcagcgcgcccgcaggtgatcttcaagttgccgttacggcagcgcagttcgtcgatcatgcgcttctccgttcccggctgcttcatccgcaccgcatattccagtagaaacaggcttcccatgttggtggtttgcaccatcgtcagctcgtgctcgtcggtatagcgcttcagcacgtcgtcgaacacgccgtcgtactccaagtcgtcgggaatggtgattttcagcgtcttctccggctctttctgcttgccgaagggcgacagcatgtagcccacgttcacgatagccacgatgatggtgaacagcacggccagcacgatgaagcccatgcccgtggccaggccgatggccatggccagaaacacgctgccgatgtccttcgcgctgccggggatggagcggaagcgcacgaggttgaacacgcccatcaccgcgatgcctgcgcccaggttgccgttcaccagcgtgatcaccatctgcacgatgagcggcagcagcgccagcgtcaccacgaagttcttcgagtaggtgtggcggaacatgtagatgagcgccaccgccgcgcccaacacaacggacgcgaggcagcacagcaggaaatcgacggtggacacgcccgcaacgagcgattccgtcgatccgaatat

SEQ ID NO: 9565 - DNA, 427 bp, Unknown
  gut microbiota DNA sequence
cgtgtggcggaacatgtagatgagcgccaccgccgcgcccagcacgatggacgcgaggcagcacagcaggaaatcgacggtggacacgcccgcaacgagcgattccgtcgatccgaatatcgaggtcaatgcagtatcgagcacagttggttcctttcgggtagagagggaggggctatcgaacggccaggcacctcagcagcgcgtaggcgtgtgcgacggcgcacggaagcgacgagggcggcggccgcgcaacgctgcggcgaaccgctcggccttctgctcggcggctgcttgggacgcgcgcgctgtcgcaaacgacgacgcaccgcgatgagcggccatgcaggcccgatacgcttccccgtacttcgagaacgacgtcgggtaggcctcgcacgcatcgagcgcgcgaacgagccacagc

SEQ ID NO: 9566 - DNA, 1212 bp, Unknown
  gut microbiota DNA sequence
attttcgaacggtcaggcacctcagcagcgcgtaggcgtgtgcgacggcgcacggaagcgacgagggcggcggccgcgcaacgccgcggcgaaccgctcggccttctgctcggcggccgcttgggacgcgcgcgctgtcgcaaacgacggcgcgccgcgataagcggccatgcaggcccggtacgcttccccgtacttcgagaacgacgtcgggtaggcctcgcacgcatcgagcgcgcgaacgagccacagcggaaacgggccggacgacttgatctccatcacggcatcgccgtcggggagcagcggatgcgatgcagcaccggcatcccttgcgaacagatcgccgtaggcgatgccggcatcgaaggtgatgcgcaagtcgtccggcacatcgcccagcgcgcgcaagccggttgcgccgccgcctgccgccgcggcgatcgtcgcgatcgatgcgtacgcaacgcgctcgcactcgatgagcatcgaaggccgcagcggccggtaccgtgcaacgaactcgtcgatctcgcgggcgatctgcgcgctgcgcggcgacagcgactcggcggccatcgccggatcgggaagagggaatcgcatgcaagcctgctcgtacgactctccgcccagataggcttcggccgcagccaacgagcagcctacccgtcgcttgtacacgatgcccttgtacttcttcttgatctccacgaacacgcggtcgccagcctgcggcgacccgtagctgcgcaagcgcagcttctccttgtacagcggcttgtccaacgaccgctcgatgagcgcgcgctcgggcgtgtcgaagtagcggctgacgatgcgcgtccggccgaacgcgtcgggcgccatgcgaccgcgtaacgcggctgccatcgcgcggtgctggcgcgcatccaggcggtacttcacttccttgcgttcgaatacgtcggtgaacgttgtcatgggataccggtcctttccatcagacaccgcatcctagccgcgctgcctgaaagttccctgaaagggcctgcctccgcccgagcgctcgcgcagaagcaacacgctcgcgaaaagggccttcgcctgtttctttcagacgcttttcaggtctgacggtacaatggaagctaggacgcgcgaaagaaagcaggtcgccatgcaagtcctcatcgttgaagacgacgtgcgcctggcgcaggcgctggc

SEQ ID NO: 9567 - DNA, 17124 bp, Unknown
  gut microbiota DNA sequence
tgagcgctcgcgcagaagcaacgcgctcgcgaagaggaccttcgcctgtttctttcagacgcttttcaggtctgacggtacaatggaagccaggatgcgcgaaagaaagcaggtcgccatgcaagtcctcatcgttgaagacgacgtgcgcctggcgcaggcgctggcgcacatactcgccgagaacggctaccagacggacgtcgtgcacgacggcgcctccggcctcgcctacgccgaatgcggcgactacgacgtgatcatcctcgacgtgatgctgccgaagatggacggcttcgccgtggtggcccagctgcgccgcaaaagcatcagcgtgccggtgctgctgctcaccgcgcgcgacgccgtgcccgacaagatcaccggcctcgacagcggcgccgacgactacatgaccaagccgttcgcgcccgccgagctgctggctcacctgcgcgcgctcacgcgccgccagggcgaagtgctgttcgagaagctggccgccggcgacctcgtgctgaacctggaaagctacgacctggcgtgcgggtcgaagtccatacacctcagctacaaggagttctcgctggccaaggtgctcatggcgaacgccgggcaggtggtgtcgaaggacatgctcatcgcgaaggtgtggggcgtggagtcgagcgccgaagacaacaacgtggaggcctacgtgtcgtttctgcgcaagaagatgaagttcctgggatcgacggcgcgcatcgagacgctgcggcgcgcgggctaccggttcgtggccgatgccgcgcccgacgacgcctcggaaagcgcgggccttccatgctgaagaagctgcgcgtcaagttcatcgcgctcaacatggccaccgttgccgtggtgttggccgtggtgttcaccgccatctgcgtcatcgactaccagcagagcgtcgcgcgcgtgcacgagacgctcgacgctgctcttgcccacgcaggcgacgcgggcggcggcccgtcgagcggcacccagcccggcgcccaggtgccagcggacgccgcccgtgcaaacggaatgccccccgagatcggcggcaagcgcggcggatcggatcccgccattcccgtagcggtgttctcggtggaggccgacggctcgctggcagctgttcaaacgcgcactacggcgtccatcgccgacgacgtgctggcgcaggccgcggccgcgctggccgatcagcccgacggctccggcagcctggacggcctagggctgttctacgagaagcgcaccgtgggagacgccgcgtacctcgcgttcgcggacatgaacgccgcaagcagctggcagaccctggccgtcacactggcgggcgtgggcgcggcggcgttggctgcgttcttcgtgatcagcatgttcttctcgcggtgggcgctggcgccagtggatcgcgcatggcgccagcagcgccggttcgtagccgacgcttcgcacgatttgaagacgcccctcaccgtgatcctcgcgaacacgtccatcctgcttgagcatcccgagcgcagcatcgccagccagagccagtggatcgagagcacccagcacgaagcgcagcagatgcagggcctggtaggcgacctgttgctgctcgcgcaggtcgacgagggcgccgcgccgccgcccatggagcggctcgacctcaccgacctggtggaaggcgagctgctgcagttcgagtccgtggcgttcgagcgcgccgtcgatttgcaatcgcagctggacgagagcgtcatggtgcgcggcaatgcgatgaggctgcgcaagttggtgggcacgctgctggacaacgcatgcaagtacgccgacgacggcggcagcgtgaacgtatcgctgcgccaaagcgtgcgccgcatcgagctggcggtgcacaacaccggcttcgccatcgcgcccgaggatctcccccacgtgttcgaccgcttctaccgcgccgacaaggcgcgcacgcgcgacgaaagcggctacggcctggggctggccatcgcgcacgccatcgccgaggagcacggcggcaacctcgctgccgccagcgacgacgagcgcggcaccacgttcaccctcacgctgcccaccttgcccgcctgacgacgctggcgaagtcttctatactggaagcccaacctgaacgcatctgcttcgcaaggagatctacgcacatggcactacactcgtggctcgcacggcctcaacggcggttgggaccgctggggctcatcgtgctgctggtcatcacgtcgttggtcacgccgctttcgctggacatgtacacaccggccgtcccgcacatgaccgagcatttcaacacgtcggagaccatggtgaacctcacgctggtgggctacttcctgttcttcgccgtcgggctgctggcgttcgggcccgcaagcgaccgctacggacgcaaacccgtgctgctggcgggcattctcacgtatgcgctggccagcgctttatgcgcgctgtcagtggacatcgtcatgctcatcgccatgcgcatcctgcaagccttgggcgccggggcggtgagcgcggtgtccacggcggtggtgaaggacgccgtcgttcccgaacggcgcgaggctctgctgtccgtcgtgcaggtgatgttcgtggtagggcccgtgctggcgccggtggcgggcgcgctcatcctgcaggtcgccgactggcgcatgacgttctgggtactggcgggcatcggccttctgtgcgccgggctggcgctgctgttcgacgagacgcttcccgtcagcgaacgctacgagggcaccgtgctgggaagcgtgaagcagctgggcgcggtggcgcgcaacaaggggttctcggcgttcctgggcatcgtcgggctgtacaacctgccgttcatggcgtacatcgccgtcggttcgtacgtgtacatcacgttcttcgggctgaccgagctggagtacagcatgtacttcgcgttcgccgcgctgctgacggctgcggggccgttcatctggcttgcggcctcgcggttcatgtccgcgcggcggttcaccagcatcctgctgggcatcgcgctggcgtccggcgcggccatgctggccgtgggccaagcgagcccgcagctgttctgcatcacgttccttgcgttcgcgctgacggaggctgccgttcggccgtacagcaccaacgtcctgctgtcgcagcaggaaggcgataccggagccgcatcgtcgctgatcaacttcgcgcacaccgccatcggctgcgtcggcatgcttgccgccgtactgccgtggccgaactacgtggtgggcgtgggcgccatcatcgtcggttcgatgggcgtcgccatcgccggctgggtggctctgctgcgctcgaacgtgccgctcaggggcatcaaggatgcagggagcgaacccgccgctgcctccgacaacgaccttgccccgcaagagcgctagatagctgcggctttcgcacgcttcatgcagctttaatcttctttcatgatcttgcgccttgcaagaggggcctgctccaacgagacgcttggttatctgagctccctcacaatggcatagtccgatgaggagcataagcctaagggaacgcacggcgtgcgcaggcggcaaatgcggcacaagccggagaggcttgcgccgcatagggagctgcatctactgggaaccgattccttttacctgcgcgccgcgcaatgcttcccagccaggtaaccgtgaacgatcgcaaaagcgttcgacatgcccggcaacgatgcttcataatggttgccgaagcgtcgtccaaccacgttgcccgcagcgtagagtccgggaatcgccccgttcgaaccgcaaacctccagatcaggcgagcagagcacgccgctcatcgtatgaatgaacgactgctgcgccctgatcgcgtaaaacggcgcggtctcgatcggatacaagtagcgactaggcttggcgaagtcggaatcgaacccttgggcgaccatttcgttgtaccggtcgatcgaggccttcagcacctctggatcgacctccatctcggaagcgagctcctcgatcgtgtccgcctttacgttcgggctcttcgacatcgtctcctcgtccagcccgctctccatgacgccgaacatgcatatcggcttcatgtccgcagtctgctgagcatagttcgcatcgacgatcttccaaaaatgagcgcccttctctgcggcgcacggctgatcgtatgcgatacggccgattatcatgaacgcattagcctcgttggcgaaccgctcgccgatggagttcacgcccatgtacggcagcagcccagcctccgctacgctgggccaccccatcgtagcgacgggattgtcctccatgacaccgcctgcccagatgcacatcttatggccgtctcccgtatccaaacgacccttcggctgctcgtctgattccatgtaggaggtgtatgcgttgcagtcgtacatatccttggcgatcgtttcaggcagcaacgccgtgcacatgtcttcgttacctgcaaagtcccccgtacacacgataacgccctttgccgccttgatccgcagatacgacccgtcttcggcctgcgcgacggctccacccaccgcgccgttatccgtttgctccaggtacaaaccaggcgtgttgtacttgacctgcgctccagacttcaccgcttcggaagtcagcgcatcgagaagatacttttcgcgttccttcccctcttcgatgaagtgatcccatcccgtggtgaagctgccggggatcgtgatgtagggctccttgcttggatcgacgccttcggggtactgcgtgaagggcatgcctataacaaccccgttcgcttcggctttctccaaaagccaatccatgatcgcaccgctttcgtgcgcccaggttgcccaaaacgacgtgtcgcacagcggcccgtatttaacaagctcgttgttgagcacctcttccgggtcgagggtcactccagcctccacctgcttttcgtaaccgattgcagaatggaagatgccgccgtaacgcgagcagctgtgcttttcgataaggatggcattcgcgccttcctcaacagccgcattcaaggcgcatagcccggaaagcccgccgccgattacaagcacatcgcactccaacgtttcggcgatatcgccttcgtcgatcgtctgaggagcgccaagccaatcgacagcccctccatcgccagcgctcttgccgtttttttcgacggccgattcgctttcctttttcggcgcgcaacctccaagaagcatgcccgtagaagcgacagctcctgcaagcacagaccccttcagaaacgagcgtcgatccatcgttgattccatacgtccctccttggtcgttcgcttgcccgactgcaagcaggaccaagggtacggatccgacggaaggtttacatcggaggaagcgggtgatcatcgcaatcgatgagctgagctggatgcatgtcaaacagatcaccggaaaagtactactgccatctcaacgccccgcatcctgcgccttcgcttaaaacttcgaaacaagctccttgcgcgaagacacgcccgtcttcttgtatacgttccccacatgcgttttgacggtattcgtgcttatgaagagccgctccgctatttcctcgtacgtcagccgattgagcagcaatagaaggacctctcgctctctcatagtgaggtcgtaccgctcgaacgccgcatcgtcgagcgaaagctccgaaagcctgacggaatcgtcggcgatagattcagcatgaagcttcgagggcgcgtctcgtctgcgcgagaataggaatatgcaacatactaatataatgtagatcatcaccgatgaagcagcgctcgcaaactcagaaggaagcagggcccctactagctgccccgaattgtcagccagcgtaaacacacccaagatgaacaacagcttcgactggggcttttcggatggagcgctgagcaccgccgcgtagtagtactgcagcataagaaaagacacgaagcccgcattccccacaatcgctggaactacctggttcaacgatgcaaggggcaacaacgccatgctcgccgcagtcaacggagccaccacaaccgcgaactgcttcaccaaaccccaacgctgtcgcgagaagtaaaccgccaacaagagcgccgcggcgacgaaggtgcccgccagcacgagcggcaacgccgcgcttgcccaaccttccccgacttgcgagaccatgttgcgcacaagaccgtaaggaagccctatcaagaaggccaaaaatgcaagctgccccacattcgcatcgagcgcaacggacggttcgcgattctcgtctgcacccacgcggctcgaagcatgcattaacagcaaagacaacgtgccgaacaccatggcaaccggaatcgcaggaatctcaagaatgttcaccgccgcaaaaaggagcagcgcgataccttgctccacggcgcaaagcaaaagaatgtctcgatgcctgcagcgggcatgaaggcatccgtacaaggcgaacacgatgccgatacccgtccccgaaagaagcgagccagcgaacgccaaagcagattctgtggcggcgagaggaaagcacgctagaccgccgataacgcagaagaatgccgcaatataggttcgagtccctccgtatgcccgacgaagccgaggagagaacataagcaccacgaacaccacgagagttgcaagcacgcacgaaagccaaataatgtcgggaaaaccgacaatcggatccaaagagacgatatcgttttggtacagagtgagaaaatggcagcaccaccacaacgcgccaccgatcaccagaaaacgccacttccgcagagaggcaagggcttcttcgaaaagccgtccctcggctttcatcaatacaacctccgtcagacatcgaaggattcatcaggctttgcactcgtatggcgcaacgaaaacgagtatacaccctcgcgaactgcttccaccgatccgtgacgccgaaaacgcttccgcacggtaaaagcgaggcggtttggtaatcctatggcaaaggtagaatatcaggcgatactttcccacctggggaaataacggacctgccttacattcgactacatttgcgcgaagcagagcgccttcaaagttaccaggcttcgtttttgccgtcaaacctcgcttttgccggcaggcctcgattccaaccgcccccaacaacgcgagcggccccggcatagccggggccgctggaagcgtttcgcttacacgtagaacaggatgtcgttgtacgtgggaacgggccagtggtcgcgatcgacgaggacttcgagcccgtcgacggcggcgcgcagcctgtccatgacggggatgacctcgtgcgcgtaggtgttcgccttctcctgctcgctctcgatctccagcgtctcgtggtgcagcttgcccagggcgcgcagctgcgtgtcgatctccttgatgcccagcagcaaacggcgcagcagctcttcctgctggtcggtgtcggcaccggcgcaagccgaccggatggcgttgatgtggccggccacctcggcggcgtagctgttgatggcgggcaggtaggcgcggcgcaccatgcgcttcatcgtgcgcgcctcgatgttcagcagcttgttgtacttctccagcttcacctcgtagcggctgcgcacttcggtttccgtgagcacgccgaactcctcgaacagcgcgatgctcttcggttcgacgaagcacggcagggcgtcggccgtcgtaggatggttcgccaggccgcggcgctccgcctcccgcgtccattcttccgaatagccgttgccgttgaagatgatgcgctggtgcgccgtcagcacgtcgcggatgtaatcgatggcggcggcttcgaattcctcgccggccttgccctccatcgcgtcggcgaagtccttgaggctcttcgccatggccgtgttcaggatcatgttgcaatccgacaggttcacgcccgagccgggcatgcggaactcgaacttgttgccggtgaacgcgaacggcgaggtgcggttgcggtcggtgttgtccttgaggaagttcggcagcacggccacgcccaggtccatggccactttctcggcgttcgtgtactcgtggtcgtcgatgagcgcgtccacgatagcgtctagctcgtcgcccaggaagatggagatgatggccggcggcgcctcgtcggcaccgaggcgatggtcgttgcccgcggacgccaccgacatgcgcagcagctcctgatagtcgtccaccgcctggatgacgcccgcgaggaacacgaggaagcgcaggttgtccatggggctctcgccggggtcgaacaggttcttcttgccggccgacagcgaccagttgttgtgcttgcccgagccgttgatgccctcgaacggcttctcgtgctgcaggcacacgagaccgtgatggctggccagcaggcgcatcttctccatggtgagaaggttctcgtccacgccgcgattcacgttcgtgaagatgggagccagctcgtgctgcgccggagccacctcgttgtgcttcgtgcgagccggcacgccgagcgcccacagctcgttgtccagttccttcatgaactcgttgacggtggggcggatggcgccgaagtaatgctcgtcgagctcctggcccttgcagggggcgtaaccgaacagggtgcggcccgtcatgatgagatcctggcgcttggcataggccttctcggacacgaggaagtattcctgctcggcgcccagcgtgggcacgatgcgctgacgcggctcgccgaacagggccagcacgcggttggcctgctcctccaccgcgctcatcgagcgcaaaagcggcgtcttcttgtcgagggcctcgccggtgtaggagcagaatgccgtcgggatgcacagcacctcgtccttgatgaaggcgtaggaggtggggtcccaggcggtgtagccgcgggcctcgaaggtggcgcgcaggccgccggacgggaagctggaggcatcgggctcgccctggatcagctcttttccggagaagctcatgatggcgcggccgtcgctgcaggggtcgaggaagctgtcgtgcttctccgacgtgatgccggtcaggggctggaaccaatgcgtgaagtgggtggcgcccttctcgatggcccattccttcatggcgtgggccacgacgttcgctacctcgatctcgaggggcttgccctctttcatggttttgatcaggctcttgtacgtggcagacggcagacgctcctgcatcgtatgctcgttgaataccatcgagccgtagatttccgaaaccttcgccatgagaatgagctccttactcgttgcgttcaaggcggtgcgcggcctcccgcgacgcgcgcggatgaaccacccgcatacgatagcacggccgcaggtcaaaccgcatgatcaatacgccgtaatcaaactaacggcgaaatgtttcaagaagttttcgaacctgcggcttccaagctctttcgtagctatacgtacgaccaaggcgtcaggtctcccagcgcaacaatctcactttccggcacgctgcgcgcaaatccagggatgaatacgctcgacccggtcgcaatccaccgctccaccgtcgacacgacgcgatcgcgcgcatccatcggaagcccgcgccccgccctcgtcacgttcggcacgccgtattccagggcattgacgaacagggtttcaaaaggcactgagcgcttgtcgcccaaaacgatgatgctgaaaggaaccctcccgtcgctgaacagaccccctggaagtgaaacgactgcacgaacgcatcccgattcgatcagggcggcacgtactccaggctcgcagcctcgcgattcgtgcagcacggcattactggccgccagaaccgcgatgccgcccggtgctcgatgggcaaacgcctgctgcacccacgcaaggttcgccttattccgcggaggaacgccgaacgcccaacgcgtgtcgctgggatcgggtgcatggtcggtccattctccctgattgggaggcagcaccgacacgatcacatcagcgagcttacccgcgagttcgtcttcgaccagcgcggatcccaccgccaacgcaccgtcgtcgaagaaccacccttcgcagcgcgcagccagcttcgccacaagcgcatcggggaaacggacggtctggccgccgcagcgaatcgtcggggcaaaacgccgaagcgccgccagcgtatcaccgacacccaagcaaggatcgtatgcttgcgcagcagagggattgaacgctagcgcaatacgcgccatgagatcgctcacggcagcggggcacggcgcgtccggctcgggttcgtttccaagagcgagccaacggagcaattccccgttatagccgtcaagccgcagatcgcctatccgatcgatcatgcgtcgttgcgaagactcgtccaacgacgatgcgctcaaggcgaaaccgctcaagaacgacagcccctcgtcctgggccgcaaaacgctccagttccacatcgatctgagccggcgtatcctcggctgcgataacgcgcgcccaagccgcgccgtcgtcaaccaagcgcacgaacagcaacggcagcacctcccacgccgcatcgaacgccgacgccgcaacgccctcgacatgggcgagatccgatcgcacatcctgaacgagcgcttcaagcacctcatgcggcgcgggttccacaaagcgcttgagcgcctcttcgcgtcccgcaaacaagccgtcaaccagcaccttggcggctgcgtgcgcctctttcgcctcgcgctctcctttttcgatcgattccagaatcgcccgcatctcggaatatcgcgcgtcccgctcgccctcctcgatcaaggggatctctaacgcgacaagctcctcgagcggaagcgccagcgcctccaccgcacgatcgacaacgcgaagacgcgggcgaataccgagcgaggcgagcgcgaacacgagcgcatccaccgtcaaagggtcagacgcatccgtcgtcaaggcaatcgtgtcgaccaaaggatacgcgccttcaggcatcatgcgggccacaaggtattgccccgcctgccctacgactacgcactgctctcgtacgccctcctcgtcggtgtacgccataacgccctgcgaagagacggccgggagcgcgcccttcgcactgcgcttttcagccggaaggaacgagccctcgcgcatagcgcacgcgttccccagcttcatcgtcttcgaagagcgtctcgcggcttcacgataagcttcgaccccctcctcgaacaagcttcgattacgtgccgcaaggtcacggcagcgcgattcgcactcgtccagataccgcgccacggcgcgacgaacgtccgcatcaggccacggcacggaaatatgtcgcagactgctctccgtgagccgcacggtatgcccactcatgtccgcatgcttggcagctgggatgcgcgataggacgtgacgcagataaaccgtgtcggcatcgtcgtcgcatgcaaccacatggtacaaatcggtcgccgaaaactttccacgtgcttccgtcacctgcaaacacccgctgggagcctccacgttgcacactgatcccagcaagaggaaccgtccatcgaaagcataatcgtcgaaggggatgaaacccgtctcgacataaagccggtacggccccttccgcagcaaccgctgcgcccctcgcacgggcgcgcaccgatcatcgaatacgcaggcaacctcttccaggcgcttcatcttaatcgacatcgcattcctctctcttcctgaactcttccaccaggtcgaaaacctgctgacgattgtgcacatcgagcttccggtacaggttcttgcagtgcgagcgcacggtgttctccgacacgaacagcgtttccgacatgcgcgccacatcgcgaccgcgcatgatcagctcaagcacgtcggtctcgcgatttgacagcccgtaggtcttttttagcagacggctgtacacgggaaccatatcctgcgccacgatgacgttgcgcacaagaggacggggcgcagggcgctcgtccgatgggcgcgcaaccgcgccgccttcgcccgagaactccttgccctcaggctcggattcagcggctcccccgatcgggtcgaactcccgatcaacctttcctttgcgccgcatgttgaccacaacccccgcgaacgatagtacgtaggtcgacatgagcgcaattacgagaatctgggagatgtcgtacgtccgtcccaaagcgtcgcccaccgcgcgaccgatcaacaccccgccgtacacaatactcgagaacacgccgaacacggctatagggtccacctggcgcaaatgggcgatcttgatgcaggtcaccatcatgaagatagacacgagcgagaatgccgcgttcgccatcccggcgaacaacatgcgatagcccgcatcgaagaacggcagaaacaaaaagccggtcatcaccgcaaggaacaccgcggtgtacaccgctggaaacgacagacgacctcgcaccttgtcccacaccaaagccaggccgccggccgcaaccagcatgccaagagccagcgtcacgttcaagacagacgaatcgcttccgctttgctgggcgaacatacgcgaaaccccgccgacatacccgattgcggcaatgcacagcatgtagcgccatgtgctggacacgatgttagcaagcgtcgtgccaccgctctgcccgacaacgatgcccgaaggctcccgctgaaacacgttgccgcggcagcgtcgcaggaacagcgcgttgagcgcaacaacgcagaacaccacgatcgcgtacagccaaaaccaagcgatgcatgtcacgacaaggtagaacaccgccgacaatgcggatccgacgatgatccggcgcgctgcatcgtccgcaccctgttcggcgaacagccgctgccacatcacgaaggacagcgacgaccccgctccgacaagaaacgccgaaaggttctgcagcgccgcgttctgcacgaataccgtcgcgaacagccccgcatatcccagcgcaaggcacacggtggaatggtaggtggtatcgcgcttgcattgggacgggaagtagaggcaccccaacccgaacgcgaacaaaatgccgatgtagccaatagaccgtgcggtctcgccgccgctcataccgctgaacgaaagcgacgtcatggatgcgatatgaagcaaaccccaagccgacgtggagctcaaaaccaggtagatagcgaacccgacgctgtatgcgtcgaacgcgcgcgagatcttcctcaacatggcaccctccccgatgctcttcccatgatgccaccataccttccccacccccttccgtgggtgaaaacggcgaaattcacccatgctatgtgaggtttgccgacgggatattcgtacactgcgaatcgttgaacaagcatgcaataccgcatgctcggggtaaggaggaccgtatgatcaccaagggaacggcgttcgaccgccgcagcttcctcaaaggcgcgatgctcgcaggtgcgggtaccgccgcattcggattggcaggctgcgcagcgaacgggggcggcgcgagcggcggcgcatcgtcgaacgcttcggcaagttccggcaccgcagggcagttgagcgccgaggccatcagcaaggggacctgggcgttcgagatcgcgcccgaacccgtagccgacagcgagatcgcgcaagcctacgaggccgacatcatcgtcgtgggcgcaggtgtctccggcttggcctgcgcggcatccgctacggaagagggagccgacgtgatcctgttcgccgccagttcccaaccagttgcgcgcggcggctccaaccacggcatcggcacgaagttccacgagcgcttgggcattaccgactacacgaaggacaccatcgacggcttcatccgccaagagctggcgcgcaacggctatcgcgtggaccagaagaaatggtacaagtggatcaacaacagcgcctccaccatgaactggctcatcgatctcatggaagcgaagggctacaccactacgatggagatcggctacaccgacaccgagggcgtgttcacggcgcaccccggctcccataactgggtggagcaggccgacggcaaagagtcgggcgctgccacgggcgagaacctcgtcatcgccatgtacgaagagaagatcaaggagcagggcggccagatacactacagcactatcggccaataccttatccgagaggataacaacaccgggcgcgtttccgctatcgtcgccaaggaccccgacggtaactacgtgaaatatgtgggcagaaaggccatcgtgctggcgacgggcgacttctccgccaaccaggacatgatggcgaagtactgctcctgggtcgcaccgcttttgcagtacaacgaagttgattacgacgccatgttccagttcggcggcctcggccccggcgacggccaaaagatgggactgtgggtgggcgccgcctggcagcaaacgcttccgaacgcaccgatgatcgacgccgtgggacccatgccctaccgccagtctatcgctgatttctcgggactgctgctcaacaaaaagggcgagcgctactcgaacgaagacgtcatcttctcgtacggaacctacgccatgatgatgcaacccgacatgacgcgctacggcatctgggacaccgcttacgcgaactggttcgatacctgggaaacgttcggcaccaccatcgtggagaacgagggcaagaacgcgactacgcccgaggggtatctcgcctcgtgggacagcaatgtggagaaagggacgttcgtcaagggcgacaccatcgaagaggttatcgcgcaactcgatgggctcgatcccgagaacgcgaagaagtcggtcgagcgctacaacgagttgtgcgaagccaagtatgacgacgacttccacaaaagcgcgacgctcctcgcgcccatcaaggaaggaccgttctacggctgcaagctcgagatgagccccgctaacttcctctgcgtgacaggcggcttgcgcaccaacgaaaacatgcaggtgtgcgacgagcagaacgagccgatcgagggcctgtacaacctgggcatcatggtgggcgacagctacgcgaactgctacaacttcgccatctgcggccacaacctgggcatgaactgcaacaccttcgcctacatgctgggcaaggatctcgctgaagcgtaaccgaattcccggcggccggttcgcgcttatgcccgccggccgcgctctccccagaacgcgctggggccatcttccctccctcggctccagcgcgctccaaacctgggcatcgctggctctcccaccgcgcggggcttcttttcgaacgcgctaccactccacttcttcgtagtccaagccctgctcgcgcagacgggcgaacagctcttcaggggtgacggcttcgacaggagacgctttgaagtccttgacgttgcgcgtgacgatgtagtccgctttgattttcgcggcgcattgggcgacaaggcaatcctcgaaatccgcccagcgcaagccgagggcccgccttgcatcctccggcgatacccctacgatctgaaggaacgacagattatgctcgatcatctcctgggcagcatcgctgccgtggtccttgcgcagcagatagtagatgtcggtcagcatattcacgctaatgtaggtggacgcttcctggaccactcccagcaggcatacgcggcgcgacagctcataaaacggttcgcgtcgaccgatatggtcgagaatgatgttggtatcaagcatcaaatccatagcgatccttcaaacgcgcttcccgcagctcttcgtcggacatcgtcaagggacgcttcgtgtgcacctgatcgaacgcctcgatgcggcggcgcaactcgtccctatcgggcttctcgctcttctcgaaaggaaggccgtcgtgtttcacggtgtattcgaacaggcgcctgacggccgaggacggcgtgtagccttcacgccgcatgatcgcggcagcgcgctccttcatatcgccgttcaaccgcacggtcataaccgactccattgtgcctcccatcgacgtattacgtgtactacagtatagagggaagcgtcgcaacccgcaaccgggttcctacttgtgcgcgtgggcgcaaaacggcacctatgacaatttcgacagagggattaaagcggttcaagctggcaatgcggaaaacgcctccgcatacagccaggtcacgaattccaccactcgctaaaaaccaagttctccaaaacgaactttgtcatagcttgccattcggggacaactcggagcgaggaagcggtcgaaacgggagcgaggcgagacaagcccctcgcttcgcctcaaaagcctacagcccgcctccgaggaagcgggctgtcaatccgtctcgcattatcagcctataggcagtaccctccgcgtgccgacccggccacaacgggatgggtctcgacgaggtaggtgtcaaccgagccgatgaactcggatccatgagccgtcaatcgttggaattctttggaatcgtagaagcactcgaaggcatccatgtcctcgaaatagaactcggccatgccatcgcagggaagcttctcgctggaaacactcgccccgtctacgaatcggtcgatcacgaggttttgattgtagcccgcatggccgggaacagcctccaccagcttcgcgtgagcataacaccactctcgacggaattcggccacgctcaccccctccgcccgattcaagaacgacacgcgatgaaccaggttctttccccgcagatacggaggaacttcgcgcaccacgttgcgggaaaacaccaggatgtcgcacaagcgcttctgcaaaaggatctcggcgtcgtcgagaagggcgttaccggtttcggcatccaacgactgaaccccttcgagcatttcgctgta

SEQ ID NO: 9568 - DNA, 3982 bp, Unknown
  gut microbiota DNA sequence
cgcgcctcccttcgacgtattacatgtactacagtattgagggaaacgtcgtagatcgcaagaactctccctacccgaacgcgtccagttggtcgaggagttcttggcgggagttcacatcgagcttgcggtagatgtgggtagtgtgggtcttcaccgtaccggtggtcacgaacagggcgtcggcgatgtagggaagcgtccggccgcgcgccaaatagcccagcacctcggtctcgcgattcgtcaggccgtagctctgcgcgaaacgagtcgcgcgctcgagcacgacggactccggatcggcggccacaggctcgcccgggtcgcccgagggctcgacgagcgccggcgagtcggccgaggggcgcacgcctgccgattctgcttcgcccgcacgccgcaccagcatgaagaacaacgccagcagccccaggccgcacatcacgtccagcacgaaatcgccggaaccgaacagggcgtacacctgcttgcccactacgttgccggcaaacaccactcccgaaacgagcccctgccccacgctgaacgacagcagcggcgacagtcccagctcctgcgtgctctgggtgatgacgaggaacacgagcacctggaggaagaacgcgctgccctgcacgagcgctccgcccacgggcacggccgccgtcccaaacaccatgatggcgacaagccccaccgccgtgaacgtgacagtgatgcggtacacaccgtcaaccgaaatcgacgcgcggcgcgcggtcaggggcacgagcatcatggtcgcgatgctcgcacacaccacgatgccgccgaagaacaggctgtccacacccgcatacgagcgccccatcagcaccgacgccatgaggttgccgatgaacgtggccgcgatcagcacgctgacggcacgccacggaagcacgcgcgcctcccacgagccggccatcaactcgccgggcgtcgcggcttccccggccgccgcacgcgaggggaacacctccgacgacagctcatggcgcatgaccgcatcgctgcgccacaaggcccaagacgccaggggcagcgcgcagacgagcgcgatgctcgtcggaccgggaatctgcgccaccacgaggtacagcagatacgccaccaggaacgacagcaccacgagcgagcgcatgcgctgagagcccagcgagtagcgggcgccccacgccacgcccagcagcatgacggcaccgccgtcaatcaccccgcaagccacgatcacggccagcgcatccgcgcgcaccgcccacgtcagcacaagcgtagtcagcgcaaccagcagcgccgcgacgaagaacgccccacgcttcacgatgaagcgccgccagcgcgacacaagcaccacgacgccggcgcataccagcaccgaggcctgcgacgcgaagaacccgtactccaagccgatgctcgcatcgagaccgccgcgctcgggaaacagcgccgggctgagaaagcagagaaacccccacgcccacagcagcgccgagcctaaaaccaccctcatgttgtttgcgcgcatcatgcgccccctccccagcctcgcgcatgcccatcagatcgcttacgggtatcctaccgcatgcatgctcgtcaggacgcgacaacaattgacgctcacctggtaaaatgcaaaaatctaccgtttcgtcagatgcggctcgacccgtcgtttgccatgctgtgatgcaaggaagccacgccgaggggcacgaggccgaacacgtcgaccgccgttgcggcttcaatcgatcaagggaggaaccatgaaccagcctgacaagagcacgctcagccgccgttcgtttttgacgggagcggccgccacggccggcctcgccgccttcgcgggactctccggctgcgcgccgcaaagcacgacgggcgatgccgcgaacgcggcaaccgcatccggcgcctcggcgtccggcagcgcctcggcaggcgccatgcagaccaccgaccccgcccaggccgtgtggcccgtggtggaagaggtggaggtgggcgccgccggcgagggcaagatcgccttcgtggccgagcccatcgcagcaagcgatatcgtggccacgcacgacgtggacgtggtggtgtgcggcctcggccccgccggcgacgcggcggcgctggcctgcgccgaacagggcctcaagacggtggccgtggagaagcagaccaccggcaactacaattccgccaccatcggcggcacgaactccaaactgcacgagcattggggcatgacctacgacaccgatgcctggatcagcgacgccatgatcgactgcgctttccagggcgacatggagctgtaccgccactggctggagaagaacggcgaagccgtggactggtacatcagccacttcgacaaccagaacctcgacgactacccgctgacgttcgccgcgggcgactttcccgacttccgcgacgaatgggacaagacctctctgtcgcgctcgtggaacacgtcgctcaacctgccctaccctccgggcgagctggcgggcatcctcgccggcatcctcgagcagtccggcgtggaaatccgctacagctgccccgcctgccagctggtcaccgacgactcgggcaaggtgacgggcgtcatcgtgcagagcgaccagggatttgagcagtacaactgcgcgaagggcgtggtgctggcaaccggcggctacgagttcaaccagcagatgctcaaggagcgctgccgtccgcgcggcgtgccgggcagctggctgacgggcgcgttcggcaacaccggcgacggccatcagatgggcctggcggtgggcgccgccgaagacgagttcccgcacgccatcatgctggaccccgagcagctcatgccgtatctgcgcgtgaacaagctgggcgagcgcttcacgcccgagtacgagccgtacgggcatttggcgctggccatccaggcgcaaccgggcacgtacgacttctacgtggtggacagcgccatcggcgagaagatcgacaagatctggacgcccagctcctcgtgctacggcccgaaggaagtgtggaccgcggccgccatgagcgagaaggctctcaaggccgacacgctggaggaactggcgaagctcatggaggtgcccgaggcccagttcgtcgccaccatcgagcgctggaacgagatggccgccgccggcaaggacgaggacttcaacttccctggcgagatgatgatgaccatcgacacgccgccctactacgctacgaaggagttcgccgacggtctgtgcacggcaggcggcttgctggtggacaccgagtgccgcgtgctcgacaaggatcgccagcccatcgacggcctgttcgccatcggcctcacgtcgggcggcatgttcttcaacacgtatccgcacaacctgaactgcctgagccacacccgaaactgtcttatgggctacaccgtcggccaggtgctgggcgacaaggcgtaaccgcacgtttcatcgcgcgtcccctccccgcgaaggctccgccaccaacagcggagtcttcgtcgttttctctccgcgctcgctgagcgtgcggacgcaaaaccgggcctgtgacgatcttcgacgcagtttggagcgcctcgagccgaccgcggggaaaagacctccctataaggccaggtcacgaattccaccactcgcaaaaagccaagttctccaaaacaaactttgtcatagcttgccattcggggacaactcggagcgagggagcggtcgaaacgggagcgaggcgagacaaacccctcgcttcgcttcaaaaaccgacagcccgcctccgaggaagcgggctgtcggtccgtctcgcattatcagcctataggcagtaccctccgcgcgccgacccggccacgacgggatgggtctcgacgaggtaggtgtcaaccgagccgatgaactcggatccatgagccgtcaatcgttgg

SEQ ID NO: 9569 - DNA, 42394 bp, Unknown
  gut microbiota DNA sequence
ttccgttcgcaagaatcgtttgcttggcttttctcttcttcgctgttcagtatccggttttcaaggttctgcagtatcctttcggatcccgctgcgcttgtttgtttcaagcgcgtgaggaaatactttactgtatcgtttctttcctgtcaagaacttttttcaaaattctttgaagccgttcggagattgcttatctctttggtgcttcaggagagatccgttccgcgctttcctcaaacgcgggttttgtatattacccgtaaggtgtacgtaaggcaatgggtaattttgcaaaatctcaaactttttttgctcggattggcaaaaccccaggtaaagatctaataacgccggcaaaacaacgtggcaccctccacgagtgccacacataccggttgattatcgattccctttgccgtgctgtcccccaccgccaccatggccgtgctgtccgttccctgagcctcttccttcgctgtcccctgaggaaagcgccgcgattctgtcgcgcagctcacgcatggaaaggctcgcgcattcttcaagcgtcacgctggggtcgagctcaacgagctcgagagcggcgcggtagcggccgacgcccatgcctgcagagacggcggcttcgcgcgttccctcgtcgacggcatggcaggagccgcggcagggaagcgcgctcaggcatgcgtcgctctgctggcggatagcctccgcctgtcgtgcatcgtcggaagtgacgctgatctcaatgtacgagtcctcttgcgcatagggcgagaacgcatcgctttgcgtgaggaggctgagagcgtccgcatacccgcgacccgtaagcgacacggcatcgagcaatgactccccatcgccgttgagcgcctcgacccgaacgacgatgccaaaccggttgaccccaagctcgatggaagggttgacatcaatgcctacataggtagtgggctgcgcgtacgcgaagcctccgaatcccgcgaaagccagtgcgagacacgcggcgagcgccgcagcggcacgacgcagaggaatgatgcgcgcgcgggcgtgcttgcgcggtgcggcagcgcttgcgggagccgtttccgccgaaacgccagacgcctccgcaatgcttgctatataggtaagggtgccacgcttcacgtcgtcgggaacggtcacgttatcgaacgcctggcgcacccgcgtatcgaggtcggtcatgacagcacctcctgcaattgcttcttgcctcgcgcgagccatgagtacaccgtgttcacgggagcatccaccatctgcgcgatctccggagcggtataaccctcgtacagagaaagatacaagggagtgcgagggggatcgtcaagggaacgcatggcgtccaccacctcgctggagaacgatgcgggctgcgtggccgggtcgttcgaagctgcgcaaaccgcgtcgtcgagcgacaccgcgcgacgggatgcggccttgagcatgtccttgcatacgttggcggtcacccgaatgagccacgccttgcagtgctcgtcgtcgttgaacgccacctgatcggcaagcgcgtacttcaaaaacgcgtcctgaaaggcatcctgggcgtcggcgtgagcgtggaagtacagcacggcgacgcgccataccgcatcgccgtgccgctctatcgccctctcgatgtctcctgccgatcgcacgcgcaccgcccgctttcgctagcggcgcatgccgtgatggccgcgaccgttacccgcgccgtagttgtcgcacacgccgtcattgtcggcgtcgacgtagccggcgccgttgccgttgccaggaccgtagccgttgccgttgccctgcccgttaccgcagccatagccgttgccgtagttgtcgcagattccgtcaccgtcggcgtcgacgtagccagaacgcgacccctggcccgcgccgtagttgtcgcacacgccgtcgccgtcggcgtcgacgtagccggcgcacgatccctgacctccggtgccgttgccggtgccgtagttgtcgcacacgccgtcgttgtcgagatcaacgtactcgccgcgcacggtggcgatagccgcgccgaccgtcgcgccggcgtcgctgtctcccgctgcgcgcatcgcatgatgagcgagcgacccggctccgccggacggacaccaagtttgctgcatgccgttggcgaatgcgatggtgggcacggcgagcagcacgagagccacagctgccacgattgcgatcacgttcttcttcatttcggtcgatcctcctgttgtcgttcgcttcgtccttcatatgcaaaacgaacgaggggcgcgaatccttgcaaatattttcaaaaacttttccagaagcaaagcaggcggtccgaaagccgcctgccgattattacacgattcgaggaaacgggctacaccagcttcacgaactttcgcttgcccacctgcagcgtcgcgcccgcgagcagcgcaggatccacgttgtaggacttcgcaggcagcgcttcgccgttcaccttgacaccgccgccgtcgataagacgacgcgcttcgccggcgcttgcagccaggctcgcatcggccaaaagcttcgccaggtacacggttccgtcgtcgttgggcgtgaggtcggctgcgaactcggggatgtcgtccggcacggcatgctgtttgaacacgaggtcgaactgctcctcggccgcctgcgccgccgcctcgtcgtaatacgcggctacgatattcttcgccagcgcgcgtttcaccttgttcggatgcagctcgtcggcggccagaccgcgctcgatctcgtcgatctgatcgaccggcagcgccgaggcgagacgatagtacttcaccatgagctcgtcgggaatggacatgaccttgccgaacatatcggcaggctcgtcggtgaggccgatgtagttgccgtagctcttcgacatcttctgcacgccgtcagtgccctcgagcaagggcaacgtgaggcacacctgcggctccattcccatcttctccatgagctcgcgacccgccaacaggttgaacagctggtcggtgccgcccaactcgacatcggctttgatgacgaccgagtcgtaggcctgcatgagcgggtagaggaattcgtgcaggctgatgggctggctgttggtgtagcgcttgtggaagtcgtcgcgctcgaggatgcgggccaccgtgaagttgctggccagcttcagcaggtcctccatgttgagcgaaagcagccactcggagttgtagcgcagggcggtcttctcggggtcgaggatcttgaacgcctggtcgacgtaggtttgggcgttcgccttgatctgctcggacgtgagctgcggacgcgtggtgttgcgacccgacggatcgccgatgagcgcggtgccgtcgccgatgatgagcgtcacgccgtggccgagatcctggaactggcgcagcttgcgcagcggcacggcatggccgagatggatatcgggagcagtgggatcgacgcccagcttgatgttgagcggcgtgccccgcttgagcttctcgagcagcgcgctctccggcacgatctgcgctgcgccggaagcgatggtgtgcagttgttcttccgcggaaagcatggtcttctcttcctctctatacacgtagctcatgattctaccatagggagcaaggaggagccgtgcgaacggcgcgcccgccatcgagatgagcggagtcgaagaatctctcacgggatcagctgtcaacgattcagctgtcgccgcacgggatccttcgactcgctgcgctcgctcaggatggcggggtgggaaggctcgttcgggatggcgggaagagcctaggaaacgcccctgaatagatgaccgctggtggtgccgggggttttggcgatggcgttgccgtcggcgtgggccacgttgcgcgctcggacggcgcgctgcacggccttcgtggtctcctcgacgttcatgagcgtggtatccaccaggaacgacgtgatgcccgcatggatgaggtcgggcagggtctgggccacatcgagctgaacaccgttgaacaagtgactgcggccgagcgcgtcggtgacgaccgggaactcgtagtccttgcgatcgcgcagaaaatgcgggctcttgcggcgcggacactcggcgcagttctcgtcgcaggggccttggctcatgagcaggcagtgctcggtgaccatgagctcttgggcgccgatgatggtaaggcctagctcaaccggtgcatcttcggcgatgtcggcgatctggcccagcgtgagctcgggcgacagccacacccggcgcgctcccagctcggcggccgctgcgagcgatagcggattcgtgatggggatgtgcggccctacttcgacctcgcatcccagctcggcggcgcgcacgaggccggccagattctccacgagcacaggcttgcctggcttgacgtagcgccaaggatcgaaatcgatggccgcctcgcgcgtgcccggaacctggtcgtgttcaacagttggcagcgccacgacggcctgcttcggatagcccgcttgctctgcagtggcagaacgttggcccgccaccacggcctcgccgcgcttgtagttgagcgcaggcacgtagatgatgtcagcgcctgcccgcttcgccgcgcgtgcgcaggcaggattcgtggcccacgccgcgatgcgcacgccgcgcgggcgcgcgggcgcaagcgccgtgcgctcccgcacacgcggcaacgcacggttgcgcgtgggcgcgagcagctgctgcgcaaggtcgtcgagcgcggcggcgcgcacgcggtgcagctgcgagaagccgatacccacaccctcatcgagttcgacctcgagcgattctagcagaaacggagtttgacccaggcgatcgacatgcgcacgcacgtcgtcgaccgtcaccggcttcgtacgcgcgggctcgatcgcaacgccttcggctgcgccgatcgggggggtatgggctgtcgccgcacgggatccctcgacttcgctcggctgcgcctcgctgcgctcaggatgacgcgctgcagcgctcggcgccagcgagaactctacgcgcagcggctggccgatgcgcagcaccacgcgacccgtcaccgcgacgcgcggctcgaatacgtcgtcttcaaacgccgcttcggcgctgcggacgcggaacacgcggtcgcccttccccaccggacggtcgggcgccatgcgaacattgccttgcttgtcgagagacacctggtcgagcgtgtaggcgaagtgacccttgttcgtccagaactccaacacgtcgcccggtgcgagcggccgctcggccgcgacggtggcgacgccgttcttcgccgacgtcacgcgacccacgaacacgccgcggttgttcgggcgcccgtagctcatgatgtcgttgccgcgctggttctccaggtaggccgtggtgaacccgcgggagaacgcctcggccagggtgcgatgctcgtcttcggcggcccgcacgtccttgccgcttcccgcagcgcgctcggccagcgtgcgatcgagtacggcgcggtacgtctgcgtgacggcgaacacgtactcgggcgacttcatgcgaccctcgatcttgaacgacgtgacgcccgcttccaccagttcgggcagcaagtcgatggcgcacaggtcctgcggggacagcagatgctcgcccggcgcgggcaggttcttgcgcagcgccacgttgtgcagcgtgtagggcagacggcacgcctgggcgcacagcccgcggttcgccgaacggccgccgatgagcgacgacatgaagcactggccggagtagcacacgcacagcgcgccgtgagcgaacgactccacctccatgccgtagccgtcggccacctcggcgagatgggcgatctcgaggacggacagctcgcgtgccagcgtgacgcgctgggcgcccagcctcgccgccgcctcgatgccggccgcgttatgcgtgttcatctgcgtcgatatatgcagtcgcgcctcggggagcgtgcgggagatctcggatgcgatgccgacgtcttgcacgatgaaggcatccgccccggcgcgatacgcctggcgcaccgtttcgagcgcacgagccacctcggaaggcagcacggcggtgttgaacgtcacgtacacgcgaaccccacgcagatgcgcgtaggcgcaggcatcggccagtgtctcaagcgtgaagttgtcggctccgcggcgggcgttgaacgagtcgaggcccaaatacacggcgtcggccccgccgcgcacggcggcacgaagcgccgcggcgttgccggcgggcgcgagcagttcgatggcatgagacatggtagatccttacctatatatagccgtacgttttgcaccctttcgaacaggatgcgagctggtgtagagagttccggggttatccgaccgaacgttacggttcggtatcagcgctatggtagtatagtcgaacgatgaaaatacggagaaaacagcgcgaaatgcgcacccatgcggtgaaatggggcctcctcgtcacggtggcagccctttgcttcgtcggctacgcaggagttcagggcgccctcggcgtcatggaaggctggacgaagaacctccccagcatcgaggacaccgacttcaccaacacatcccgcgaatctgtgatgtacgcaggcgacgaagccacgttgctggcggagttccagctggaaaagcgcgatccggtaacgtacgaggagatcagcccatacgtgctggaaggcaccgtcgacaccgaggacgtgcgtttctacgagcacgaaggcgtggacatccccggtatcgcgcgcgccttcgtcaacaacctgcgcggcggcgacctggaaggcgcttccaccatcacccaacagctcgtgcgcaacaccgtgttgtccgaagaggcgaccgacatctccttcgagcgcaagatccgcgaggccgagctggccatcgatttggagaaacgcttcagcaaagacgacatcctggtcaagtacttgaacatcatcaactacggggacggctgctacggcatcgaagcggccgcgcagaactacttccaggtgtcggcgctcgacctgacgctcgcgcaggccgccacgctcgtaggcatcccgcagtcgcccacctatcttaatcccaaggtgtacccggacgcctgcctggcgcgccgcaacgtggtgctcgaccgcatgctgtcggccggcgacatcacgcagcaggagcacgacgatgcccaagccgaggagctggggctgaacccggcgcccgacgcaccagccgacggcatctacgcctatccctttttcaccagctacgtgcgttcgttgctgttcgacgagaacaacccctacggatgctcgtatgccgacctgttcaaaggcggactgaccatctacacctcgctcgaccccgagctgcaggacgcggcgcaggcggcggtggacaaccagcgcgcgaacatggccgacaacttggacgcctccatcgtagccatcgacgtggcaaccggccaagtgaaggcgatgacgcgcggagtgccgtacggccaaggcgaaggggaaagccaggtgaacatcgccacgggcgacggcggaacgggacgccaggccggatcgacgttcaaggcgttcacgttggccgcagccatcgaacagggcatctcgcctcagacgctggtcgattgcacctctcccctcaagaagggacaggatggcgcacccgaggacttcgagaacttcaacggcaacgactacggcatccagacgatccaaagcgcgacggccatctcgtcgaacaccggctacctgcgcctgtcgaactccatcggccaggcatccactaccgagatggccagccgcctgggcgtgacctcccccatgcagcccgtgtacaccgcaaccgagggcgtggccgacgtcaatccgttggagatggcgagcgcctacgccacgctggccagcggcggcgtgaaacgcgagcccacggtgatcacaaagatcctcgaccgcgacggcaacgtcatctggcctcaggaggagagcgacaccggcgaacgcgtgttggacgagaaggtcgccgccgccacgacgaaggtgttggaaacggtgttcacgcagagcaacggcacggccacgtcggcgcggttgaacagcgggcagccggttgcaggcaagacgggcaccgccagctcgttcaccgaccactggctggtgggctatacgcccagcctgtcgtgcgcggcttggatcggcgacccgtccggcgctattgagaccgaccacgggctcacggcgaacgcgctatggaaggacttcatggatcgggcgaccagcggcaaggccatcgagaacttccccaccgtcgcggatccgccgtacaacaacccgtacaacatcgctcagaagaacaagctgggcaagaaggtggaagaagagaaggacgaggacggcgaaagccgcgagaaggacgtgaactcggctccaagcgccgtgggcaagaccttcgaggaagccatccagatactgaacggctacaaggcgggctacatcgaggagtactccgacacggttccggaaggcacggtgatcagccaaagcgtgcaagaaggcaaggtggtcatcgtcgtatcgaagggaccgaagccgtaaacgagaccgctgacaaaaaagaagcgcccgttcagggcgcttcttttttactttgcaaggaacgcgctacaaacgcgacaccacgagatcgcccatctgcgccgtgccgaccagcttgtcggcgggcgtgtcggactgtttgatgtcgccggtgcgccagccctcgtcgagcacggcggtcaccgcgcggcgaatgtcgtcggcggcctcgcccatgtcgaagctatagcgcagcatcatctcgacggacaggatctgcgcgagcgggttcgcgatcccgcgtcccgcgatgtcgggcgcgctgccgtggctgggctcgtagagggcggtgccgtcgccgaggctggcgctggccagcatgcccagcgagccggtgatctgggcggcctcgtcggacaggatgtcgccgaacatgttctcggtcaccaccacgtcgaagtcgacagggcggctgatcagctgcatggccgtgttgtccacgagcaggtcctcgagctccacgtcggggtattcctctgagccgacgcggtgcacgatctcacgccacatgcggctggtttccagcacgttcgccttgtcgacgctggtcaccttgttacggcgcttgcgcgcggcttcgaacgcctggcgcgcgatgcgctccacctcgtactcgcggtattccaacgtgtcgtaggcgcgctggccggcggcgccgtccgagccgcagccttcttcgtcgtagaaacgctcgcggcggccgaagtacaagccgcccgtcagctcgcggacaatcatcatgtccacgccgtccacgatctcgggcttgagggtggacgcgtcggccaacgcggcgaagatctgcacgggacgcaggttcgtgtacaggcccaacgccttgcggatgcccaacaggccctgctcgggacgcggcttcgcggggtcggtggtatcccacttcggaccgccgaccgccgccagcagcacggcgtcggacgattcggccacgcgcagcgtctcgtccggcagcgcggtgccgcacgcatcgatggcgcacccgcccagcagcgcctcggtgtaggagaacgccgtatcgtacttcgcgcccaccgcgtccagcaccttgacgccctcggcgatgatctcggggccgatgccgtcgccgggaagcaggcagatgttataggtcctggtcattgatctactcctcgccaagtttcgccttcgtgcggttgatgaggccgccggcttcgatgatctcgcggatgaacggggggaacggctgagcctggtacgtctggcccgtcgtctcgtccacgatgacgcccgtatcggcatccaccgacaccacgtcgccctggctgatggcgtccaccgcttcggggcactccatgatggcgaggcccgtgttgatggagttgcggtagaagatgcgcgcgaagctcttggcgatgacgacgtcgacgcccgccgccttgatggcgatgggggcatgctcgcgcgacgagccgcagccgaagttctcgtcggccacgatgatgtcgcccggctgcacgcgttcgacgaacgacgtgtcgagatcctccaggcagtgcttcgccagctccgccggatcggacgtggtcaggtagcgggccgggatgatgacgtcggtatcgatgtcgcgcccgtagcggtgcgcggttcctttgaattgcatgatcgcagctcctcctagtccaggtcttccggcaggccgatgtggccgagcacggcgcttgccgcggcgatggccggcgaggacaggtacacctcgctggtggggtcgcccatgcggccgacgaagttgcggttcgtcgtggcgatggcgcgctcgcctgcggcgagaatgcccatgtagccgcccaggcaggggccgcacgtaggcgtggacacggcgcagttcgcgtcgaggaacacgtccatgaggccttcctccatgcactggcgatacaccgcctgcgtggcggggatcacgatgcagcgcacgtcgggatgcaccgtgcggccgcgcagcacgtcggcggcctggcgcatgtcggcgatgcggccgttcgtgcagctgccgatgacggcctgatcgattttgacgtcgcgcgcctcggcggccgggcgcgtgttcgacggcaggtgcgggaacgacacggtgggcacgatggaggcggcgtcgatctcgtacaccttcgcatacgtcgcgtccgcgtcggaatggtactcggtgtaggggcgctcggtgcggccgtccaggtaggcgcgcgtcacgtcgtcgacctcgatgagcccggccttgccgcccgcctcgatggccatgttcgagatgctcatgcgctcgtccatgtccatggcgcggatggcgctgccggtgaactccatggcctggtagagcgcgccgtccacgccgatcatgccgatgatgtgcaggatgacgtccttgccggtgacgccgggagccagctcgccctcgatcttgaacagcagagactcgggcaccttgaaccacgccttgccggtggcgtagcccacaccggcgtcggtggagcccacgcccgtggcgaacgcgcccagcgcgccgtacgtgcaggtgtggctgtccgcgccgatgatgaggtcgcccgcgccgacgacgccctgctcggggagcagcgcatgctcgacgcccatgcagcccacctcgtagtagtgggtgataccctgctcgcgcgcgaaatcgcgcacgatcttggcctgctcggcgctcttgatgtccttgttggggacgtagtgatcggggacgagagcgatcttcgtaggattgaacaccttctcgacgccgatcttgcggaactctttgacggcaatgggggcggtgacgtcgttggacagcacgaggtcgagatcgcattcgatcagctgacccggctccacttcgtcgagccccgcatgggcggcgaggatcttctccgccatggtcatgggacgtggcatgtgtgctcctttgtgcggtgggtctctggcgcccgcgcttccccgcacggaccctggaaatcgctcacaattgtaccactcgctttagcacgcaaaaggaagagccccgctgggctcttccaatgtgaagcgatttacagatttatccggtcgattaccaagatccgtggtagccgtagttgtaggagcccatatccaccgagttcatcagcccgtacatcgcggccgagatggttccgaacacgatcatgccgaagatgaactgcagcacgatccagatgacgaaaccgatgatggcgaacttgagggcatcgcttttcacctgcggcatcttgtcgacgttcacaagccaagcgatgatgatacccggaatgcccagcaaggcgcccaccacaagccaagcgaacttcatgccgccggtgagctgcatgagcggagcaggcgggtagaaagcctgcggctgaggctgcggagcgccgtacatcggttgctgcggctggggctgcgcgggaggaacctgctggcccatagaaggttgctgctgaggcaacggctcggtcgggggcgtcgcgggaggctgcggagccgcgtcgggctgctgcggggtgccagagtcggtgttcttcgtatcgtcagccatgataacctgctttcgaatcggttggtgtttgacagcagtataaagccctcacctgcggaaatcattaacttttgcatatccgtcatcgaaccgacacgagaatacatcagctggtgtaggaaggtttcgatcaaagagcgcgagcgttcgagcttccgatcgaggagatgccgcaagcctcctcgccacgcgcaacgcggccttcgactcgcttcgctcgctcaggatgacgggagcggaccgcactctctcaggatggcatcccgaagacctcgcttgctcggaatggcggaggggggtgcagcgtctacgatcagggtgccgagcttacgacagcgcagtgcacaaggcgtcgagcagcgtaatagcgaaatgctgcgcggaacgaccctcgcccgcgtcttcccacataatgccgggaagctcgacggcgatgcgcgacggactggcggcgtcggccacgccgatagccgtctcgagacgcagagaaagcgtctcctcgtcatcgaagctgacgcgcggcacggtggtcaccgtcagctcgcccggcaggacgatatgcacaagcaacatggactcgtcgggggcgacgagcagagaatcggcgctcatgatcttggaagcggggttcgtggccagcgcgagattcgacatgcgcgatgcgacgctgcgcgtaaaatcctgcgtgccgaacaggcacagcgcattgcgctcgagcacgtcggcggcgcgggcgaacccgaggtggctggaaccgtgcaccgcttccttgccctcccacgaatggtggaggttgcggatggcggcgtacgtgtaggcgccggcgatgccgtcggacggcaggcccaggttgagctggaacttgcgcagcgcaagctcggtgaacgcgccgaagatgccgtcggtggcgccgcaggcgaagccgagcgcgcccagcgcgtgctgcagctccagcacgtcgtggccgtggaagtgcggcatgcgcaggtacagggtgcggtcgcccagcgtgaacgaggcgtcgacgagcgccgcccacaccttctcggtcacctcgtcggtgagaggcaggcccgcgccgccgcagaacgcctgcacggcctcggccgtggtatcgccgaacgccccgtcgacgtcggcgggatcgagcagcccgatggtgacgaggcgctgctgcacgtcttcgaccgcgggaccggtgtcatgtcgcttaatggtttccatgagcgtcatggtagcgcaccgcggtgcgcgcgcgagggtttcgaccgaggttccacaagaggaacagagggggtatgcgcagcttgttgcacgcatgcccccttctcggacgtccgcgcagcggtcgcgtcaatcgtggcacgtgtagcactcgaacacgtcggcgtgatggcagcttgcgcattccgcatcggctttgtcggcaagcttctcggcatcgtgcatgccgtggcaatccgcgcatcggatagtatcgtgctgctcgctcggagtcacatcgtgcgggttcaccgccgtgcctttcgaatcgaccaccgcgacgtcgacggtggctgcaacgagttcttcgcgagcaccgtagtggcacgacaggcatgcgtcgtcgggcacctccgtcttcttcagcttcttgggcatggtatcggacgcggtcttgccctcgtgagccgtcgccagaccggaagcgtcagcatggcacgaaatgcacgcttgcccttcgtgcgtgctggccacgcaagccgcgtcgtcgtacgacgcctgctcggtcgcatggcaggtgccacactccgagtccgccgaccacgcaaccgtgatcggggtctccttcgcatcgtcggccgatgcggctccgttttcgttcgactggggcgcgcaggcggtcaacgccaacgcgatgactgcgcacgaaatcgtcgccgcacccgtaaacttcttcatcgcattgcctccttggcagatgagcgagcgataccttccggatcgcccgcaggttcttggccgcccttccgcacgagggagggagtcggaaggacggccgcgtcacggaacagatgaagccctaagcttcagcgtcccaaggagtcagcgcagcggcattgcgcccggcgatgcggccgaacaccatgcattcgctcacgttgccggcaccctggtagtaccaagcccatacggagccgagctcgccagcggagaacagccgctcgacaggcgtgccgtccgtatgcacgatgcgcgcactcgcatcgcgcttcggcccgccgttggtgttcaccatgatgggctggagctgcaccgcatacagcgtgccggaaagcgcgcgcttcttttccgcagctcgaccgaactcgtcatcgggaccggaaagcgcgtccacactctcctgcaggatcgtcgcttcgacgcccatctgagaagcaagttcctcgacagtgtcggctttgaccatcaagcccgaggaaagcaactcttcggtgctgtcgggagcgctggtgccgccgacgatgtgcacccaaccgctgccgctcgttcccataaacggcagcgtgctctcgtcgacaacctgccagaacggcaggcgcggccattccatcttggcggagtcgttgtagaacagcgcatcgcgaccgtatccgtgctgataggagcgagtctcgtccatgaagcgcttgccgtacttgtcggtccacacgtacccggcatcgcctgccacttcgcagtcgaagccgcattcgctgaaatcgtcatcgagccaagtagcctgcacgccgacgcgcgttgccggcgtcgcggagttcatgtgccagaagtcgatatcgtacttgcgacacgccgtcagagcatcgcccgtgttgtacggcgtgccccacgcgagcgacgggtaacggcagttattcgccttcatttcctcgttgtactcgaacccgccgcaagcgagcacgacgcccttcttcgccttgatgaggaggggcgattcgccttgctgcgcctcgatgccgatcgcttcgccagcctcgttgaacacgagatcggtgaaggccgtctcgaacagagacgtaacgcccgactcgcttcctaccacctcgaacataggcgcccagacccgagcgttacccaacccttcggccggaatgagcgtgttggaatcgcccaccgccgaagcggttttcgcagcggggtactcgcaggcgttgtgcgtcttcgtctcgatctcgaactcgtccaacagccaatcggcgttctctttcgcgccgccgatataggcctcgatcacggcatcgtcgagtccgacgaggtggtaatcgccggtgatctccttgaagtaggcaacgccttcggcggtcttttccggcgaccagatggcctgggcgcatgcgcggctattgccgcctgcgtacttttcgggagctttttcgacaagaacgacctggctgcccgccttcgcagcctcatgagcggctgccaaaccggcgaagcccgttccgaccaccaccacgtcggtttcttgatcccacgcacgctcgtcgcttgccggagcgcccgcgcccccctcggacgagcatcccgcaagcatgctgcccgcgccgaccgcgccgagggcgagcgcgccggtgagaaagccacgccgcgttaaacccatgctctcgttatcccttgttcccatttgttcctcctcttgttttccgctaccataggccgcgaaatcgcttcgacgcgcatctcgcaaagggcctttgacggcgaggagcgtacaggggaacgaagcgcgaaaacatcgaacaaggtatatgatttacgcgccgcagcaaggggatctgtccatcatataaagtatttgacacgcagctcaccggggagaatgcaatgcagcaagccacagggggagaaaagagtcgagttgtcgccaaaccggcccgctccgacattcaaagaggcggcatcgcgctcgatgcgttcgcctcggcgcttttctggggatacgtcgccatcatgttcgggtcgtcggaaatcaagattgcggagtccatcgggctggcaccggagaacgttgctctgatatgcggcaacgtcgtcgccttggtcgcggtcgggttgttggggcctcgcgcgcacgggtcgcacctgttcgtcctcgggctcgcgggctccggaaccgcgtgtattttgcagacagtcagccttctctcacccgagatggttcccgtcgcctggtcgcgcttgttcgcgtgcggcgcatcggccatcctcgtcctcgcatggtgcgagcatatctcgtccgagacctcccaggagcgaccgctgttcctagcgctctgcagcctgctcaccatcgtcatcgtcctcgtatccatacagttgggcgcacgatcggccattctgttcggcggggtgttgcccgtcgtctcggcggcactaggcgcttatcgaacgcgcgcgtcggcacgaactgcgcccagcgtgacgatccagcctccgtttcccctgtacctcatcgtcatcctgttcgtattcggattcatgatcagcttcttctcgcttttgaaccggcgcaccggaaccgtcgagaacttcatgatacccgccggcatcgaccccttcctcgcgggatggaccgtgctcgtcctcgtcatcgcaggatgcgtttggatgctgttgccgcaacggcacgcctccctcgtcaccaccgtgctcatcccgctcgcctcgctcggtctgctgctcccgccgttccttcgctacggtttgcaggaaacgctgccggccgtcgtggcgttcatcgtcatctgcgaggccatcatctgcagcgtcggcccgagcaatgccaagaagtactttcacatcggatcgttcaccttcgtgttctggacacgttcgttcggcctcatcggcatgatcgtcggctacgctgcggccattctcctgttcgacatcatgaagatcgccatcgacttcgacatccttttgatcatgttcgccgcttacgccatcctgtgcctgaccgtcgcggtgatgctcggccgcatcgggctgaaagcccccgcggagcgcgagcgcgagagtacccctgccgccgcggcgcacgcgcttgccgagcgctacggtctgacggcacgggaagccgaagtgctcgagctggtggcgcagggccgcaacatgacgtacgtgcagaaggccctgtgcatctcgccgggaacatcgtcaacgcatatcaaccacatccatcagaagctggacgttcacagccgcgaagagctgatcgacctcgtgcaggaggagttggcgcgctaaaaaagacccggacgaatccggaccctgatgaggtgcatctcgaaacgtagatcagatcacttcaagcggctgacgaaccagtcggccatggagacgaggaggtcgcgggccgtggaggggcgcaccatgtcggtcaggcggttcttcgcgatgctcgtgaggttctcggcgtagttgcgcgcgtagtcgatgctgccggacgcctccatgatggcgacggcctcggcgagcacggcctggtccttctccttcgacgacaggatgtcgatgaggcggtcgcgatcgtcggagtgctgcagcgcgtgcaccaccatgagcgtgcgcttgccctcggtgatgtcgttgcggaagtccttcttcgtgctctcctcggagcccacgaggttcagcaggtcgtcctggatctggaacgcgaggccggtgtccaggccgtagttgcgcagcgcctcgacttcgacctcggtgccgccgccgatgatggcgccgatggccaggggcaccgcgccggagtaatgcgcggtcttgtgcgtggccatgaccaggtagtcttcaggcgtgatgtcgtagcggccgtcacgcgcccatccgatgtcgagcgcctggccttcgatggtgcggcgggtcatgtcgatgagctcggtgatgacgcgcaccttcgtggcatcgtcgaggttctcatccgacaccaccgtgccgttgacgagggacagcgcgaggtcgcccgcgttgatggccagccccatgccctcggtgaggtgcatgcacggctcgccgcggcgaagctcggcctcgtcggcgatgtcgtcgtggatgagggccgcggtatgaaagtgctcgatggcggccgcggcgctggtcgcgcgcgccatgtcaccgcccacggcgcgacaggccgcgaagcagatgagcgggcgatggcgcttgccgccgttctggctgtacgccatgagcggctggtacaggtagcggtccatgtccgcgtgcgtgcccttcgggatgaaggagttcaccaggtcgcccacgcggtcggcgtacgacgtcaggtactgctcgaacgactcgggaggttcttctacggctgcgatgatttcgttgattgtctccatagcactttctctgtaggcctgggcgaatgatccgctcgacatggtatcacaaagaaaagcgggcgctttccgtgcgctgcgccagcggcttatttttccgggtttctccgcatatcaggttgagagtatgcaacgctttgcgtcaagcgacgcttcgcttgctacactgggagcatcgaaaatcccgcgcgagaaggaggcgtccatgaacgtcagccccgcattccaggcattcgcccaagaggctccgcagcaccagcaggcatggtcggaggcggtgcaggcgctcggcgcggccagcgcgctcgacgacaagaccgccgctctcgcctacctcgccgtcatggcggcggcccgtctcgacagcggcctgccgttccacgtgaagatggcgaagatgcacggtgccacgcgcgacgaggtgatcagcgcggtgctcatcgggctgccggccgtcggcaacgtcgtgaccgcgtcgctgcccgccgtgctggaagcgtacgacgaggagtaggaagcgggaggcgtcgcctccgtggcgctcgccgcaccatgaagcgcaaggtggtaggggcggcgggactcgaacccgcaaggccgaagccggaagattttaagtctcctgcgtatgccaattccgccacgcccccgcgtgcgacggcccgctgaaaacgagcaggccctatggtagcaaactttatcggacggcgggacctcagcgcgccgcttcgtccaaaatgatgccgtggagaatgtccgattcgctgaccgtgaacgaatcgacgccggccaggtcgagcaccgtctgcaggatcaccatgccggccacgatgacgggcgcgcggcccggatcgagcccgacgatgcgctcgcgctgcgcgagcgggacgcgttccagctggtcggccaccccgtcgagcatggggcgcgtgatgacggccttatgcacgcgggaggtgtcgtacacctccatgcgctcgtggatcgacaccaccgtggtggccgtgccggccaccgccaccagccgctcgggtgcgaagcccgccccgcgcagctcgtcgaagtaggggcgcatcccctcctccacccacgcgcgggcccgttcgagctcgccggcgccgggaggatcggccgcgaagaacttctccgtcacgcgacggcatccgatgttgaaggagtgcgagcgatcgggccggctgcccgcgcgcccggcgatgacctcggtcgagccgccgccgatgtccaccacgagcaggcgctccccccggaagtcgcacgacgcgcccgcgaaggagagggccgcctcgcgctcgccggggatgacggacagcgtgacgcccaagcccgccatcagcgcctcgaactcgtcggcgttgcgcgcgtcgcgcgcggccgacgtggccatggccctcgtcgtgatggcgggatgttccggcgtggcgaacccgcgcagcacgtcgaggaagcgcgccacggcatcggccacgcgctgcatggccgcgggcttcagcacgcccgtcgcgtccacgccctcgccgaggttcgtgatggtgtactcgcggtcgagctcatggagccgccccgcctcgtccacgtcggccacgagcatgcggcacgtcacggtgccgatgtcgatggccgcgtatcggcccgcctggaaaccgctttcggtactctcgggctccgcgatggcgctcatggcgaccccttccctcggtctactcgacgccgaacagggcgtccaggaacggcgagtaccacgtctccggcgcctcgacgctgcccggcgtgatgttggcgcggaacgtggatgcctcgtcctcgtcaaggtcgaggccgcgcacgttcgccgtctcctcgcccttcttcacccatccgaactgctcgtgggcgcgatcctcgatgccggcgtcggtctgcagcgacgagacgtcgctttcgagggcgccgttgcgctcctcgagcgccgcatactcggcggccagctggtcgcgctcgcgcagcgcatggtagtactgctgcgccggcgggtacaggaaggcgcacgagagcacgaggcagacggcgacggccgcgctcgcgatgaacttcggcgacgacttgagcgatgcgagcgatcccagcgagaagccgcgcttcgccgaagcctgcgggctctccgcgttctgcatgcgcgcggcctgacggtgcttcgcgcccatctcgcccttgtacaccgcggcgcgcgggcccgattgcgaggcatcggacggcttcgagccgccgaactgcttggtgaacgcgcgctcggccttgctcttggcgcgcgccttcttgcgctgctccttgcgggtcaggcggcgctcttcgacttcctcttcgggctgttcctcgatgcgctcgtcgaacgaggagaagcggcccgtgccgtacgagctcgatgcacggcgcgagctcgacgacgccggacgcggcgccgcatgacggcctgcgggacgatcgaacgtcgatatgcgggcgaacgaaccgtcgccggctcccgcggacgatcgccgcgcagcgcccgacgggcgcgcgtgcgccgccgttcgcgcgctcccccgcccctcgcctgcctggcggaagggcgactcgaatgcggggatggcatcgacggaatggatcacgggacgcgattcgggcgcagcagaagaggggcggcgcgcacgggtgtcgcgtttcgcctcgtcaaacgagagaatataaggctgcgttgccaaggaaaggggctcctctgtgcatcgtgtttcgtgtttggtttgtttaatgcagaagctggggaaagcataccacaccgacgcccgccctgccaccgagggcggggcgggcgggcgcgtcgttaagaacttgttgaatgctcgcgtgaccgaggaaaacggtcagggaaagcggggcgaaacccgcttacaggtcgagcttgttaatataagaactccattttttgaacgattcgtcgctgatggcgtgctccatgaggcaggcttccttctcggcctgctcctcggggatgccgagcgccttcgtgaggaacgtgaacagcatgtgatggcggtcgaggaccgacatgccgtaggcgtacccttcttcggtgagcgtgatgtcgccgtaatagggctggtcggcaagacccttttccttgagcgagctgatcgctttgttgaccgaggccttcgacacgtcgagcttcgtcgcgatgtcgaccgacctgaccgacacctccgtcgtgcctcccagcatcacgatggcttcaaggtagtcctcgtgcgacatggacattttttccacggaaccctccttttgttcgtcgttccatggtaccacacgacaggcggaaccagttgaaaccggatggcggtgcaaggggtgttggaggagccggcgagggaagggggtccctcgccggcgtgctgtgtggtggacgaccagacgagaggagagtccccaccaccgtgtcagcaaaaagaggaggtgcctgcgggttcgatttcctcggccccgctgacaattgttagtctacgataacttttgctgcggggcaatagaagtttaccatggtttacaattcctccacatatcggagggaggggcggctacggagagagagtggggggggggggcgaccacggcatccccgctcccctgcccccgtgccctctgcccccgtaaacgacgaaacggatgtttcacgtgaaacatccgttcgttgatcgcgttacgacgctctgcgtatggggcggttagcggtgcgactccgcagcggctcgcttctgcatgtcggccaccatggcgctggcagcgccgcagcccgagcagccgccgcatcctccggcgcatccgccgtgcgcgtcgtctcccttatggcaatcgcacatgccgttgcgcaccaagcggcgaaccgcgaggaacacgagcgccagcacgatgagcgcgacgaccaccgtagacggcgtgaactccaaaccaaacatagcgcgtcctttctcggaacatcggggcacaggcccgagggggttccctcgggcccgaagccgcttcgcctacgcgacgctgccctcggcttcaagctcgcccgcgaccttgtccttcttcttgtcgaaggtgggcatggggcggaaaatctggaacagcatgccggccaggaccacgatggccacgaccgtccacacgttgaagccgatctcgccggtaagcaagccgccgaactggtagaacatcaatcccacgcaccacgcgaagatggtcatgtagccgatggtgaaccaggtccacttcgcggtgcccatctcgcgccagatggtgccgatggcggcgaagcacggcgcgcacagcaggttgaaggcgcagaaggcgaggatggccggcaccgagcccgcaaagagggcggcgaacgcggcccacatggtgggatcggcttcgcccacatcgcccaggctggtcaggatgccgacggtggcgacgacgttctccttcgccacgaggccggtgatggacgtgacggttgcctgccagtctccgaagccaagcggcgcgaagatccagccgatgccgttgcccaggcccgccatgaggctgtactggatgtagtcgtccatctcggtatcgagcaagccgaagccctcgcccgcgtcaccgaagttcatgagcagccagatgacgatggtggacaggaagatgatcgtacctgccttgacgatgtagcccttgatgcggtcccacgtggacatcaggatggatttcaccgtgggcatgtggtaggaaggaagctccatgacgaacggcgaggtggggccggcgaacatcttggtcttcttcagcatgatgccggagatgatgatggcgatgacgcccaggaagtagaacagcggggcgatccaccaggtagcctcggtgttgccgccggcgatggcaccgaacacgagcgcgatgatgggcatcttcgcgccgcaggggatcatcgtcgtcgtcatgatggtcatgcgacggtctttctcgttctcgatggtcttcgtggccgtgacggcgggcacgccgcagccggacgcgacgagcatcgggatgaagctcttgcccgacaggccgaagcggcggaagacacggtccatgatgaacgcgacgcgcgccaggtagccgcacccttcgagcagcgcgagcagcaggaacaggatgatcatctggggaatgaagccgatcacggcgccgacgcccgcgacgatgccgtccatcacgaggctctgcagccacggcgcgacgtcgaccgcctcgagggcgttgccgatgaccgctcccaaaccgggaatccacaggccccacgagccgtcggaagcgtcgggctcttcagcttcgagggcggttgcaaaggccgcggcgtccacctcggcggattcgccggtctcctcgtcctcgacgatgccgacgacgccggccttctcggcatcctcctggaatgcggcgagggcgctttcgtcggcagcggtgggctcttcggcttcgagggccgcggtcgcgccctccacgtcgatgccgtcttcctcagcagcggcgaggtaggcttcgatgttggcctgctcgccttcccattcgcccacggcctcttcgtaggccgcgccgccggtgtacaggaagccgtcgccggagatgccgtcgttggcccagtcggtgaccacgcccgtgcccacggagatggccaggtagtacacgagcgccatgaccaccacgaagatgggcaggcccagccaacggttcgtcaccacgcggtcgatcttctgcgtggtggtcatgcccttgtgcgagcgcttcatcgtcttgtcgatgacgtgcgtgatggcgttgtagcgctcggacgtgatgatgctctcggcatcgtcgtcgagcttgttctccacctcttcgcgaatcgcctcgaccgccttgaggtcggcggcgctgagcttcatgttggcgacggtgcgctcctcgccctcgaacagcttgatggcgaaccagcgcgcggttgccggagacacgcggttgcccagaatgccctcgatcttcgtgatggcttcttccacctgcgcgtcgaagggcatcttcggctcggcgggcttgccggccttcgccgccttgacggcggtttccatgagctcggccatgccgtgccccttgagcgccgtcgtctcgacgatggggcagcccagctgcttcgacaggccggccacgtcgatcttgtcgccgctcttcttcacgaggtccatcatgttgagcgccaccacgacgggcacgcccagatcgaggatctgcgtggtcaggtacaggttgcgctcgaggttcgtcgcgtccacgaggttcacgacgacgtcggggccgccgtccaacaggtagtcgcgcgtcacgatctcctcgggagagtacggcgacagcgagtacacgcccggcaagtccgtgatgatcacgtctttgtcgcgggtgtacttcccttcctttttctcaacggtcacgcccggccagttgccaacgtattggctggcgccggtcagatcgttgaacatcgtcgtcttgccgcagttcgggttgccggcaagcgctatgcgaattcccatgatcagcctttccatctgcttcgaagccggtcgggggtctgcaatcccccgttggctcgtttttaagttagctgctactaactcagtcccaaaaaagaagcgccgcggcgcctctatcctcgtcacctggcgctcacgcctggcaacgtcagccgatgaggatgctctccgcctcgctcttgcgcagcgacagctcgtatccgcgcaccgtgacctcgatcggatcgcccagcggcgcgactttgcgaacgaacacgctcgtccccttggtgatgcccatgtccatgatgtgacgcttgagcgcgccctcgcccgtcaggcgacggacggtggcggtgtcgccgatggccacgtcgcgcagcgttcgatcttgaacttctgccatatgccccgtttcctttccttgaggttccttgcggtgatgccaactcgatgcgcgcacgccaaacggcacggcagatgcttcacgtgaaacatccgttcgtgctcgtgcgtggcttgcggaggtgctacgcggcggcgttcgtgatgatatgcgccgcgacctggcggttgagcgcgacctggatgcccttgacctcgacgatgaggtcgccggcagcctcggacaccaccgtcacctgcgcgccctcgacgaagccgaggttctccagatgatgatgcagatcgccgcgaccgcgcaccttcgcgatggtgcccgtctcgccgcccttcaggaacgaaagcggcatctgctggcaggcgatgcccggcgcagaccctgcgtccgtacgaccgaccgttccctgcatgctcgcaaccgttgcgttgtccatggtgactcccatcgagttagcttcatgtaacaaaagtatcttatagcaaactctcggggaatggaagccttagctaacattttccgcatattgttggactgggacgaggacgctgcagggcgcggggcgcggtcgcctcatttgtttttgagggtcatcgcgttgacggcgacgatgacggtggacaggctcatgaggaccgcgcccacggcggggctgagcaggatgcccaccggcgcgaggacgccggccgccagcgggatggccacgatgttgtagccggcgccccaccagaggttctgcttgatcttgcgcgtggtgttcgtgccgaggtcgagcaggcgcacgatgtcctcggggtcgcttttcacgagcacgacgtcggcggagtcgatggcgacgtcggtgcccgcgccgatggccacgcccacgtcggcgcgggccagcgccggcgcgtcgttgatgccgtcgcccaccatcatcaccacgtcgcccgcatcgcggcgctgctgcacgagctgcaccttgtcctggggcagcaagccggcgcggaactcgtcgatgccgagcgtgtgcgccacggcgcgggccgccgcctcgttgtcgccggtgagcatcacgggcgcgatgccgcgcgccttgagctgtcgcaccgcctcgcgggcggtgggcttgatctggtcgccctgcgccaccacgccgcgcacctcgccgtcgatcacgaggtagctgacggtgaggccacggcctgccagctggtcgaaggcggaacgatcgtaggggatgcgctgctcgtccagatagcgcgcgttcgcgatgagggcgtgcgagccattttcaagcacgcccttcacgccgacgcccgccacggcctgcacgtcgcgcacggccgcaggctgcacgccgcgctgctgcgcggcggccacgatgctggcggccagcgggtgcgacgacgactgctcgaggcccgctatgagcgcgagcgcgcgatcgtcggcgggggcgccggggacgttgggggcgtcggaggcgtcaccggcgggggcgctccgcttccccaccgcgcgcacctcggccacgcggaagtcgccctcggtgagcgtgcccgtcttgtccatcatcaccacgttcacccgcggcgccacctcgagggcgcgtcggcggcgcacgagcaggccgttgcgcgcgccgagcgaggtcgagcgcgccgccacgagcggaatggccaggcccagcgcgtgcgggcacgcgatgacgaacacggtgaccatgcgcgtgagcgcgtccgacacgctgccggtgacggcgagccacgcgacgaacgcgacgagaccaacgctcacggcggcgtagaacagccagcgcgccaccttgtcggacagcacctcggcgcgcgatttctcctgctgcgcctgcgagacgagctgcatgacctgggcgaggtagcccgactggccggttccggtgacgcgcacgtacagcgtgccgtcgccgttctgcgagccgccgaacaccgtgtcgccctcatgcgcctccacggcgcgcgcctcgcccgtgacgagcgcctcgttgacggacgacgagccgtccgtcacctcgccgtcggcgggcaccttctcccccgcctccaccatgacggtttggcccacctgcacctcgtcgagcggcacgtcggcgaaggagccgtccgcctgcttcacgtgcgcctgcgccggcagcagttcggccatctccttgagcgcgtcccctgcgcccatgacggctcgcatctcgatccaatggcccagcagcatgatgacgatgagcgtggccaattcccagaagaagtccatgtgcatgccgccgtcgtgcgcgacgctgcccatggcgaacgcgtacatgctgtagacgtaggccgtggtgatgccgagcgccacgagcgtcatcatggcgggcttgcggttgcgcacctcgtccgccgcgccgcgcagaaacggccagccgccgtagacgaacagcaccgtggccagcgcggccacgagccagtccgagccgggaaacgacagcgtgatgggcagcgcgagccccatcggcgacgacagcagcaggatgggaaccgccagcacgaggctcacgaagaaccgccgcttgaggttcactccgtgcatcatcatgccgccggaggaggatcgtcgtcctctgttcgcgggctcgcccatcgtctgcacctcgcttccgtaacgcatacgacgctcagcgtaccgggcttcgccgcggcagcggggcgcaggttgattcgttacggaacggaaggcgcctggaaacccaggtcgagcaagcagggcgggaacgcggccgcttgcaaattgcgtgaagatcctccgccgattctgccgccgggacaattcccagcatagtatactgagacgcgataccagttcggcggaacacggatgaaagtgcaggacatggctcaaaacctctactccgacacgcgcgggcaaagcgagcgccccgtcacctttacggaagccgtcatcgacggcctggccgcgggcggcggcttgtacgtgcccgaacgcatccccgagctttccctcgacgagatcggagcgctggccgagctgccgtacgcccagcgcgcggcgcgcatctatcgggcgttcgacgtggatctgcccgccgaaaccgtcgaagcgcttatggcccaggcttacggcgacaacttcgacgacgagcgcatctgccccatcacgtcgctttcggccgacacccacgtgctggagctatggcacggccccacgagcgcgttcaaggacatggcgctgcagtgcctgccgcgtttcttctccgcaagcgccgcccagctgcgcgagcagggcaagctcgaccacgacttcctcatcctggtagccacctcgggagacacgggcaaagccgcgctcgagggcttccgcgacgtggacggcgtgtccatcggcgtcatgtaccccgacggcggcgtgagcgacatccagttcaagcagatggccacgcagcgcgggcgcaacgtgcaggtatggggcgtgcgcggaaacttcgacgactgccagacgggcgcgaaaaacgtgttcggcgacgaggcctttgcgaagaagctgcaggacgagcaccgcatcgctctttccagcgcgaactccatcaactgggggcgcctcatgccccagatcgtgtactacgtgtcggcctacgcgcagctggcggccgacggcaaactgaacctgggcgacgagctggacgtatgcgtgcccacgggcaacttcggcaacatcctggccgcctactacgccaagcgcatgggcgtgccgctgggcatgctgtactgcgccagcaacgagaaccgcgtgctcaccgacttcatcaacacgggcacctacgacatatccgagcgccccttcgtgctgacgccctcgccgtccatggacatcctcgtttcgtcgaacctggagcgtcagctgttcgagctcacgggacgcgacgccgccgccatagccggctggatggccgacctgcgcgggcagcgccgcttccgcgtggacgaagagaccttcgcccgcgtgcgggagctgttcgcgtcggactccatcgacaacgccacgtgcctggacaccatcaagcgcgtgttcgagcagcacggctacctgttggacccgcacacggccgtggcctaccagaccgccgagaaccttcggggcgagaaccccgtgctcatcgcgagcacggcgcactgggccaagttcggcgacaacgtgtaccgcgcgctgcacggcatcgagcctggcgcgccgctgcccgacgacgtggccgcgctgtcgggctgcaagctgaacgagctgatcgcgcgcgagacgggcgtcgacgacatcccccacggcctggctgagctggacgcgcttcccatccgcttcgacgaggtcatcgacggcggcacgaacgacatcgaggcggcggcactgcgtttcctcgagcacctggacgactgacgcgcatgcatgcgcaagcaacaagcaaaggacggaatcccatgagcgaccttgcgaacctgaagccgacgatcaggctttccatcatgaacccggatgccgaaagcggctctctgttcggccgcggcatcgccagcctgtgcctgggcgtgcgcgaaaccggctcgctcaacgccgctgccaagggcatgggcatggcctacagcaaggcctggcgcatcatcaaggacaccgaggcggcgctcgacttgcagctgctgaaccgcgacggcgctcacggcagcgacctgaccgaagccggcaacaagcttttggatacgtacctcgccatcgaagagaagctgcagaaagaagccgaggagctgttcgaagcggcgttcaagtagcccccgtccctttgtctcattcccctgtctcattcagcggtcgcggtagtagcggacgaccagctgggtgcgattcttcagatcgagcttctggaggatggcgctgatgtggttgcgcaccgtgccctcgctgaggtacagcctggcggcgatctccttgttatcgagaccctcggccaccagctccacgatggcagattcgcgctcggtgaggccgctgcgcatctcgccgcccggcgcgttctccgcgcatgcgggtcctcgactcataaggacgtccatgcgatcaagcacctcgccgccaagcacgctctgaccggccatgaccgtgcgcaaggccggcgcgatggtggccacttcccgcttgatgaggtagcccttcgcccccaggcgcagggcgcgcacgatgtactcatcgtcggagaacgtggtgaggaacacgatgcgcgcgtgcttgtgcgcgcccaggatgcgctcggccgcgccgaggccatcggagcccggcatctggatgtccatgagcaacacgtcgggccgttcgcgctcgaacagctcgaccgcctcgtcgccgtcggcgccgagcgcgcacacctccacgtcgtcctgcgcttcgaggatggtctgcagcgacatccgaacgaacgggtcgtcatcgacgataagcgtcctgatcatgatttctccttcgacggttctttcggcacggtggcgaacacgcggaagcctttgcggtagccggtgcgcaggcgcccgcccagcgagctcacacgctcctccatcgtctgcaaaccgatgccggcctgcgcggtcgggacatccaccgccgtagaacgtgcaccgtcgcgcgaaccgttatcctgcacgatgagctggtagagagccgggtattcgatgaccgacacgtcgacgcgcgtggcgtcgctgtgcttcgccacgttcgacagcgcctcgcggacgacggccaccacgccgtaggcgacgggaagcggcacatcctggacgtcgtacacgaggcgcacgtcgtccaagccgcaggcgccgatgacgccttccagacgcgcgcgtagatcgaacgcatcgtcgtgcaggtcgtgcacgcttttgcgcaccgtgtccatggcctcgtgcaacgtcgcgcccaccgatgccagcccgccgcgaacgcactcgtcgtcggcgtgcaccacttgcaacgcctccacctgcagcaccgatcttgtgagcagatgacccacgttgtcgtgtatctcgcgggcgatgcggctgcgctcggacagggtggccaagcgcacctcgtagtcctgcgcggccatgagctcgcggttcttgttcgcaagcgacagcgacgcctcctgctgctcgtcgcgcagggcgcggtagcgctcgcgctcctcgcccgcgcgtttcgtgcgccacgccatgaggcaggcagccgcgcacagcacggccgcggggacgagcagaacgtcctgggtgcgcagcgcggccgccagcggcatgatccaggacagccgcacgagccagaaccgctcgccgaacagcacgtacgcgacgaccggcagcaacgcggagaactccgggacgaacagcgccgccagctcgtacgcgcccgccgccgcgaagcgaagccgcgcatgcgggtacacgtcgaagcagcacgccaccacgatggcgcacaggagcgccgcgacatgcgcgccggagaacgccgcgaacggcaaaagcagcaagcacagcgcaacgaggatgatttcgtcgataacccgatccatggccatcagtatagcgggcggcaaggcgcagcgcggcacgaggacgcgacaaaatgacgaaccggacgaggtccatgacaaatgtcatggctccggttgagaccgatgacgccgcacacttacgtggaaaccgctacaggggcatgatggtgccgacaacgaaatcgcggaacggaaccgccacgaggaggaaccatgaacatcgtagccgtcgacaacttggtcaagcgctacaacgaggtgctggcgctcgatcatttcagcctgcacatcgaatcgggcgaagtgttcggccttttaggaccgaacgggtcgggcaagaccaccgccatcaactgcatcctgcagctgctgacctacgacaagggcactatcgagttgttcggccagaccatgcgcccgtccagctacgatttgaagcgcaggatcggcatcgtgccgcagaacgtggccgtgttcgaggagctgaccgtgcgcgagaacatcgactacttctgcgcgctgtatgtgaacgaccgcgcgaagcgccgcgaccttgttgacgaggccatcgcgttcgtcggcctggaggactacgagaagttccgcccgcggaaactctcgggcggcctgctgcgtcgcctgaacatcgcatgcggcatcgcgcacaagcccgagctcatcttcttcgacgagcctaccgtggccgtggacccgcaaagccgcaacgccatcctcgaaggcatccagaatatgaaccgccaaggctccaccgtggtgtacacgagccactacatggaggaagtcgaggagatctgcacgcgcatcatgatcatggaccacggccaggcgctggccacgggcacgaacgccgagctcaaggccatgatcggcacgggcgagaagatccagatcgacgtgcccgagctggacgaagccacgttggcgcgcctggacgcgttgccccatgtcacccgcacgctctaccgcgaaggcacgctggaactggcttgccagaacggcacgcacaacgtaagcgacgtgctggccgtgctgcagcgtgacggcgcgcagttcgggcgcatctacgccgagccgccgacgctgaacgacgtgttcctcgagatcaccggcaccgagctgcgcgattagggggcggacatcatgttcaacgtattcaaaggcgcactgctcgcgctggtgcgcgagaagagcgtgttcatctggtcgctggcgtttcccctgatcctgtccacgatgttcgtgttcatgttcgcgaacctggacgaggcggggcagttcgagcccatccccaccgcggtggtggccgacgagaactacgacgcggcgccggggttctcggagatgatcgacacgctggcggagccgggagccgaccagatgctcgacgtggcgcgcgtagccaccgagcaggaggcgcgcgatctcatgagcggaaacgatgccgcaggagcgggctacttcaacatctcgggcgatggagcggccgggtatttcacggttgacgccgacggcatgcccaccgtgcacgtgaaggcgggggtcacgcccgactcgctggacagcgcctaccagtccatcttgaagaccatcggcgacggatacgtgcgcaacgcggcgctcatcgaagacgtcgccgccgagaaccccgccgcgctggccgacatggcggcggtggaaaagctgctggacgccggcgatctcaccgagaagatcgacgtcacgcagaacccgcccaaagaatccgtgcgctacttcttcgcattgctgggcatggcggcactgttcggtgggcagatcgggatgatcgctatctgccgcacgcagccgaacctgagcgcgctgggggcgcggcgcgccgtgggagcgctcagccgcgcgaagacgctgacggcgacgctggccgccagctgggtgctgacgttcgcctgcatcgccatcgcgtatctgtacatccggttcgtcgccggcgtggatttcggcggacgagatgcgatatgcatcgccgtgatcgccgccgcggccttgacggcgacggcgttcggcacgctgctgggctcgctgccgaagatcgacgaaagcgtgaagggcggcatgctgtccggcatcgtgtgcttcgcctcgctgttcgccgggctgtacggctcgcccacgatgaagctggccgataccgtgaacgcggcggtgcccgcggcgcagctggtcaacccggccgtgcagatatcccaagcgttctacagcatcatgtactacgacacctaccagcgcacgatcgagcacatcctgatcctgctggccatggctgcggtactgttcgccgcgtcggctctgttcataaggaggcagcgctatgcaagtctttaaaaccgcgatcaagacggtgctgcggcacccgatgtacctcatcgtgtacgccggcttcctgagcatgatgggcgtgttcatcgcaagcggcctgacgttcggcggcacgaacgacagcgagttctcgccgtacgagacgaagttcgccgtgatcgatcgcgacggaagcgcgctgtcggacgggttggcggcctacttgcgggagcagggcatcgaagttcccatcgaagacagccagatggcgttgcaagacgccgtggccaagggtcagagctcgtacatcctcatcgttccggaagggttcggcgacgcgttcgtggaagccgcgcgcaccggcgacgagctgccgacgctcgagacggtgtacagcttctactccaccgagggcagcctgatggaccagatggtgaattcgtacctgggcatcgcgggcgcgtacgccggcctcgaaggatcggcttcgcagggcgatatcgtgcagcacgcagccgaggccatggccgaatcggcggaaacggacagcgtggaagtgggcggaacctcgtccgaggcgcagcggttcgtgttcttcctccaatggggcacctacaccctgttcgcctccatcatcgtgtgcgtcggcgtgatgatgaccacgctcaaccgcaccgatctgcgccgacgcaacctcgtgtcgccgctgccgtccctgtcctacgggctgcagctggcggcgagcagcctgctggtcatgacggcggtgtggctgtggacgatctgtttgggattcaccgtgttccatgaggctacgtcgatgatcagcggtccggggctcgcgctgatggtcgcggcgtcgttcgtgttcgccacgatcccgctttcggtgggctacctgctgggtcagctgggcgtgggagaattcgccagcaacgccttgggcaacatcctgggcatggtgatctcgtttctgggcggcgcctggatatcgttcgacctgctggatccgtccgtgcaaatgctggcgcacttctcgcccgcctactggtacacgggcgcgctgcaagcagcggccgacatgggcgcggccacgccggaggcggtgatacccattctggagaacatgggcgtgatgctgctgttcacggcggcgatattcgcggtggcgctggtggcgggacggctgcgcgtgcagagctcggaagccgggggcaatgccgctgcggcgcacgccacgcacgggtaggcgcacgagcgagggcgggaaccgcgtcggtcgatggcgagggccccgccctcgccatcggtccgggagaacgttcctgcctgactgctggagtctagccctcgcgctacgaagccgtttccgcgacgctttcgaggcggtcgctcttgcgcgggcggcccggcttcggcgggttgttcagacgctccttcacgctggaaaggtacacgtagttgtcgcggccctgcttcttggcggcaagctggcccgagcagatcatctggcgcacgcgggcatcgctcacgccgagcaggtgcgccgccatcttcgtggtcagcacgccccgctcggtatcgacgtcgaccgatagagcgaccagcaggccttcgtgctcgatcgggtacgtcggcttcggcagaggcttgtcgagctgcaggtagtcgtcgatgaggagccagaggacttccgcagccatcgcgacggcatcttccatgtcgtcaccgcaggtgtagccgttctcgaaatcgacgaactgcacgctatagccgtccaactcgttctccgtgaaaatcgcaggatacatgtaacgcatggttcgtcctctctcgcgctttttcacacctcagcgccaccgagcggttttgcggatgctctcccataatcccttcggcagctctttccgacgaagcggcagcatgatcgttcggtctccccgcttcagcttccgatgagagcctttgcctcctccgacgtcctgccagccctctctgagcagtcgacgatatatctcgaacggtttcggcggcatgcgatctgctcctctcgaactataactccaacgttagtattacgcaagcgtaaggtttaggaaagcgcgatgccgtcgtacacgggaaccgaccattgcaggtacgcaacagtgttgccggtgatgcgggccgatcgggcgggagcgccctcgcctgcggccgtcgggtaggcgcccgcctcgcacgttgcctcgcgcatgcggtcgtgctgctggaaccacacgctgctcccccgatcgaacgaaaggcgatcgccgtagaacagctcgcgcgacggaggcggctctatgcgggcgagcggctcgagccgcgcctcgtcagcgaaaagctctcggtcggcgaacaacgcgacggtgcgatcggtcagggcgtacgaaaccgtcacgcggttgcgtccgtacagcgagagacccgcctcgggcacgatcgagccttcggcgaagggccgggtgcacgcggcgtcgaggtaccagccgtcgaaacccgcgcaatcggccttcgtcgcctgggccgtcgcctggctgttcgaccgatacgcgcatcccgcctcgactgactccgagaacaccgccccgtcggctccgtcggcgtagtaggcgatgcgcgcatacggctgccatcgcgcatagtaggtcgtgctcgacgcgacggaaacccgatcgcccgtcttgccgatcaacgacccgcccgaaggagcgtcgtaccaccccttgaacgtgcaatcggatttcgtccccggatcgggaagctcgacgtaaccctcgtcccattgcgcgtagaggttcgtcgttcccgtcgtcgcgcgaaggttcttgacggaggccttgttcccgtacgacgagccggttccgtcggcacgctcgttccatgacttccagccccaagtgcagtccagccgcttcacgcctgccgagcctccctgcgcgtcgcaggtgagcgtgtagctgcgtcggaaaccgttcgccgtgagagagcgcgccgcgtcgtacacgtgcgacgacgacgcggtgctgccgcccgtcgcgccgttgccgttgtaggacacggtgtaggatatcggcttccacactgcgtacagcgggatgatgttcgaccccgaaggcgacggctgcccagcagcctcgtcgcggaagaacgccgtcgggctgcttcccgcccaatcgtgcgggatgttgctgcactgcagaaggttccagtcttcgtatccaatcttctggccgggtgcgatgttcaccgcgccgtttttcgtcgtcgaccacccctcgaacgtgtaacccgtccttgtgggcttctgcgacgagatgttcgccgtggtgccgatgtacttgtagtgcgcagccggcgcgccgcttccgccgttcgcgtcgtactgtattttgacgcgcggccagaaatcaacggacccgtagcaattcaagccgtagtccgtattcagaaggtatacatggcagtacatgagcgcatcgaacccgccgtgcttcgatatgacggagcctccccatccgtaaccgtaggtggcgatgcacccgaacccgttgccgttgccgctgccgtcgagcttgccgcttcccatcacggcgcccgctcgcgtccagcgaccgttgtcgccggtgtaccagacaaggtcgtcctgaccgttcgcggcgctccatacggcgaaccgatacgcctcgatgcgagaatggatgccgccgggggcgttccaactgggcatgtcgaagcgcggtccgatgggatcggagccgatgagctcgaggtagttcgctgatgcgtccgctctgatccaagctcgattgtagatggtctttgtatccgtggtcctatacgagtacgcgaacgcctcgcccgtctccagggcggcgaggccgaagctggctcccaaaagcacggcggcggccaacagcgtgcgcaccacgcgatgcacctcacgcttcatggtccgcctccccgctcttccgctccaaagcgcgctcgaacgccgcgttcgcatcgtcctcgaagacgaagctgcaatcggcgacggcgcgcaactcgtcctcggacaggtcgcgcgcgtcgatcgccgcgtacgcgatctcgagatcgtcggctgcggaagagccctcgccgtagtcgcgcgcgaccgcatcgcctgcggcgagcacggtgccgtcgcgcaacatgagcgacgggagctgcgggacgatctcgtacgaacccgcgccgaggtaggcggtctgcacgcccgacccctcgaacacgagttgctcgtcgcaggtcgccccgtcgatctgcgtacccgacacgaacactcccagcccggtgttctcggacgaccagccgtcgcatcgcaagttaaccttcagttcgatcgcagctccgtcgacgcctacggcatcgacggagcgcccgcacgccctccagccgaagaacgcgacggacgccaccacgaccgcaacgacggccgcgatgccgcagacgacccgcctttcaggatccatccctttgttcgctcgtctcacgaaagccccctcatcccatcgaatcgttcaagaagttcagcagattgaccaccgtcggaaccacgacgagcgcgaccgtgggcggcagaaagcacagcgacagcacgatatcgagcttcgtcggcatcttgcggatgcgctccatcgcctccgcttgcgccgtctcgcgcgccagcgccgcttggacagctagaccctccgtcaaggacgacccctggctgaccgcctgcatcagctgggcggtgaatgcgctgacgtcctggctgcggcaccgctgccccaggtgctcaagcgcctcctcgcgcgaacggcccagcaggttcacctccctgtcgacgagcgagaattcccgtgccagggggccgtccatgctttccgcgacctcgcggaagcattgctcgatcggagagcctgccgcgatggcgatgccgagcagctccatcgcgtcgggcaacgcgagttcgatcgccctccttcggttgcgctcccttcgcgatagcgcccaggacggagccatccagccgcatgccgcgcagcaagctgccgcgcccgcgaacgcgggcggttcgaagcccatgcccgcggcggcgacccctgcaagccccgcgcatcccaacgcggacacgacacggatgctcctccatgtttccggttcaagctccacgcccgccctgctcaaacgatcgcggctcgattcgacgtcggcgcgcgtgagcggaacgcgtttatcgagaaacgcagcgaacgcaccgaaagcctcggttgcacgacggcgccgcgacgcgccgcccgcacggtggccatccttcgaggcgctcgccgacgatggcgcgacgacgtcgcgacgcgcgggagccgcgtagcgcacgaacgcttcgtaagcggcgagcccgcctatcgcccccagaacgagcatcgcgcaaaccgccgcgcccgctccgcccgcgatcaccttcggctccgatccatcgccgtgatgcgctggcaggcgaacagcccgaacgcctccgagcaccccgcgacacccagcacgatccaaccaagcggctgttcccgatagaactgcgagaagtcggcattcgtcgcgaacatgatgaaaaagatcgccggcatggcgagcgcgacgaaccatttcgccaagcgcgtgcccgcaagctcggtcttcagttcgcgcgacgtgcgcagccgcgctgcagcatgcgcggcgatcaggtcgagcacgggcgcgaccgcaccgccgaaccgctgctgaatcctgacggctgcggcgagcgagcgcacgtcggggctgtcggttcggcgcgccatgcgctcgaacgccatcgcgagcgtcgtcccgtacgccgtgtcggccagcacgcgggcgagctcttcgcgaagcgggtcctcgacgtgcgacgcggccgtgcgcagcgcgcgctcgagcgtgagcgagctgcgcacgctggccgcgatctggggaagcgcgcgggcgagctgccggtcgagcagctccctgcgccgtaagcgccgcacatgcagccgcacgcccgccgtcgcgagggccgcagcgccgacgaccgccccgatccccggatctcccgtcaacgccgcggcaagcgaaagcgagacgaaggcgatagccgcgacgcccgccgcccagttcgcagccggtgtctcgacccccgcttcatgcagcgcgcgggcgagcctcggaagcttcggcttcttccgttccgtcgcggcggcttcgcccgcttcgtagagaccgcgatcgctcagcacccgaccgcgatacgccgcgcgctcctgccgcacgagcgcgtacgcccaagcgcctgctgcagcgcatgccgccaccagcgcccaaggcaacacgagtcctatcatgcttcagccctcctcatcgatcgaaaaaccaagcggggtcgtaccatacgcccgatgcgcgcatgcgctccttgatgcgctggggctgcacgccgcacgcgcgccactcgcccgcgacggcgccgtacgcatcgacgccctcgacgtcgaaaacgaacagctcggcacgcgggatgacgaggctcccttcgggaagcggatcgatcgccacgatgctggtcactcggcgggccccgtcttgcatgcgttcgacgtgcacgacgaggccgccctgcaacgactcggcaatctgctggacgatgacgtcgcggctgaggtcgccgtcggcgtagcccaccatcgtacgcaaacggctgatggcgtttcccggatcgttggcatgcaccgtcgtcatcgagcccggatgatcggtctgcatcgcctgcagcatgtcgtacgcctccgcgccgcggcactcgccgacgatgatgcgatcgggacgacgacgcagcgacaacgccaccagctcgcgcatgctcaccgatccctcgccctccgtgttcgcctcgcgcgtctgcatccgctccacatgcggcgtttgcaggcgcagctcgggcgtgtcctcgatggtgatcacccgctcgtcgggagggatgaacccagagagagcgcccaagagggtggtcttgcccgatccggtgcctcccgatatcacaagcgggcagcgcgcctgcaccgccgcgcgaaggaactgcgacatcccgtcggtcagcatacccatgcgcacgagatcctccatgcccagcatgctcgacgagaacgtgcgcacgttgagcgccggcccgtccggcgcgataggcggcaccacgtaggtggcgcgcgcccggcctcccggcagcatcgcgcagcccatggcgtgcgcgtcgtcgcatcgcttgcccgactgttcggcgatcttgttgatgatgcgacgcacgtgctccgcatcgtcgaactccacatcgggacggtactcgatgcgcccggcacgctccacgtacacgatgggggcgcgaaaaggcagcgccggatcgtccagatcgatgccgccgccgttgaccatgatctcggtgacggattcgtcctccagcagtcgctggagcggcccgtagcggagaaagtcgtcgatcatcgcactcgcaagcccctcgaactcgtacgggggtagcgaaatgcccgactcgctcgcaatctcctccacgagccggcggatgagcgcctcgaccgcgtcagagccgacggcatcgccgcgcaaccgcacggccgcctcgtcgcgcacggctctcttgagcgcgcgctcagtcgtcctgtccatcggcgcccacctcctcgaacgcatcgtcggcagccacgagaacgaggctgac

SEQ ID NO: 9570 - DNA, 6879 bp, Unknown
  gut microbiota DNA sequence
ggccgacggcatcgccgcgcaaccgcacggccgcctcgtcgcgcacggctctcttgagcgcacgctcagtcgtcctgtccatcggcgcccacctcctcgaacgcatcgtcggcagccacgagaacgaggctgaccctccctgcgaactgggcttcgcgcaccgcgtcagcctcctcgggcgacacttccaccgtgacggaggcggaaccgctctgcacgctggttgcatcgtcgcccaccgcaacgacgcgggcgcgctcgcacaccgtctcgaggaacgcctcgcctgccgacgcgccctccgcagacacgatgcgcaccgtgtcgtagggccgcacgtggcccgcgagcccggtttccacgtccaccgcgagcgtcaccgcctgcaagcccgctcccagctcggccgagaggcgatcgcctcccatccccgtcacgaacgacgaggacagctgcgttcccgccgggatatcgacgatcgcacgccctcccgcagcgagcccctcggcatcgagcgcctcgccgccgagcgccgaagccgcccggtacgtcgcgggaacgtcctgcacggtaacggcctcggccgtgatagcgtcgcccgcgcggatgtccgcggcagccaccagcgtggggagcgcgccggccgtggcgtgctccaccgccgcgcgcgacgcggcggcggaccatacgccgtacgaaaccgacaccgccgtcaacgctaccgaggcggcgacgatcgtcgccagccgtttgacccggacggtatcccctttccgcggcttgggcatcgcaggcttcgcgcgatccgccgctgcagccggcatcgacgctgcagccgacgcgcctccccgaggcgtcccgtatcccgttcggcctcctccgacgcttccagccgccgggccttcgtccgtttcacgccgcgaagcccgcgctgcgaagcctccgccccacgccgtcgcatcaccgccgttgccgcccatcaccataatcggttcctctctctcgtttccgccggatcgaaccggcctatttcccgctctcggccaacgtcgcccgcgccgcttcggcaagctccgccggaaaggcgtcgagcgagttcagcgcctcgtacgtccatgagtccgcagtcgctcccgccgggtagtcgtatcgtccgcagcgcctcgtttccggccgccacaccttttccccggcatagggcatcgccgtcagcacccggtacgacgccaccggcagcccttcgatgccgtacccgcgcgcgaacaccgtgggcgactcctcctcgaactgcatcccgacgacccagtggcgctccgtcgaagaggctctcgcctccggcgtttcgtagaaccacacggacgccttcccctcgaaccccgcatcgcgcgcggtgcggacgacgcggtcggccaccatgcggcccggatcgtccgcgtttttcgccacgagcgcgaacgatgcgtccatgcaggctgcccgcgccgcatcgagcgcgttctcttggcgcgccttcgccgcgtaggcgatgccctgatcgacggagaacgccaacacggcgaacagcgcgagagccgccacaagaacgagcggcagcgcggatccgcgctcgtcccgacgatcacttgcgttcatagcccctcctgcctgatctctatcgcacgcccatccacgaacgagcagcgcacgtgacgcttcagcacgcggcccgccagaccgggcagatcggcgacggcgggcagcagatagctcacgtcgtacgatgcctcgatcaccgtggactgctcttcgatggctcctccgtcgcgcacgggctgctcccgcttcgtccgctcgctcgtccagctgacgtgctccacatgcaggcgagcggggtcgagctgggtcgacgcgcccaggatgccctcttcgatgaaccgctccttgttcgccgccagctcgaaccccgcggcatcgagctggcggcacgcgcgcgtgatctcggacgacagctggctggccgcaagcgtcatgcccgcaagctgcacgatcgagaacaccaccgccaacagcagcggcagcacgatcacgaactggaccacttcgcttccccgctcgcccctcatcaccacgcgcctccttccaccgttgcgtcggccgcgccgcgaacctgggcgcggaacgcgaaccgaccggatccctcgcctccgctcgacagccccgcgccgagcggcgtgaggtacgcgccctcgagcacgagcgcgacctcgaccggccgcgatcgggcgaacgacgttcgttcgtcgtacgcatccgtcctctcgttgtagaaccgatgctcgtaagggcgatcctcgaactcgccatagcgaaccgagacgtccagatgcagatcgtcgcggtcgagcgccggcgccgcagcgaaagccgcctcgcgcagctgtgattccgcgacatcgcccgcaggatgacccgatgccgcctcgcataccgcatgcgctgcgtcgtcgagcgccatggacaggaacacagagcgccccagatcgaccactgcgaacaggaacaggagcagcaggggcagcgcgatgacgaacgccacgacgctgccgccccgttccgagcgtcctttacgccgcaccggacgtgatcttcgagaacatgtcggtcaccgaggttcccgctttcgtgatggcggtttggatgttgccctgcagcaacagcagcgcagcccccaaacccaccgcgaaccccagcacgatgaccgtctgcacgatctcggaaccgccgtcctcctcgcccacgacgagcaacgccctgaccttgtccaatctcgatgccgtgtttttcttgatcatgttcatgctcaactccttttcatcgattcatcccataccgtgcaggcacgcgcacgcgcctccgaccagccatgccgcaagaaacggcgccatcgggatgccgcttctccacgagagctttcccgcggcgatgcccgccagcgagaacgccgccgcgccgccatagcaaagcgccgctcccagcggcgtcgcgacgccgctggcaagcgaaagcgccgccatgcaccgcacgtcgccgtagcccacgggcgtgcgccccgtccttccgaacagccggttcagcgcgaggcagcacagcaccgcgaacacggcgaaggcgcaaccggccagcacgccctcaagccccgcggtcgacgcctggaagacgacgcccgccgccgcgagggccgcgcacgcctcgagcggcacgatcctcgcctgcagatcgcatatcacggccgcagccatggccgtcgccgctaccgccaacgccgccgcgaccagaggcgaacctgcgcaccacgcgacggcgcagccgaacaccgttccgacgagggcgccaaggcagcgatgccatcgtttcgctcgaaacgagcagcgcgcttcctgatcggcctcgctgcgcgaaggctcgggcgcgccagccgcgcatcccgcctcgttcagcgcctgcagccgctcgcggggaaggctccccgcctgggcgtcgcgcagcgcctgagcccgccacaggcccagcgacccctcggctcctgccgcgcgcggcgaaggctccctgagaggatgcgcctgcttgaacgcccgataggcgtcgagcgaatcccaccaccacgagcgagcgcggcgataggcgcgtcccaggagcacggaagccgaccatggcacgaagaacgcgccgatcagcccgcccgcgcatccggccgcgaggacgagcgcgatcggggccgtcacgagcggcctgccgcgctcgccgacgcgtggttctccgacggcgcatcgcgcgcatgggtgccgcgcggaacccgccgcccgccgtcgccagcccctcccgcctcgtcgctcggctggaaccgcacgaccactccgccttcccgaccgtccgcttccatcacgggcgcatatcccggcaactcgaaccgaacggtccaccccgccccgtcgcgcggcggcgctttcggctcagcgggagccgccttgggacgaagcgtcggacagtgccccgttccaggcgacgacggcatcgtcggcatcgcgacgttcggacgaacgggctcctcctcgtagcgatgcaggcagccgaagcacacctcggcgtcgtcgaacgcgcgagccccgcaagtcggacacgttttcatttccgatctcctttcatgcaaaccactcccacgcgatcgcccgccgtgaaccacggggtcgcgcaggacgagaacctctccacaaccgcctctgcgcttttgttgcgcagcctccggcacggccccacgtcgcgatgggcttcgagcaccagcccctgcgcgtcgacgaacgcgatgtcgaggcgatggcgcatgcccgccgtgtgcacgtcgttgcacggcgcgagcagcagcgccccggcatgctcgggcgagaacagcagccccttcgccttgcggcgaaagcgtgcggctatcagcaacggccgcccaacgcgcgcgtccccttcgggaccagacgcaccgagcgacggatctttcggttccaccatgacgtcacgctccctcctccgtcgtgtagcgcacgacgacgctggtcgatccgcctgcgtccacgcaggcgacgaacatccatcgataccggccgtcatccttcacgaacgactcgcttccttcgtttccgctgcgcaccccgctccatcctttggcgagcaactccccctcgatcgcagcgagcgcgtccgcaacgtcgtccgagcgggtgaagcccagcacgccgctgcgctcgtcgacccgcacgtcctgtcgtccttcgagccgcaacgcttcgtcctcgaagcccgcaggaggaccggcgccgctcgattcggccgtcgtccgcatcgcttcgtgtagcacgctcggccgatctgcttgcgcgaacgcgagcgccagcgcgcaccccgcaacgagcgcagccacgaccgcccaagcgcgcctgcggcgacgggcgcctaccgtcgacccgctcacagcagcacccccggcttgtagcagtcgaccgcgatgctgaccgcatgcgtcagcggcggcagggggatcccgaacaccgtcgagcgcaaccccaggccgaacagcgtgggcatgtactccaaggtgcccgtgaagcgcgtatggccccccgaaaccgcctccgccgacacgcgcaccgcctcgttctccgcatcgaacgcggcagacagcgccgtctgcaccagggcgctgctctgctcgataccctggcccgcggcaggcgacgtcgcatgcacgcgcaccgcgtcgcggaagacgttgtcgaacgcggcgcattccgagaagaacgcgagcgcgttcaccgcgatgaccgcgacgatgatcagcaccggaaacgccgccgcgagctcgaccgtcatctgaccccgttcgtcgcacgttcgcatcactcccatacccgcacccccgttacctgcgcgtacacgccgcgcaatccgtcagccgtccgttgcaccaggtcggcagctgcgtccttcgccgcctgaggcaacgcgaccttcaccgggaacgacgggccgccgtcccatagctcgatctcggcgatctcgatggtgccgtcgaacccctggatgccttcgacagcctcggcttccaccgtccccacgatcgaggcgaacacgtcgttcgacccgagcggatgctcgatcgcctgctccttgagcgagagcagccgcgcgccgaacgccccctcgtcgcgctcggcgacatgcgccgaattcaccaacaccggcttgagcgcgtcgagttcggccggagcgagccccgcggcccgcacggcctcgcgcagggcacctgccgcccacgcgcccaacccgctggcccccgcgagaggcagcccgtccaacgccgacgagacagaatcgtcgagcgcctcttggccctgcgcgtacgcgtccagcaagccggaccagcagtcgagcaccgttcccagcgcgcccacggccgcccctccctggcccttcacgccgtccagcagcgacgacaccacggtggcgccttcgtcggacgagtcggcgacgagcgtggcggccgaaaccgccgcccgcgcgccaagcgcgccccctccccgcacgaacgagctgtcgaaaccgctcgatgcggcgacgcttgccgtgttcgcgaccagcgcgaccacgccgtagcgtcccggcggctgcgcagagaggcgcttgcccgccaccttggcgagcgcgtccttcacctcgtcgaacaagccgcccgcacgccgcttcacctcgtctgccagcggatccagctcagcccgggcctcctcgtactcgccggccgccttcgccacggcttcgtagtggtactcgaagccgttgtcgatggacgacgaggcggccgccaccttgcccatgctggccgccgagaagccgcattccgcgcactcggcgaacggctccgcctccgtctgggcgatcgacacgaggcttcccgacccggccgcagcggggcatccggcccatgcatgagccgtggcgcgcccttcctcgtccaccgtgcaggggtacgcggcctcggtgtacagcgccgtcgacctcatctcctccgtgttcttcggaaggcgcggaaaccacgcgtcgaaggaatcggcgccttcatggacgtatccgcgccccacctcgtcggcggcgaaggcgtagaaccgcttgcgcagcgccgagcgcgcctgctcctccaccgagccgtccgccggggcctccacggcgagtcgccgcggatagtaggcttgcgcgcgcttgagcgccacggagaacgaccaggcgtcaacgcttctgaacagcgggttctccgatccgctcatgcctgccaatgcagaggcgcgctcgtacatgcaatag

SEQ ID NO: 9571 - DNA, 1230 bp, Unknown
  gut microbiota DNA sequence
ttccaccgagccgtccgccggagcctccacggcgagccgccgcggatagtaggcttgcgcgcgcttgagcgccacggagaacgaccaggcgtccacgcttctgaacagcgggttctccgatccgctcatgcctgccaatgcagaggcgcgctcgtacatgcaataggacggatcgaggccgcagtcgtgctcgaatgcacggcgcttcgcttcgttggcccgctcggcggcgcgctcggcctcatcggccgcctgccgcacctcgtcggcctcgtcgcccaccgcctctgccacgtcttcgagctcggccgcgccgtccaccgcgatcttcttccccgaggcgggcacgagaagcgcgagcgccacgtagctcgacgaagccccgttgttcgccgacgccaccgacgccgcgttcgccgcggcgaggaacggcagcagccgttgcaggcggtcgagcccgtcggccgccttctcggcgaaccggtcgcgcgcataggccacgtcgcgccccgctttcagcagggtctcggatgcggaggcggtggccggcgtgcacagcgcggccacgcccagccccgtcgccacgaggctcgtcagcgaaagcgacagcaccgccgcatcgcacacccgcacgacgatcatgaactcgcccacctcgttctgcgcggccagagccgccgcatcggccacgttctgcacctccgacgaggccgagcccacccggtacgcctgccccgccgagaacacgagcgcaagcgtcaccagcagcgacagcaccacgcccaccgtcgtcatgccctcttcgtcgtggaacgcatcgaacatcatgacgcccacgccccgatccatcccgccgggtcgccgcccgcatcggacgagcgcgcccacgacggctgcgtcggctgctccgccgtcacccgcacttcgaggttgccgttgccgttcacgatgccgagcaaagcgccgcctgcatccagcagcggcagcggacgagcctcgttcgcgatggtgacgcgcacgacgtcggagcgctcgtcgccttcgaaccggatatcccagctgcacgcgccttcgtgcacgtggaagcaggagacgggagggatcgctcccaggcggtggcggacgaacgcctcgcaactctcggccatgtcgcccgccgcagcggttttggtcgccagcaggcggcatccctccgacgcggccgcctgcatcaccagccgatcgtacaaa

SEQ ID NO: 9572 - DNA, 403 bp, Unknown
  gut microbiota DNA sequence
gctgcgccacagggcgcccagtgcgacgactgctgccaagaacgcggccgtaaccagcgcgaactcgaccgttccctgaccgcgttcgtcaaacgcgtccgcacggatcgcagcgccggcacggcgtcctacagcccgttgatgccctcggcgatggcatcccacagctcttgcagcttcggacggaacacggtgatcgcgatgatggcgatcaccaccagaaccccgacgaggatggcgtactccgtcgtgccctgcccatcctctcgagcaagcacccgccgaacccggcacgtcgccttcgccatccatctccagtacgtctccatgtgcgaacctcctcattcctacattccttccatcagttcgagcagcaccggccccagcacgagcagcagcatgg

SEQ ID NO: 9573 - DNA, 1436 bp, Unknown
  gut microbiota DNA sequence
aggatgcccggctgcatcagcagcaggagcccgacgaacagcaccggcagcagaaacgccgcctccaccgtggcctggcccgattcgcacgtccgtcgcatgcccgctccctcctttccgaacccgtcagtacaaaaacacatcggcgaccgatcccggcatcgtcatctggatatggtgcgaagccgacatcagcgcatgatcgacgaacatgccggcctccaaaccgcgccacagggcgcccagcgcgatgactgctgccaagaacgcggccgtcaccagcgcgaactcgaccgtgccctgaccgcattcgttgaacgagcccgcacggatcaccgcgccgcccttctcctctacagcgcgttgatcccgtcggcgatgctgtcccacagctcttgcagcttcggtcggaacacggtgatcgcgatgatggcgatcaccaccagcactccgacgaggatggcgtactccgtcgtgccctgtccatcctctcgagcaagcactctccgaacccggcacgtcgccttcgccatccatctccagtacgtctccatgggcgaacctcctcattcctacattccttccatcagttcgagcagcaccggccccagcacgagcagcagcatggccggcaggatgagcgtgcccgtgggcaccatcatcttcaccggagccttcgccacccgctcctccacctgcgcccgatgcaccgcgcgcgcctccgccgcagccgattcgagcccctcggccagcgacgagccgaagcgcagcgagcgcaccatgctctccacgacgcgcgcgaacagcggcgagtcgtacgaggccgccaggtcgcgcaacgcgtcttcgcgattcgtcaagcccagcgaccaggcatgctgggcgccgacgcacgcacgcgccaagtccgaatcgaagtgagacccgtacagcgcgaacccgcggtcgaacgaaagcccgctgcgaagaccgagcgccaccacctcgagcatctccgagaggtcgctttccaagccgtcggcgcgctcgcgctgcgcccgcttgacggctcgcggcatcgccgccgcgccgcccgcaacccctgcgacggcgccgagtacggcaagctccgtggagagcaccgagccgacgagcgcacccgccagccctccggcgcatgcgagcctcatcgaggcctcgcagaacccttccggggacacggcctgctccaagcccgcccgcttcgcccgcgcgcagaaccacgctcgcgcccgcgaaagccgcagccgacgggaaagcgcctcggtcgctccgagggcgatccgctggctgagcgccgtcgcgtaccgcacgagccgagagcccgagtcgaaaccctcccgcgcgtcgcgcacgtcggcggctttgcgcagccgctcgcgtcgcgccgtcgcgtcgcgcctccgaagaagcgttga

SEQ ID NO: 9574 - DNA, 8240 bp, Unknown
  gut microbiota DNA sequence
ccacgatgccggcggcctgcatgcccagcgcgatcgccagcagcgccatgcccatcggactggcgaagaacggatccagaaagccttcgctcaccagcgagaacaccgctatcagcacgaagggcaggacgctcaccacgcgcgccgacagcttcgcctgcgccgtttgcacgcgcagcgcgcgtcgcagctcgatctcgctctgaaccgtgtctcgagccgcgtccagcacctgcttcatgctgccgcccgcctgatgctgcacgtccagcgccaccgcgacgaacgccagctcggccaccgacgagcccctgcgcagcacctccaaggcgcgcccggcgccctcccctgtttccagctggtgggccgcgcgggcgaacagcgtgcccagcgggccttgcacctcgcttgccacctgctggaacgtttgcagcagcgacaagcctgcctggaagcacacggccatggagcgcagggcgtcggggatgccctcgcgcagggcgtcgcggcgcttgtcctgcaccgtgcgcagccacacgaccgcgcaagcgcacgcgcacacggctacggtgatgccgcacacgaccgagcctgccgctgcgcccgcgcacatccccgccccgaccatcgccgcaatccataccgacaagagcgattcctcggtcgtcatcaacccgcgcgcatcgaccacgccgacagcctcgcgcatgagcgccgcgagcgcgcgattgcccagcagggcacgcgtcgccggccgcgtccagccgaccccgttgcgcagcagccaggcgacgcgcgacgatccgacgtccccctcgccaaccagggaggccgtccggcgccgagcgcgacccgccaccgacgcgcttgccgccgctccgcatccgaacgcggcgagcacgcctacgccgccaagcacgacgtgcgcttccatcgctccacctcctctctctcggcaacgccgatgtccgccacctcgtcgatccaggccggaagggccacccagcgtcccacacgctcagccagcccccgcatgaacagcgggcgcaccctgcagcagcgctttcctccgtcgtacacgagctcggccacgtccgacacgaaccgcgacccgtccagcgcgcgagccgtctgcaccaccacctcgaaggcgcttgccacgttcgactcgatgacgtcaaccggcaggtccaccgcgtagcgcaccatcgtcgcaaggcgcgacaccacgtcggcgggcgagttcgcgtgtagcgtggtcagcgacccgtcgtggccggtgttcatggcctgcagcatgtccagcgcctcggcgccgcggcattcgcccaccacgatgcggtcggggcgcatgcgcagcgcgttgatcacgaggtcgcggatggtcacctcgcccgtgccctccgcgttgcggggacgcgcctccaggcgcacgacgtgcggatgctccaagaacctcagctcggccgaatcctcgatggtgatgatgcgctccgagggcggcagctcgcacgacagcgcgttgagcagcgtggtcttgccgcttcccgtgccgcccgacaccgcgatgctctttcgagcgcgcaccgcccacaccagaaacgtccgcatcgcctcgtcgaacgaccccgtggccaccatgtcgtccaacgtcatgacccgcttcgcgaacttgcgcacggtcatcaccggcccgtccagcgcaagcggcgggatgatcacgtgcacgcggtgcccttcgggaagccgcgcgttcaccatgggcgaagcctcgtcgatgcggcgccccaacggccccagcacgcgatcgatgagcgcgcgcagctggccttcgtcggcgaaccgctgctcgctgcgatgcagccggccgtcgcgctcgaagaacacgtcggaagggccgttcaccatgatctcggtgaccgaatcgtcggccagcagcgattcgagcggcccgaacccgaacaccatgtcgatgagcccgtcggtcagccgctgctgctcgcgctgggagacgcccgcccaggaagcgtcctcgaacgcctggcggcacgcgcttttcaactcgttgcgggcgcggctgggctgttcggccatgatggcggcgatatcgtccgtggacacgaaccgctggatgtgctccttgagccgttccagcgcgttgtcgtccgcactcgcggcgagcgtcggcacgtcgtcgatgtcgcgcacgcggctcatcagagacatggggcctccttccggcgacggcgcggcttcttgccgacgggcaagcggaaaccgggtccccgagaggcgccttcctcgggcggggctgccgcgcgcctatcgcccggcagcacgcccgacagcacgcgctcgaggctcgcgcacaaatcgttcctcgacgccagcagatcgaacggaagccccgcgcccagcagctcctccacctcgccgccgccgtccttgagctcgaacacgtgagccccgcgcagcgagcatgacacgtcgatggacgtgaacagggcgttcttggagcatcggttgacggcgtacaggaaagggccggtcgcgatgccgcaccgcgcacacaggtcgagcgcatgctggcaggcgcgcagcgacgacggccgctgatcgatcaggaacagcgccttcgagctgcgctccagtagcagggcatgctgctcggcccaggcggctcccgtgttcgccaccacgacgtcgaaccgggccgtcagctggtcgagcagctggggcgcccgctccaccaccgcttcgctgtcttcgagatggcgcggcgcggccagcagcgccggcatccgaccgtccgaccgcagctgatcgaggcgcgacggcaccgccagcacgtcatcgacggccaacgggttctgcacgcccatgagcgccggggcgtcgccgaactgcaggtcgaaatccagcagcaaggtgttgtagcccatcctctgcgcgatgagcgccgacagtacggacaccgtgctcttgcccgcgccgccgcttccgctgaccactgggaaaaggaacccggcccgcgcgcccgggcggcgctcgtcgcaccgcgccggctggggcgcggtcgccggagcaaccgagacgggcatcgccgccggcatcggcgcttgccgcggggctgcgggcgccgccatgggccacgggcaggcgaaggcctgcttgcgacgcgcgtagcgctcggccaaggcttggcgcgtgagcgaggcgtcaatgcccgtggcgctcatgcggctcttcagcgaacccgtgtcttcgaacgacagcatgcacacacaacggtcgctgcggtcgcgcttgagcgtggccgccaggttgatgggagcgacgtcgtcgctcgacgccacccacacctcgtcaaccaggcgatccgtgcgcaggaacctgcgcgcctcctctgccgaggagaaaatgcgcagccaatcctgtgcagccaggttctctcccgccaaccctatagactccggatgctgcaaactcgtcgtatcggcgcacagcgccaccaaagatccgctcatcgctctccctcgcttcccggcaacgtgaagtacagctccgtcttctgcgccgccgcgacgatctcctgcaccgactcgggcgcgacggccacagtgatccacgacaccttcgcgtcggttgtcgactcctgcgcgcttgcgctggtcgccaacaccagcacgccgctcgccagcacatcggtcgacgtgccgccggtggcgtaaacgtccacccgcgagccggccgccacggcgccgcccaccgcttgcacgtccttcgccggcacgctgagcgccgtcaggccctcgggcacgtccaggcggctgcccgcatcgcggaagcggcgctccgacagcacctcgcccgcaaggatcgtcgacgacgccttcttgcccaccacgtcgtcggacgatcggaatgcttccgcgggcagcaagtcggccacccacaaccgcgtctccaccgcgctcgcgtccaccgactcccccgctgcgatgtcgcgcttagccacgcacacttccagctgctcgcccccgtagcgcgccagagcttccgcgcgcgccgcgtcggcctctccccgcacgccctgggcgtaggcgaacacgcatgccgcgcatgccagcccgcaggcaatgccgatgatggttgttctgctccgtttcatttcgtcctctccgccgttttccctcctttcagtatgaccagctcatctcacgttttcatggcacagttcaccatgaaaagccgcctggaccttacccgtttgcgacgtcgctccaacgccgattacacatttcgcacctccgtttccaacgcgaattccatgcgccgcaccgcaaaatcccacgccgctccaacgtgcggcagattagatgcggctttcctggggattcgttgcgcgaacgcgccttctatgcgagaataggtgctcgccgcaaggcgacgaaaaccgggcgattggcgcagcgggagcgcaggtcccttacaaggacaaggtcgggggttcaaatccctcatcgcccaccacgggatacgaagagacccgtcggatgatccgacgggtctctttttcattgctgacaacgactgcggaaagcaaaactcggacgaaccaatgtttcacgtgaaacatccgaggcgggacgcgcgcacgcgcattcggcgccctacctacttcttcccacccttcggggcccagtccttcatgccgggtatggcgccgccggccacctcccatagatagaggctggccaccgagccgtaaggcgtgtagcggcggcggtacttcgcgaacagctcgggcgtgatgcgccggtggtggtgcaccatgcgcaagccgcgatggatggccagatcgccccagctcagaatattgggtcgctgcatcgagaacgtcatgagcatctcggccgtccacacgccgatacccggcagcgccgacagcgtgcggcacacctcgtcatcggatagctcggccagcccctcgaggtccacctcgccggacagcacgcgcgcggctgcccccttgatgtagcccaccttgcgaaacgagatgcccacctgctgcagctcgtcgtcggagcacgccgccatcgcctcgggcgtcacttcgccgaaccgctccagcatgcggttccaaatggtggtctgcgccttcgtcgctatctgctgacccacgatgcagttcacgagtgcagcgaacaagtcggggtgcacctcgcgctcgatgcgtccgataaccgccatcgcctcgcccagcctcggatcgcgcgccgcaaggtacgcgacctccgcttcgccgtattcgaagtagcgcggttcccgctccatgccgtccccttccgtcgttcgacccagtatagcgaagacgcagaggcctcacagagaacgttgtcgcccgtaaaaacgcggaatcgcgctcgaaaacgaggctttcgggcgacaacgccaacgaatgtcaggagctgacgctgtcaggtgcccgacataaggccaggtcgcgaagatcccaacgcgaaagacccggccgagggaggggccgggtcttcgatgaccccgaaacggaaagggagggaggggattccgtctcgggcgggtatgcttgttcgttgcttcttagcgctcgcggagctcgtggcaggtgccgcattcgaaggttccgcggtggtggcactgggcgcagtacttcatcgcgtccttggcctggtccttcgagtggttgttgtggcagctcgtgcacgtcgccgggttggcgtcgtgcttctcgttcgaggggacgtcgtgggggttcaccgtggtgcccttgtcgtcggtgagcgccgtggagtccgcggtcttggcggccatctcctccatcgtgccgtggcacgagatgcaggtctcggggtccaccgtgaccacggtcgccttggtggcggccttgtcgccgaacttcacgtcggcgtgctcggtcgagagcgcggcctcgtcggtgtggcactggacgcaggtcacgccctcggcctcgtgggccgaggcctgcgggcaggacgcgtcggtcgccgacgcggcctcgacggtgtggcacatcgagcagtcggagtccatcgtccagttcaccggctggccgtccatggccgaagagccgccgttcccgtccttctgctcggacgccgccggagccgagggctccgccttcggcgcgcagcccgcgagcgtccacatcgcggccgtgagcgcgaggacgacgccgaggacggcgagcacgacgaggcgccggtcggcggtgtgtgcttgcacggtcatgcgcttctcctatcagtcgtattgcagttcggaaggcggtttcccgccagatgcgcccgccgagggagcggcgggcgcgggggttgagtcgcatccggcgccgctggggagcgcagcgccgaaccgatcagcgaagggaggatgctacttggcgtcccaaggctcgagacccgcggcgtgacgggcggaaatgcggccccacacctggttctcggcgttgttgccgccggtgatgccgtagctgtggctctggaagttgccgaagcagcccgccgcgtacagacgcgggatggggttctcggcgggatccagcacctggccgtgctcgttcttcatcgggccgcccaaggtggagcaggagccggggtagatggagatggcgtagtacgggccgtcgtccagcttctcgagcgtcttctcggagcggtcgaaacgcgcgtccttctttgcctcgcagaatgcctggtactcgtcgaacgtggctttcaaggcgtcgacgtccatccagtggtcgaactccttgatcttcttgccaagctcctcgatggtgtcgcccttgaggatccagcccttatccagctcagccttgttgtcctggctccagccgttccatgcgcggatctcgtcgggcaggtcgctggcgaagttgccgcactcgaagaaatcgccctggctggtggacagcttgccggcgtcgaagcaggtctggtcgaagatgccccacgacgggatgcggtcgaagtcgtcgatggagtcgtcgaacgacagcagcgtgtgccagccgttgtgcggcgagcccatgttgttctcgttgacgtagcgcttgcccagacggttcacgttgaagtagctgttggcgggcatgaagtacaggatggagaagtcgttctcaggatcgcgcgtccacatggagtacatggagatcgccatgtccatgtgccacagcttcgctcccacgtcctcgaccatcttgatgccgtcgcccgtgttgaactgccaaccctcgaacttgaaggggtagcacttgaggtaggcgttcttgagatcctcgttgaactcgaagccgcccgtggtcatgatgacgcccttgcgagccttgaccgtcttctcctcggagccgatcatcgtgtacgcgccgacgatctccttggtctcggggttctggatgagacgctcgtcgtggcagtcgaacagaacctgcacgcccagcttctcgcgctgcgcgtcgagctcgcggaacgacagcatgccgaagccgtcgacggaggacagcttgcaggagccctcgtaggcgttgtcgtccaggaagtagtactcggggatggcgccggccagcgcgacctcggacacctcgtaggtcatgccgtacttgtcggcgtactcggtgttgcgaacgcactcgttgacccaggcgtcgatcatcggctcgggggtcttgccgtgcgtgaacgccttgatgtacttcttgaagcgctctttgtcgctttcctcgacgatggtccactcgccgttgttgatgcggctgttgccgccgccctcgacgggagccttctccagcacgatgacttcctggccgcactcgtcggcgccgatgagcgacgcccacatgcccgcgccgccgtagccgatgaccaagaggtcgcactcgtagtcccagctcttcggcagccaatcgcccgaagccgcgcccgtcgaacccgacgcgcagccggccagcgcggcggaacccgccacggctgcggcagcgacgcccgcgcccttcaggaacgaacgacgggaaactccgccttccatgcctttgctcatagtgttccttcctcctacttgaatgaacgaaccgattcccccacccgcgcagctatcgagctcgcgagcatcgaacatcggcccctgcctctctcccagcagagatgcccctccttggaagcatccgttcttgcctttcgaac

SEQ ID NO: 9575 - DNA, 5606 bp, Unknown
  gut microbiota DNA sequence
tacttcttctcgtcccacgcgtcgagcgacgccgcgtgacgggcggatatgcgtccccagatcatgttctcggccacgttgccgccggtgatgccgtacgtatgcgagtggatgttgccgaagctgccggcgccgtacaaacgcgggatgggtcgttctgcgaacacgtccagcacctggccgtgttcgttcttcattgcgccgccgagcgtggagcacgagccgggatacaccgtgtaggcgtagaacggcgggttgttcagcgggttcagtgtggcgggcgagcggtgaaactcgggatcctcgccgttttcgcagacctggttccaagtgtcgatggtggccttgagcgtgccgacgtccatccacttgtcgatctccttcatcttggcggcgagctcctcgatggtgtcggccttgatgatccaacccttgtccacttcggcctggttgtcgtcggaccagccttcccagtcgcgcagttcgtcggggagcatggtggtgaagttgccgcactcgaaccagtcgccttggcgcgtggacatcgggccggcttcgaacagcgtctggtcgaacacgcaccagctggggcagtgatcgtagtcgcagatctcgtcgttgaagtgcgtgaacgcgtgccatccgttgtgcggggagccgatgcgcatctcgtcgacccagcgcttccccaggcgatcggtgtagatgaatgtctgatccggcggcatgatgaggatgaggaagtcgttctcgggatcgcgcgtccacatgccgtacatagcgccggccatgcccatatgccacagcttgccgcctacctcctcgaccatcttgatgccgtctcctgtgttgtacttccagccctcgaatttgaaggggtagcatttgaggtacttgcgcttcatatcctcgttgaactcgaaaccgcccgtgcagaggatgacgcccttgcgagccttgaccgtcttctcctcggagccgatcatcgtggtgcagccgacgatctccttagtgtcggggttctggataagatgctcgtcatggcagtcgaacagcacctcgatgcctagatccttgcgcttctggtcgaggatctcgaacgaggccatgccgaatcccggagggtcggcgatggactggcagcccgcaccgcccggcaggaaggagtactcgggaatggtgcctgcgatggcctgctcgttgatgtcgtattcaagttcgtacttgtcggcgtattcgcagtttcgcaggccttcttcgatccaggcgtcgatgacggccgagggcgtgtccacgtcttgcgtcatctcgtgccagtactggcgcatgccctcagcgtccttgatgacggcgaactcgccgttgttgatggagctgttgccaccgccgcgcaccggagccttctccagcacgagcacctgctgtccgcactcgtcggcgccgatgagagacgcccacatgcccgcgcctccgtagccgatgaccaagaggtcgcactcgtagtcccagctcttcggcagccactcctgcgacgcgcctgcgtccgacgagcagccggccagcgcggcggaacctgccacagcggcggcagcgacgcccgctcccttcagaaacgagcggcgcgacagccctccctgttctttcgtgctcattgcctctccttctccttgcattgttttggtttcgccttgaacggtcggcgacttcgtttaccgtacgcgggatgcgttcgcttgccatcgagttcgacgccctattttttccttgtcgggagatcggcaggtgggaagcatcggggcggagccattagggcgctccatccgatatgcgatgaagaggagattgctatactgggcacaggggacggtgccgcaccgcgcaagggaagcgggattcgatgaaagaggggagcaatggggacgtgtctgcggaacaagctcacggcattttgccctgactggaaatcgttggatttctatatcgtgctgctcggtcttgcgttctgccgagcatggattgtattgtgcctttccgcagctgcagtgacgacgctcgtgacgaactcgaactgggcgttcctgcttgccggctccaccgctgccgctggcgttgccgttgcagcgcgacgcgctgcaacgcaggatcgattcgaggcgcgaatgcgcggtctgacgggggcgcttaccgtgtcatgcgctgttgcgacaccgatagccctggcgtgcggtcagccgatcgccttggcggcgctcgtggtcgtcggaggcgctgcctcgagcttcttgcaggtgctgtggggaaacgagtacgctcgccgccccgtgccgttcgcgcttgcgtgctatcctgccacggccgtcgtcatcgcgctgctcattgccctcgtcataggcgagcgagggtttcttgcgttcttcgtgtttccgatcatgtcgttcgtgctgttgctggtggagacttcgcgcatcgacaaagagcagtcgctcgacggggtctcggtcgagccggcaaggcagcccgaacgggatcggcccgccttgtcgcgcaaatccatcgcccagctgatggtgagcatcggggtgttcagtttcctatgccgcgtattcgactcgcttcccggcgaaggggtggtcgatcctttcgtcgtgttcggcggcagctcggtattcgctttggcggtggtgggcgtcctgtttctgctgttcgcgttcttgtgcggggatcgcttcgagcccgtgtttgcgtatcgcctgtcgcttccgctcatggcgctgggcatggccattgtctcgctgttcttctatgaccattgggcgctgtccgtgctgctcataggcatcggctacgagctgttcgatatcgtaacgtggatactgttcgtcgatctggcgaagcggcgcgtggatgcttgcggacgctatcgggtgttcgggtggggggtggccgcaacattgtgcggcatgggcttgggctatctcgcgggaagcgagattcacgcgcgtctgctggtcggagacgtgcagatgtccacggttggcattctatgcgtcaccgtgttggtggtgacggcgttcctcgttataccggaagggacgatcgctcaagtagttggccggcgagggcgccttcgaggtggcgagcgcaacgagggcgctacgggggagcgcgcggagtcctcatcgaagatctcgcctgcttcttcattggaaaggcgttgcgaggcgatagcggtcgagcggcgtctgacgcctcgcgagagtgaggtactcgtgctgctggcgcgcgggcgtacgttggctatcgtcatgcgcgacttgcagatagctaagggcacggcgcagacgcacatcgagaacgtatacgcgaagcttggcgtgcacaagcaacaggagctcatcgatctcgtcgagggcttcgctatctcggatgacgcctgatcggagcaaaaatacgatgctccatctgatgcaagggatcggggcgcgggtatcatgggggatgcacaaggttcgacatacacaaggaggcatttcatgggacgcatcgttctgcccgtatacaccccgtactatattcccaacggcaacgaggttgccgtcatcgagacgtcgcgcggcacgatccgcgtacaactggccggcaaggacgcgcccgtgaccgcgggcaacttcatcgagctcgccgcacgcgggttttacgacaagttgaagttccacgcgcacaagccgggctccgtggtgctgggcggctgtcccaccacgcgcacgctggggcctgcgcaggtggacgcggcggcgcgcggcatgatccgcggcatccatcccggcacaggcgacgcacgctacaccatcgtggacgagtgggagaccaacccgaacaacaagcacgtgctgggaagcctctgcatggcgcacaagtccgagccgaactcgggtagctgccagttctacttctcgctgtccgagcagcctgagttcgacgagaagttcaccgtgttcggccaggtgatcgaaggtatcgatacggtgcaggagctgggggtgggcgacgcgatcaaaagcatcgtcatcgaaggcgccgacgaggaggcgctggccgaggcgatctcccacgaactgccgcgcccgaagtcgccgaaggaagtgctcgaggagctcgatcgcgagcgcgaagagcgcaggaagcaggccgaagcggacgcggccgcgggggaggaagagtagcgggttcccgccgggcgagggcggcgtcgccctcgcctattcgtacgtctcaaccagatcgatcagctcttgctgcttatgcacgtcgagcttgcggtagatgttctcgatgtgcgtgcgggcggtaccctttgcaatctgcaagtcgcgggcgatgatggacagggtgcgaccgtacgccagaagcacgatgacctcgctctcgcgcggcgtcaggccgtaatctctcgccacgctcgcgcagtgctgctcgagccgccccgcgcccgcatcgacaaccgcgacggcgggtgcttcttcgacgtccttttccttgcggcttgtgcgcatggtttgcgacagctgcgccaccacgccctcgggcaataccatgaacgccaccaccacaaggcacagtgtggccaacatggccacggcggagatctgcatgtccccgctggcgatcatcgcgtcgcacgccctgcccgccatggttcccgctcccattcccgcgaacatgaaggccacgcccagcccgaagatatgcagcgcgttctcgttgcgtcgacgcgatacgtctacgaacagcacccaggtgaggatgtcgaagaactcgtaacccgcgttgatcagcaggatggacatggcggcgtgcgtgtcgaagaacagcgcgatggcgacgaatcccgccaccatgatgggcaacgacagccggtaggtgagtgcggcgttgaagcgctcgcgcagcttcgccacgatgacgaggaacaccacgcccactacgatgagtccgaatattgcgcttccgccgacgaacgcgaacgggtcgtcgtaggcgggtatggcatcgaacaagcggcacaggaacgaaaacgtcatgatagagaacatgagcttgcccacgccgaacttcgcacccggttcttcctcggcgtccctttgagacgtcgagcgggccgaggggtcgtcggcattcgcgttctcgaccgcgagttcctctttgggcttctgcgtgaggtcgctccacgacaggccggtgcggttcgcttcgaacagcagcaagccgaacgataacaggggtatcaccgcgaagccgatgaagctcgtatgatcgttcgacatgccggcgacaagcgcggtgacgatggccgccgcgggggaagcgacggcggcgaacaacgtggcgtggcgggcgaagcggtcgccccacagcacctgcaagggccccgctcccaagccgccggctacgaacccgacgatcatgagcgcctcgctgttcagggctagcgccacggggatgatgatgccgcttgcggcaagggctaccggagttgcgcggaacagcgcgacgcgcacgacgccctcgcgcttgccgcttcgatttgcaacgaacgacacggtcag

SEQ ID NO: 9576 - DNA, 444 bp, Unknown
  gut microbiota DNA sequence
atgacggttatcaggtagtcgagcgtgcgcgagtcgcgttccgcggaggtcgtttccgcggccgcctccgccgcctggccgccctctcctccgttcggaaggccgccggtagcgccgtcccggccttcgcccttggttccgtattgcatgtgcatctctccccagcgttcatgccacgggccgcgccgagcgacgcggctccctcccgtttgcaacaaaactcataagtagcatcatacgcaatttcatacgtcgatcaaatcggatggagcatccgataggggtctgatctggaaaatcctattcaacgtcagatgtcctgcgaaaaattcgaccgcccatcagatgtgccggaaacgtgccgagcgtaacgttcgaaaggcaagaacggatgcttccaaggaggggcatctctgctgggagagaggcaggggccgatgttcg

SEQ ID NO: 9577 - DNA, 114 bp, Unknown
  gut microbiota DNA sequence
ccgaccgcccatcagatgtgccggaaacgtgccgagcgtaaggttcgaaaggcaagaacggatgcttccaaggaggggcatctctgctgggagagaggcaggggccgatgttcg

SEQ ID NO: 9578 - DNA, 562 bp, Unknown
  gut microbiota DNA sequence
ggttgcgctaccaattctagatggaagaaggccgccgaagcggcaactatgcgttgcgcgaacgcgcggcgcggggatgaatcgcaaatcgactgagcgattatagcggaaaaggcgaccagccatcgagcatgctcctcatgatttcgagcgaaaagtaacggccagtgtatcacgaaccgatgaacgtgccaagggcgggttttacttcgcgggcggcagcagaaggttgaggtcgacggcggtgccgatgccggccacggaaccgccgttggtgtactgccagatggcgaagtcgaactgcgcgtgcggctcggcagcgtcgtactcggcgaaccagacgggacgcccgcccagatctgcgcggtcgtagcgcgccatatcgccgctgttgccgtagatcatcgtctcgtagccgccctgctcgaggcgttcgcagaacgcccgcgcgcacgcggtgagcgtttcgcggtccatgttgttcgcacgacccgcgccgtcggcgacgggctcgtggtcgtacgccacgggcagcgccaggtaacggccggccagcagccgc

SEQ ID NO: 9579 - DNA, 359 bp, Unknown
  gut microbiota DNA sequence
agggccgggcggcgacgccatcatctcgttcttcgaggatcatccctctatagagctgtattatgcgcccggtccgcgcgtctgcggcgtaggcgcgcagaagacggcgcgcatcaacgcgttgcatccggtatggcacctgaacgaccaagaggcgcttgcgtataccgggagcgccacgcttgaagaggcgggcgccgccatcgtcgaggagtgcggcaacgcagtggtgatcacggcgggcaaggacggcgcgcatctgttcgtcgatgggcggcatgcggtgatttctgccgggcttgtggatgtggtggacaccgtcggcgcgggcgatgcgcatctgggcgcgctgaccgcgg

SEQ ID NO: 9580 - DNA, 409 bp, Unknown
  gut microbiota DNA sequence
gtccatcgacaacggcttcgagtaccactacgaagccgtggcgaaggcggccggcgagtacgaggaggcccgcgcggagctggatccgctggcagacgaggtgaaacggcgtgcgggcggcttgttcgacgaggtgaaggacgcgctcgccaaggtggcgggcaagcgcctctcggcgcagccgccgggacgctacggcgtggtcgcgctggtcgctaacacggcaagcgtcgccgcatcgagcggtttcggcagctcgttcgtgcggggagggggcgcgctcggcgcgcgggcggcggtttcggccgccacgctcgtcgccgactcgtccgacgagggcgccaccgtggtgtcgtcgctgctggacggcgtgaagggccagggaggggcggccgtgggcgcgctggga

SEQ ID NO: 9581 - DNA, 273 bp, Unknown
  gut microbiota DNA sequence
tcgtaggatgcctgcagcccttccgcgtcgaacgaaggctcttcggcggcgtagcttttcacctcctcggccgtgagcgcgcggttccatacgtccacgcgcgagatggcgcccgagaaacagtctttgccgttgtcgcttccgttcgagaggtcggcgccgatgcgaagtttcggctcctcgagcacgtctgaaatgggcaggcatgtggaaatctggctgtccagtacgccgtccacgtacaacgattgggtttggaggccgtcatacgtc

SEQ ID NO: 9582 - DNA, 259 bp, Unknown
  gut microbiota DNA sequence
gcttgccgtgttcgcccgccagcagatgatcgtactgcagctcgatgcccgacgcgcccatgtcgtcgcccaactccacctcgcggccttcgccgacggttttcagaccctcttcggtgacggggcccgtgtaccctaccacgtgggcggcgagcgcgccgtaggggtagtcgcgcacgtagcgctcctcgatcttgaccttagggaacgcgtcggagtgctcggtgatgaaggcgacgtcgcgaagccgcacgtcgct

SEQ ID NO: 9583 - DNA, 1058 bp, Unknown
  gut microbiota DNA sequence
gctgctccacgttcacgatggcatgatcgagcagccactggttcgccttcatgcgctcggcggcctcgcgcagagcgaagccgcggccgttctcctgcatctcgcgcttcacggcgtccgggttctgcgggttcatcgaacggcaggcggcgtcgatgtcctcgtcggtgagggtcatcttctcgtgacggaacagcgcgtccagcgcgtagccctgcacgagcatctcgcgggtctgcatcatcatgatcatgccgaactgctgctcgccgccctggctttgcacgaactgctcgaaggggatgccctgctgctgcagctggccgcgcaggttggacacgagcgtctgctgcatggcctcgtacacctcgtcctgaatgcggccctcgaaacgcttggccagctcggatgccgcaacctgcagcttgtacgcctcgtactgggcgcgacggtcggccgtcaggcgatcggttatgccgccgcgcagagcggccgcatcgcggtacatgggcaggttcttggccacccattcgtcatcgatggcggggacgacctttttctgcatctccttgacggtgacggtgcagtcgacggtgtcgcccttgtcgtcggcgttcatgccgggcaggtcgaaggagaacgacttcgtttcgcccacgttcatgccgatgagatgcttctcgaagtcctcgggcatgaggcccatgccggtgaggtacgtgcggccttcggtggacaggttgtccatcttctcgccgttctggaaggcttcgagcgccagcaggaagccgtcgcctttctccaccgggtgcggctcgtccgacacgaactccgcatagctctcggcgatctgcgcgatctgctcctcgacctcggcctgctcgatctcgaaaggcggcacggtgatggacacgggctcgtaagacttcagctcgtagtcgggcttcggcgtgacgcgaacctcgaacgagaaggtctggccgcgcttgagcggaccggcggccttcggaagagccgggaacgccggcgtgatgttgcgcttgtcgatggcgaacggc

SEQ ID NO: 9584 - DNA, 3203 bp, Unknown
  gut microbiota DNA sequence
ggacttcagctcgtagtcgggcttcggcgtgacgcgaacctcgaacgagaaggtctggccgcgtttgagcggaccggcggccttcggaagagccgggaacgccggcgtgatgttgcgcttgtcgatggcgaacggcacaaggtactccacggcctgctgctgcacgatggcgtcgaggtccttgatgcccagctgcttctcgacggcctgctccacggacatgcccggcgtgggctgcacgcccatctgctgggcgaacctgtactgagccgccgtgagggcatggctgacctcggcggtggaggctacggcctccagcaggatgcgtccgtcgtcgagcttcttttcggttaccttcatgaagagtccccttctgtttcgatcgtcaagcgctcattgtagcgcattactcgttcgacttgaggctttccaccatgtcgatgcggcgcaacttgccgcgcatggccagcatcacgagcacagtgaacagcatggtcagcagaaacgccagcaggaagctggtcgggtgtatggcacggccgaacatgatctgatccacctcggccgtgaccacgacgaagccttccatccacacgcccagcacgagaccgaccgcgcagccgatggccgccaagaggaatatctcgcggaagatgtaagcgttcatctcacgcggcgtgaagccgagcaccttgagggtggcgatctcgcgcatgcgctcggtgatgttgatgttcgtgaggttgtacagcacgatgaacgcgagcgccgccgccgcggtgaccagcaccacgacgatcatgttcacgctcgacatcatgtcgcggtacgcgtcgatggtctcgtcgttgtacgccacggtcttcacgcctcctgcggccagaaggtcgttcgagaactgcacgcgcaagtcggggtcggacgtggtgacggccagcacggtgcggtagtcgggagccttgcccataagctgctcgtagagggcaggacccatataggcgtaatggtacacgtagttctcgacgatgcccgtgaccgtggcctcgtaggacgtgccggtcgcgttgccgatggcatcctgctcggtcagcgtgacggcatcgcctgcgcgcacgcccaactccgccgccagcttctcggtgagcacgaggccgtcgtcgtccagcttcaccggatgatggccgacgcgggtgttcaaggccacgaagcggtcgaacgatgccggatcctcgggcacgaccagctccatgcgcttgtcttgctcgtccggcccgccggccagcatgttctgccgcatgaccagcgtatgcgcggtgacgagcgagccgtcgtcgagcaggtcgtcgatacgccgctgctcttcgcttgataggtcgtccgccagcgtaacgacggcgttgtacttcgtgatctcgccgaactgcttgtcgattatatcgttgatggcgttggacaacccgagacccgtcagcaagagcgccgtgcagcccgcgatgccgatgaccgtcatgacgaagcgcttcttgtagcggaacaggttgcggaacgtcactttccacgagaacgagagatgccgccacagcggaccgatgcgttcgagtactatgcgcttgcccgccttcggagcgcgcggcagcatgagctgcgccgggcgctcgcgcaaggtggcggcgacggcggcccaggtggcgaacagcgtgacgccgacgccgagcccggctgcaagcccggcgaacccaggatcgacgggcagcgggagcggcagctcgggcacgaagtatatgatgccgtaggccttcatgatgacggcgggcagcacttgggacagcgcgaggatgcccagaatgctgccgatcccgctggccgcggctgcgtatgcgaggtatttggaggcgatgcgcgtgcgacggtagccaagcgccttgaacgtgccgatgagggcacgctcctcctccaccatgcgcgtcatggtggtgagggccacgagagccgccacgaggaagaagatgaacgggaacaccgcggcgatgctgtccacgcggtcggcgtccgcctcgaagctggctgcaccgtagttcgccgtgcggtccatgaccagccattcggggcgctccagatcgtcgatctgcttctgggcgtcgtcgaggcgacgctcggcatccgccagctgcgcatcggcgtccgatttcttctgctcgtattcggcgaggccgctgtcgtagtcggcgcgaccttgttcgagctgggcgcggccgtcctgcagccgagcggcggcgtcatcgagctgctgctgagccgcggcgatctgcgcgtcggcttgcgagcgcgatgaggcgagatcggcgcgcgcctgatcaagcttccgggcgctcgcgtcgaactgagccttccccccttcgtaggcggcctgctgctgttcgagctcgaccttggaggagtccaagacgtcctgcttgccctggagctcggcgcgcgctgcctccagcttgggcttctgcacgttgacgagatcgtcgagggtggcctggacgagagccatctgcgcccggagatcctgctgttgcgctttgagggcgtcttgctcggcgcgcagttcggcgatcttctgcgcgtccttgtcgggatcgagctgcttgatctgctcctccagcgcgtcgatgcccttctggatccggtcgacgccggccgctgcgtcggcgacgccggcctgcgcccgagttatgcccgcgtcaagctcgtcggattgccgctcccaatcgccccacgccgccgcgagggcgtcggcaccctgttgccactgagcccgggccgcttggagttgccctgcggcatcatccaactgcgggcgctgcgcgtcgagctgcgcctgcccttcggctatctgccgttcggcatcgtccagctgcgcctgagcgctcgcacgccggctcgccagctcggacgcgccgctgtcgtaggccgcctggccgtcggccagcccctgctcgcttgcggcgatcgtcgcggcggcatcgtcgagctggcgcttcgcatcgtccagttgcgactgcgcgtcggccctctcgcgctcgtagtcggcacgcttctcgtcgagctccttctgcgcatcggacttcagctgatcgacacgtgcctgctcgcgctcgggcgcaagcgccttgatgcgatccgccacttcgtctacgagccgctggtaggcgtcg

SEQ ID NO: 9585 - DNA, 155 bp, Unknown
  gut microbiota DNA sequence
gccaatcgccccacgccgccgcgagggcgtcggcgccctgctgccactgagcccgggccgcttggagctgccctgcggcatcgtccaactgcgggcgctgcgcgtcgagctgcgcctgcccttcggctatctgccgttcggcatcgtccagctgc

SEQ ID NO: 9586 - DNA, 1033 bp, Unknown
  gut microbiota DNA sequence
actcgcacgctggctcgccagctcggacgcgccgctgtcgtaggccgcctggccgtcggccagctcctgctcgcttgcggcgatcgtcgcggcggcatcgtcgagctggcgcttcgcatcgtccagttgcgactgcgcgtcggccctctcgccctcgtagtcggcgcgcttctcgtcgagctccttctgcgcatcggacttcagctggtcgacacgcgcctgctcgcgctcgggcgcaagcgccttgatgcgatccgccacttcgtctacgagccgctggtaggcgtcgctcgacgcgcgttcgttcgccaccccgcgcaccgcgaggtacgcctcggtatagggaagatcggccgagaagtcgctctcgggcacgtacatatactgttggatggagcccgaacccagcgtggtctcgcccatgctcgaagacgttgcgtagtacggagcgttcacaaagcccgtcaccgtgtacgtgcgcgtgacgagggtctggtccacgtcctgcacgccctcggtgatggtcagcgtgtcgccgacggcgatggcgtcgttctccacgaggttggccgacagcacgcactcccccgtcttctgcggccacgagccccggacgaggaggggacggttcagatagtcggggtcgtcggaacgcgcatgcacgccgtcggaggtgtcgctcgtgcgcgctgcatcgggcagcgaatgcacgcgcgtggcgtactgctcgccgtcgatggaggccatgacgtcggtctcgcgcgcgggcatcacagcctcgactccctcgacgtggcgcagcgccgcgatgtcgtcgtcggtgaggccgagggtcgaaagcacgcggatgtccatgagcgacgtgccgtcgaagtactcgtcggccgccagcttcatatcgggcgcggtcatgcgcaggccggcgtagaagcccgtgcccagcgcgacgatggcggcgatagccaggaagcgcccgagcgagtgggtgatcgaacgcagggtctcagtgttgaacgcgcttttcacgacgcgc

SEQ ID NO: 9587 - DNA, 343 bp, Unknown
  gut microbiota DNA sequence
cgcatcgggcagcgaatgcacgcgcgtggcgtactgttcgccgtcgatagaggccatgacgtcggtctcgcgcgcgggcatcacagcctcgactccctcgacgtggcgcagcgccgcgatgtcgtcgtcggtgaggccgagggtcgaaagcacgcggatgtccatgagcgacgtgccgtcgaagtactcgtcggccgccagcttcatatcaggcgcggtcatgcgcaggccggcgtagaagcccgtgcccagcgcgacgatggcggcgatggccaggaagcgcccgagcgagtgggtgatcgaacgcagggtctcagtgttgaacgcgcttttcacgacgcgc

SEQ ID NO: 9588 - DNA, 106 bp, Unknown
  gut microbiota DNA sequence
ttcgttcacttcgacgcccgcaacgcgtccttcgcggatgtggatcacccggtcggcgatggcggtgaacgcggagttgtgcgtgatgagcaccaccgtcttgccc

SEQ ID NO: 9589 - DNA, 1537 bp, Unknown
  gut microbiota DNA sequence
ctcgttcacttcgacgctcgcaacgcgtccttcacggatgtggatcacccggtcggcgatggcggtgaacgcggagttgtgcgtgatgagcaccaccgtcttgcccgtgtcgaagcacgtgtcctgcaacagcttcaggatggccttgcccgtgcggtaatcgagcgcgccggtgggctcgtcgcacagcaggagcttagggttcttcgccagcgcacgggcgatggccacgcgctgctgctcgccgccggaaagctgcgccgggaagttgtccaggcgatggcccaggcccacctgcttgagcacggttcccgcatcgagcggatccttacagatctgactggcaagctccacgttctcaagcgccgtgaggttctgcacgagattgtagaactggaagacgaacccgatatcgtagcgacggtagtacgtgagctccttctcagagaatgcgctgatctcgcgaccgtcgagcatgatggttcccgacgagcaggcgtccatcccgcccaacatgttcaaaagcgtcgtcttgcccgcgcccgaggggcccacgaccacgacgagctcgccgcgctcgatgtcgaaggtcatgccgtcgacggcagccacctccacctcgcccatgcggtacaccttgcgcacgtcgcgaaactccacgaacgccatgtcgcccttcttccgtcagcccgaataccggtttccctcaccatacacgaacccacatcccaacgccagcgacaacacgcctgccctgcgaacaaattccacggatccgatcaacggctcgcagcttgccggatgcaatgcgcaggttatggcaaaagtgcgagatttcttgttctttcaatccccctatgacctcaaggccgccagtcatggtatttctttgctcgaacgttatcttgatgggctgcgtcctggcaatacgaatccaagccgctccccctccctgcaggagcaaagcgtgatctcgctactcttttgaaaggctcgtcatgaatgagacggttctcatagtcgaagacgattcggatattatcgaaatcctgagcctctatctatgcggtagcgactaccaagtcgaaaccgctgcgaacggaaagctgggactcgagctgcttgagcgcaagtccccttccgtcatactcgtggatttgatgatgcccgaaatgaacgggtttgacttcatcaaggaagctcgctcggtttcgaacgcgcccatcatcatcatttcggcgcgcagtcagcccaccgacaagatgctcggcttggatttgggtgccgacgggtacatcacgaagccgttcgacccgatcgaagtgctggcctacattcgcgcggttctcagacgctgcaacgcattgtccgcaagcggcccaagcaacatttcaccggacggttcggtcgtgcgcatgggcgccatagaattcgacaaagagtccttgatcgttcggaagaacagcaacgtggtttcctttacggcctcggaattgaagatattcagcaaactgttctcctcgcccggccgcgtgta

SEQ ID NO: 9590 - DNA, 1909 bp, Unknown
  gut microbiota DNA sequence
agacggttcggtcgtgcgcatgggcgccatagaattcgacaaagagtccttgatcgttcggaagaacaacaacgtggtttcctttacggcctcggaattgaagatattcagcaaactgttctcctcgcccggccgcgtgtacacgaaggcgcaattgtatgaactgatcagcgcttcctcgcatggcggaggcgaggacagcatcatggttcacatatccaacatccgctctaagatagaagacgatcccaacaatccggcgcatatcgttacggttcgtggattgggatatcgttttgagggctgatgcgacatcggtgaagctgggggtggagtcgctgctttccagcttggcgtttcggtgcatgtcgatcgtgcttgtttatgcggtcttgatcatgggcctgttttcggctgtcggctacctcgcggactcgcgcctcaacagcgcgtttccttccatcgacgatctggaggaaaacagggtcgcgctggaaaacgactctttcaacgaattgagaaactcgataccgccatctgctcagatggtgatattcgatcagaacgggaaccgcctctatgccagcgatgacgatgtcgccaaatcgatcgacgccaacgacctggaaatcatcaacggaaccgaagaagatcaggtgttctacgaggttttgcagcgcttcgatgcccgctacggcaccgtatatgaaataaacttatgcggaatgagcggaatcgggagttcgaagatagtcttgtcctcatgtgtttgcaagcttgatggaacgatcgtcgaaggcgacctgttcgccggtcgagaatcgctgagcaagcgggagctttccctgataaacggggaattcagcgcaaacaaatctatccagaagctcgaatacgttaccgtcgacaatcagccccgcacccttgtttttatctcctcgaatgtgagcgaagcaacatacgatgagctgatcagccaaaacgggatgatttggctttcttctatccctgtcgcggttgccttcacggcaattgccgccgtggtgctcgtgagaatgatacgcagggcggcaaagccgctcgacgctgccattaccgcatgcaaggaaggcggcgaaagccccgacggcatgcatcgcgttccagctgagctggtgccgacatacgataattttctcgagctgatggaggagcttaaggccgcgcaaaacgacaagcagcgcatcgtttcggatatttcgcatgatctgaaaacgccgttgacggtgataagggggtatgcgcaggcattcgaggacggatgcgtgccgcccgaaaaagccggagagtatctgagggcaatgaaggaaaaaacggacgaagcctcccagctcatcgattcgctgtttctttacgccaaaacgaaccacccctcgtacagccctcagcttgtgcggatggacgtttgcgaagcggttcgtcgcattgcggtggaaatgcttccgactatcgaacagcgcgcctgccgccttgacgcggcaatccccgacgatcccatttgggtgcgcgccgacggctcgttgctggcgcgcgtgcttggcaacctgatcaacaatgcatgcgtgcataatcctggcggcgttaccgttcgattgacctgcaaacgcactgaaagcgaggcggtgatcgccgtagcggatgacggcgcgggaattcccgaatccatacgcgaccatgtgttcgagccgtttgtgaccagcaatgacgcacgcgaatcgggcaagggcaccggcttggggctttccatcgccaaacgtttcatagacttgcagggtggaacgattgccgtttcagctcggcccgaagaagacttcgaaaccgagatcgtcgtgactcttccgctggcatagcccctttcgttaagaaacct

SEQ ID NO: 9591 - DNA, 2580 bp, Unknown
  gut microbiota DNA sequence
accgtttgtgacaagcaatgacgcacgcgaatcgggcaagggcaccggcttggggctttccattgccaaacgtttcatagacttgcagggtggaacgattgccgtttcagctcagcccgaagaagacttcgaaaccgagatcgtcgtgactcttccgctggcatagcccctttcgttaagaaaccttaaggctgtcttcagcctaagcaaaggatggcttttcatagtgaaaagcgtatgtcctttgcttgaaggagagctatgaagaatcctctgatacgctgcgtcgcgctgcttgcgctgctgcttggccacatcggactggcgggatgcgccgcaacccaggaaaagcatgctgaaaacgattcgatcgacaacgaattggcggacgcgagatacgatgagcccgaagagcgcgttttggtctcagacgatcggagcaacggaaaagcgtcgaaggagatagcttgctggggcgacagcatgaccgaaggagccggtcgcgatccagccgtgatcgcgaccggcgacggcgtcttcgatgccagctatctgtcgtatcctgacgtacttcaaaaactgacgggcatgaccacctgcaatttcggcgtgtcgggcgcgacatccgaagagatcggcattatgcaaggagccatcgaggccgatgacgaggacgagcgcctcttcatcgatgaggaagtggccgagctggcaaaacagcatacgggaacgatactggtgctggaaatgggaagcaacggcggctgggacggcgattacgcaacgctcatagagcagtaccatgcgatcatcgaaaactccggatgcgagaacttcatcatcatcggcgacaccgacgaccccggaacttcgttcggcgatccaagtcaagaggctttcgagccgggcgagaccggccgtcaaaccgagtgggaggccacgctgaccgcagaattcggcgaccgctttatcaacatgcgccagtttctcatcgataacgggttggcgatcgcagggcttacgcccacccgagaagatgcagaagatgctgccgtaggctgcatatccctgcagctacgctcagactggacccatttgaattcttacggatactacgcaaaggcgcaggcggtgtaccagagaggcgttcaattgggctattggtaaacccaaagaaacctttagaaagcgtttaggaaacgaaaaggttgctctcttactgtggaacacgaggcaaatacgtaagagaggtttcccatgaaatccaagagcaatgtgctggagtatctggccgaggccgcgaagcagcggcccggcgatacggccgttgtcgacgagttcggcaactatacctacaagcagttgcaggacgatagcgcagcgtacggcgcagcgctatccgaatacgacgtggcaaatcggggcgtggtcatcatggtggaaaaatgctatgacacacttgccatcatgctgggcacgctgttcgcatccggatattacgtgccggtcgatccatcggttccccccgtgcgacttgcgcacatcgtcgcgacattgggaagcccgctcttggtggccgacgaggaagccctgcggggccttcaactcgaagacgcgtgcaagatcgtttccttggaggagctgcatagccagcgcgccgggatacagcagcgcgacgcggtcgagccggcatcgctttcgatcgacccggcatacgttctgttcacctccggatcaacgggcgtccccaaaggcgtagttgtcagccatggagccatcatcagcttcatcgacgaattcgtttcggaattcgaattcgaccgcagcgatcggttcgcaaaccaagcgccattcgacttcgacgtgtccgtcaaagatattttcggaagcttggcggtgggagcgacgctcgtcatcgtgccgcgtcgcttgttcatgcagccgaaagccttggttgagtttctggacgagcagcgcgtgaccgtgatggtttgagcggtcgcggctttgtgcatggtgaacacatttcgcgcaattacaagcgattcgcttaccacggttcgaaaagtgctgttcagcggcgagataatgccacttgcccacttgaaatccctgcttgcgtctttgccggacgccgagttcgtcaacctgtacggcccaaccgagatcacctgcaactgcctgtaccatcgcgtcgaccgcgcaaaagacggcgccgccgagcttcccctgggaaaagcattcgggcactgcgaagtcctggcggtcgacgaggagggacggcgcatcgtcgagccgggccagaaaggcgagatcatcgtgcgaggaccctcgttggcgttgggatatatcggcaatcgagaagcgacggaaaaggcgtttgcgcccaatcccctcaattccctttacggcgagcgcgtgtaccgcacgggagacagcgcgatgctgacggacgagggcgatctggtcttttgcggtcgcaaagacaatcagatcaagtaccgaggacaccgaatcgagctggaagagatcgacaaggcgttcgaagggttctccgacgtcgacaggtgccgatgcgcc

SEQ ID NO: 9592 - DNA, 709 bp, Unknown
  gut microbiota DNA sequence
aggcgatctggtcttttgcggtcgcaaagacaatcagatcaagtaccgagggcaccgaatcgagctggaagagatcgacaaggcgttcgaagggttctccgacgtcgacaggtgccgatgcgccttcgattccaaaaagaaccggctatgcgcgttctacgaaggaacggcttgcgagaaagagcttcccggtcgggcggcatcattgctccccgctttcatgaggccgacgcgcatcgcgaaggtgccgagcatgccgctgaacaagaacgggaaggtggaccgtgcgatgctcctggaatcgcacggcgaaccggcgaagcgcgagagggctgatcgatgatgatagacgacgcaacgctgcaaaacgcgctggacgcatgcccgacgcctttgtaccttttcgaccagcaggttcttaacgaccgaatcacccggttacgggcatcgctcccctctcgcatcaagctctgctatgcgatgaaggcgaaccccttcatcgtgcgggaggcgtcggctctggcggattgcgtagaagcatgctcgccgggcgaggtgctcatctgcgcgaacgcaggcgtgccgttcgagaagatcgtgctttcgggcgtgtggaaggaccgtcgctgcttggacgatctgttccaagcggatcgcatcccccatagattcaccatcgagtcttcccaacagttgaaagacctggtcg

SEQ ID NO: 9593 - DNA, 589 bp, Unknown
  gut microbiota DNA sequence
tcgcccacctgggcgcggtcgcccagcacgaacgacagcagctcgagcgcccgatgaggccgccaccggtcgccttcgagctccaacaagcgcgcgatccgggaaacgacgtcgtcgccggcgcttcgcaggctcatcgcgcctcccctccgacatcaacaccttccgtgtcttcgcgcacacccgccgcgggcatgaggtcgctcagaacctgctcgaacggctcgcgcgcggcacggcgcacgagccgttctttctgacggcgcgtgaggcgcttgaagcggtactcggcgctcatggcctcgtgcttcgtcgcgtaagccgcctgcgcgagcaggcgcacgggaaggcggctgcgcgtgtacttcgcgcccgcgccggcgttatgcgcgcgcacgcgttcggcgacgtccacggtgtagcccgtgtaccatgtgccgtcggcgcattcgagcacgtacaggtagaacgacggatcgttttctgcccggggatccatgcgcgctacacgagcaccttgacgacgatcttgcgcacgcagcatggggcgtcgagcgcgcatcccggcttgtgggcgtcttcgggtgcg

SEQ ID NO: 9594 - DNA, 831 bp, Unknown
  gut microbiota DNA sequence
cgccgcctgcgcgagcaggcgcacgggaaggcggctgcgcgtgtacttcgcgcccgctccggcgttatgcgcgcgaacgcgttcggcgacgtccacggtgtagcccgtgtaccatgtgccgtcggcgcattcgagcacgtacaggtagaacgacggatcgttttctgcccggagccccatgcgcgctacgcgagcactttgacgacgatcttgcgcacgcagcatggggcgtcgagcgcgcatcccggcttgtgggcgtcttcgggtgcgagcacggccacgtcgcccgcacgcagcacgatggagctgggacgctcgggtgtgcagtacagcccgaaatcggcgtcttcgtcaaagggctgtactttcgcgaggccttcgagcggcgcatactgcatgacctcctcgcccgacacgacgaactgcacgtcgtagtagcggcggtgcgcctccagctgcttctcctcggcgggaaccgtgtcgtattcctgcacgttggcgaacacggcgtccccgtcgatgtcgacgcggccgagcgcgagcgacccgaggtcatccctgttcaaaaaagcatacgccttctgaaaacgcgcggcgaggtaatcgttgccagcggcatggtcgagggtggtaaccagcatgatcagtcctttcggtacgggtgcacggcgcgcaaagcgactcgcagtatacacccgaggacggcagcgcggacgcaacagaacgtttgcgcattccgcttgaagtctagaaagggatcgtggacggcagcttgagcaaggcagataatgaccgtatcgaccctgcgccgaagagacggcgccgttcatc

SEQ ID NO: 9595 - DNA, 1169 bp, Unknown
  gut microbiota DNA sequence
gtgaacgtgtgcacggccgagatccaggagaacgtggacgtggccatcgccgagggccgcatcgcctacctcgggcgggccgaccactgcatcggcgagaacacgcaggtcatcgacgcgaaggggcagtacatcgcgccagggttcctcgacgggcacatccacgtggaatcgtccatgatgggcgtgggcgaatacgcgcgcgccgtcgtgccgcacggcaccacgggcatctacatggatccgcacgagatctgcaacgtgctgggcctcgacggcgtgaaggtgatggaggaggacgcgcggcgcacgccgctcaagacgatgatcaccaccccgtcgtgcgtgcccgccgtgcccggcttcgaggacaccggttcgtccatcggcccggacgacgtggccgagacgatggcatggccgagcgtcgtgggactcggcgagatgatgaacttcccgggcatactaggaagcacggaccacgcgcacggcgaagtgggcgccacgctggaagcgggcaagatcgtgaccggccattactccatgcccgagaccgaccggggcctgaacgcctacgtcgcctcgggcgtgcgctgctgccacgagtccacgcgtcccgaggacgtgctggcgaagatgcgcctcggcatgtacgcccagctgcgctacggctcggcctggaaggacctgccggtgctggccgaggccgtgctggcgaacgacatcgacacgcgcttcgcgacgctggtcagcgatgacacgcacccgcacacgctggtggccgacgggcatctcgaccacatcgtgcgggtagccgtcgggctggggatcgatgcggtgaccgccatccagatggtcaccatcaactgcgcgcagtgcttccagatggaccacgacttgggctccatcgcgcccggcaagtgcgccgacatcgtgttcttggacgatctggaggacctgagggtcacccgcgtgctgatcgacggcgacgtggtggcggaagacggccgcgccctgttcgacctgccgccgttccaattccccgactgggttacgcactcgatgcacctgggtcgcgagctgacgcccgcatcgttcgaggtgcccgcacccgaaggcgttgccgacggaaccgtgtgcgtgcgcgcgatcgagatcatccccgccaa

SEQ ID NO: 9596 - DNA, 191 bp, Unknown
  gut microbiota DNA sequence
tcatcggacggaacgagggctctcgcaagacgacctcgccgcgaagatctacgtttcgcgccagaccgtctcaagctgggagaacgacaaaacctaccctgacgtggaaagcctgctgctgctcagcgtcctcttcgacgttacagtcgacgaactgatcaaaggagacgtggaagccatgaaggaagcaa

SEQ ID NO: 9597 - DNA, 496 bp, Unknown
  gut microbiota DNA sequence
gagctgggctgcgacttcgacaagaagcccggcgacaacgtgtccgaccgctccatgctgtcgaccaccagcggcaagggcatcgtggacaacctcatcgccgaagccgagaagaacggcgtggaaatcatgatggaaacgcgcgccatcgaagtgctcatggacggcggcaaggccgcgggcgtgaaggcgcgccagggcaagaccgagtacaccatcaacgcgaaggccgtcatgctggcttcgggcggcttcgacggccaggattgggcgaaggagctgtacgcgccgggtgccgtgggttggcacacgttcagcagccccagcaacacgggcgacggcatcgagctggcgaagcaggccggcgccatgacgctgctgaagggcggcctgtcgcagatccacctggtgggccgcgaaccgctgcccctcaacgacgagctgagcgcgctgcgcatggtgaacacgggcgtgttcgtcaccgacctgggctatc

SEQ ID NO: 9598 - DNA, 361 bp, Unknown
  gut microbiota DNA sequence
ctggccgaccagctggaagacgaaccgttcctgcgcgcgcacgccctggtcgagcgctggcgcgcgggccagaagcttatcgccgcgaacgtcgggcgcaagggcttcggcctgctgcaggccatcggagccgacggcctgcccgagttcgaggagacggcgcgcgccctcgtgggcgacgaggatgcggcagcggtgttcgccctgcagcgcgccaacgtcaccgatcccgcgctgcccgacgatcctcacgtgctgcacgtggcctcatacggcgccctgtgcggcgtcgaatacgacaacatcttcgccatcgccgccgtggacggcttcatgccgcggcgcgatgcgttcgaggtga

SEQ ID NO: 9599 - DNA, 1222 bp, Unknown
  gut microbiota DNA sequence
ggtcccgttccaagccagcgcgatggcgtcggcttcgcccgtaggcagcggaacagtgctcgtcaccgcatggtgatcgaagaacaacgcgctcactccgcacggcaacaacgtgcccgaagcgggcatgtcggccaggtgaacgatcaggctgacggccaggtcggcaaacgctgcggcgtaatagatcagacccatgcccgtgcaaatagctacagccatagttgtcatcacggcaatcgaccaggccactttgaaccagcgcagcccgctcattgcggccttcaaaagcggtgtcagcaacccgttcgccttcaaaaggtagaagaacgtgatgattgttttgaaggacaccggccccgagaacagcgagcgaaacgccgggtttggcatgatcttcgttacgatgaagttggtgatcttattgcctccggcaatcctcacgcctgccagcacggtgagcacgccgcccaccagcagcagaacgagttcgatataccacagcgtccattcgtcgtagccttcctttgcgcacgcgatggtctgcgaaccgtcgtggtagtggccgacgaagcacacatacccatccttttccaagcggctcacgcgcagaggagaggagtcgttccccttcaggcacgcggctcggcaacgccgcagctcctcgtcgctcaacggatcgggcttcggcggacatgcagtcggcatcggagtcgtacctgcctcctgtctgacgtcgtcgaccactacgccgttgcgcaatcctatgggatcgctggacacggcgttgttgatgtcggcgaagctcaaatcgtaggatgcctgcagcccttccgcgtcgaacgaaggctcttcggcggcgtagcttttcacctcctcggccgtgagcgcgcggttccatacgtccacgcgcgagatggcgcccgagaaacagtctttgccgttgtcgcttccgttcgagaggtcggcgccgatgcgaagtttcggctcctcgagcacgtctgaaatgggcaggcatgtggaaatctggctgtccagtacgccgtccacgtacaacgattgggtttggaggccgtcatacgtcaggcacacgttcgtccaaagctgcggttgcacgagccccttcgaaatcatgggctcctcgtcgccccgcagcgcgcataggcgccagctcgcttcgtcgcgcgccacgtacagcgacatgcccgcctcctccgacaag

SEQ ID NO: 9600 - DNA, 5180 bp, Unknown
  gut microbiota DNA sequence
cgtgcgcacgccctcgtacgggcacgccttgatgcacgactcgcacccgatgcacagctcgctgtccaccgacacgatgcccgtctcctcgtccttggtggtcgcccccgtcgggcacacctcgaggcacgccgggttctcgcaatgctggcactgcaccggaaggaagctcatggtgcagttcggaaacgaaccgccggcattgtcgtttgcgaccgcccctcgcgcaaccgccgaaccgaacgttctcggatcgtcatcgcttttggtgtacaccacattgtacgagaggtctttcggaaggttgttcgccactttgcatgccgcagcacacgtctgacaaccgaagcagcgcctcaaatcgatagccattccatatcgagtcatgcgtatcacgccccctgtatcttctcgatggcgacagcaacgtcgttgtacgcctggttggcgcagcactggttatagtcgttgaaggacaggtcggagaaatgcccgtcgatgaactcgcctgcctggaagcttcgcggacaactgacggtgttcgggcgttgcccggcgttcagcgtggcgatcatcgtcacgaagccgcgatcgttgctcagcttgacggtatcgccctcctcgatacccaaacccttcgcgtcctcgggattcaaacgtacgatgggataaggctcgaactctttcatgtactcgacatcccaccactgcacatgagtgcgcgttcgcaagtggtcggagcatacgctgaacggatgctttgcgcgcgcgggactgttaacgtccgcttccaaagcgggttcccagtacaggaaggtcttgtccttcgactcatcgatttcctggccaacgttgtacgaaggaacgaccttctcctgatagaatcgggcgcgcttggagggcgtggtgaacgaaccgccttcgaaggaaatgtacgtctcccccggcaagaagcgcgccgctttctcttctttcagtttctcgaacgtgatccccaaatcgcgtgcggcatcgctatcgagccaaagcttgataaaatcctctgagtccatatcgaagaactcgccgtagcccattttctcagcgatcagcttgtatatctcgaaatcgggcttgctctcgtacaagggatcgataaccttatcctgccacaccaggtaaggcacgtttcggctcatcaccgccaactccgtcgtttcgaaccaatggcatgcgggcagcagaatgtcggcgtacttcgcggtttcggtgaacaccatatcctgcaccaccacgaactccacgtcttcgaacacgcgaagcgtttcctggcgctcggtttggcataccaccgggtttgagcaggacacgtatatgctcttcatcgtgtacggcttgcctgcaagcgtctccgtttgaagcactccgtgcacctggttccagttgaccgcgcggccgccgccttggacggggttcccttcggcatccttcggcttaagcgctccctcggtattggccacgttgccgccgccgccgatgctcaaacccgcaccggcacccggcttgcatatgtttccggttgccaagatgagagagtacataggcccgtagttgtaggtgctgttattgtagtggttgcacccgtattgcgaatacgtgtacacgggaccgtcctgcgcatacacgcgcgccagctctttgatgtcgtccaccggcacgcccgtgacctcggaagacctctcgacggtccactcgcccactttttccttgacgacgtcgtacacggttgcgtacgaggtgccctcgatcggaggaacgttctccaaagcaggtttcttcgcatctgcgaccgcgacgacggccccagcctcttcgtcccaaaccgcaggagggtcgatcacggtaggctcgcccgtcttaggattcacgggaccttgctgcggctccacccccaacgcactcaatcgcaggaacgtgccatcttcctggatgaggaatggcgcttcggtatggctcctcaggaaatcgagatcctgccacccctggtcgaacacctcgcgaagagcacccatggcaagcgcgccatcggtgccggggttgacgggaacgaaccagtcggccttggacgccatggtgttgtacgcgatatctatgtcgacaagccgcgtgcccttgtcgcgcgcttcgaggatgaagtgcgtcgtctgcacctgggagacggctggattcgaaccccagttcacgaaggtcttggcgttctcgaaatcggtctgctcgttgcccgattgccacggcgtgctgcccagcatcgccatcggacgctccaccgcggccatgtcgcgatcaggcgttatcttcgccgcgccgataacctcgcgcaggcgagacatggccgatcccggtgcggttccgccaccgcagatggcgcagttcccgctgccgatgaagaacgccactgcatcgggtgcatagtcctcggcgtatcctttccacttgtcggcaatttcctggatagcctcgtcccagctgattcgctcgaactcgcccgacccgcgctctccgacacgcctcatgggatactggatgcgctccgcactgtagacgcgcgcgacctgcgtcacccctttggggcaaattcgattgtatcgcgtatcgggaaaatcacgagccgtcgtgcgcactacttggccatcgcgcacgtgaacgttcaagaagcatccgctcaggcactgccctcgacacgcgcccgaaaagatctcgtcgggaacatagtctgcagccggctccgctttttccaggttctgggtttgggggctgcagcctaccagcgcgcctgccgccgtcagcgccgccgcacccttgatgaagctcctgcgggtgaacccatgcgttgcttgttcagccatgtgtgctcctctctttttcactcctcggccacaaggccttccgatgctcgcccttcgcagatggcggggaggggatcgcgctctgcgaagggcggggtgaaaagccttgttccccctggcctttcatgagtctcactttacggagcgccgaaggatattgcgataaatcggaaataagttttgcgttaaaaaattcttaaccgcgtattaacgccgctggtcaagaagcattttttactgcttgttcttcgatttcagccaaccatcgattaaccgcatcgaccgcctcttctaacgacatatccagctttgccgattcagccgctgcggcatagtcgatacgccaatgcggataggcggttatttgcgccggccacatgcgaaccggacggccgagctctttcgcttctttgcctcgcgaaaagaacgtatcgagtatcgcggcgtatatatcgcacacgtcgggcgaacccgttctttctgcaagatccttgaggagaatcaagtcgaccacatcgcgcggccgttcgttgcgaaacataggagggtcatggggctcggttgccgcatgcaccttttgggcgatctggtagctcaatgcaagacctaccaagtagtcaggcgtcggcaacccaaagccagcgagcttcggggctgccacgtgttcctgcgacgatccggcctgaccttcatcgggggaaatttctactttgattctcctccagacatcccctcgcaatgatagaaccatctcgaaccgtctcggcttcactatccgagagggaacacgtatgatctctgcgtccgtccgagcaaaatgcagcggcccccaaggcagcatcagctcggcgtcgagtgcagcaagaaaatcttcgatgtctcccgtgacgattccatccagatccttcgtggcgcgagcgcacaatcccagtcgatgctgcagaagcgttccgcctttgagagagaacctgcttgctcctgcgcaatcgataacttgctgcagcttcgctgcaacaaccgtcgaagctatgagccaagcgagcctgccgctttgccctatactcagttcgttttcagcatgcgctatccaagagtccaatacgcggatcgaacgtggctctttgcctttcggtttgagcgatgccatcttttccgaaaggacgaatcggacatccccctccgtatcatgcgtaccgcccatcgagttcaccttccaaacactgcgctatctcattggttagcaggcgtcgatccctgccgttttctatagcttggcgaatcagataagtcggcacgtccgttatgatgcattgttcgatagcgcacggcagggtgacgatgggtatctgatgccaccatgttctttgctgcggatccaatttctgacgatgaagcacatagccttcgccacccgctttcgcaatgcgacgccctttatctaccgtcatatgtatcttcgttggattgatgtcgctcactccgtatgcgtcgagcgcagtctcatggctgagcgccgcttcgggcactcccgtccagaggattgcccgcatgaaggcgccgtaccgcatctccggcacttgcggcacacggtaaagcccctgcgctacgcgctccaaacgattgcgcctggcaagagccgcaagagaatgtcgcgtgacaccctcctcctcggcttgcgccgtcgtgatgtagccgtattggtcgagggccacctctctgatcttctcagtatctgtcagcgtagttatcatgcaaaaatgttaacaccgtgttcacttttttgcaagcttgttgctccgcggaagccgaagccgcggcagcggctctcactccaagctgtcggccatcttgtagcccacccgctggacggtgagcaggtacttgggctcagaggggttctcctcgatcttctcgcggatcttgcggacgaacacggtgatgttgttcgtaggcttgcagtcggcgtccgactcgccccagatgtactcctggatctggctgcgcgtgaacaccttgcccggatgcgccgccagaaacgccacgatctcgaactccttcgtagtcagcgccaccggcttgcccttcacgcgcacctcgtattcgccgaaccgcacctccagctcaccgatgcgcgccacgccctcgcggttgcggcagcgggcgaaatcgatggtgtccttgtggcggcggatgttcgcctcgatgcgcagcagcagctcggtagaatcgaacggcttcgtcacgtagtcgtcgccgccggcgcggaagccgatgctcttgtccacgatgtcgcac

SEQ ID NO: 9601 - DNA, 4187 bp, Unknown
  gut microbiota DNA sequence
cgcgccgcagaacgcgtagccgttcgacaccagcagctgctcgagcgcttgccgcaggttgccctcgtcgtcgatgaccatgaccttatacatcgtcctccccctctatctcgcccacgatcgcgctcgcgggaatcgtgatgacgaacctgctgccacgaccgagctcgctttccaccgacacggcgaacccttgcatgtcgccgtattcgcgcaccagcgccaagcccaagccgctgccgttgtatttgcgcgtggacgtgctgtccacctgtacgaaccgctcgaagatgcgcgcctggtcctcgggcgcgatgccgatgccgtcgtccaccatcgacaacgtcaccacgcgcgcctcggcgtcgtacgccacgcgcagctcgatggagccgccgtcgggcgtgaacttgatggcgttgctggccaggttctccagcatgcgcgtcgttttctcgtagtcgccgttgaccaggggcacgtccgacgccaccttcgtgctaaacgacacctcgtacttgcgcgccagcggagccatagtgcccttcaccgatgccgccacgtcgcccaaatccatcggctcgcaggtggcgcgcatgccacccgcatccgaacgcgcgatgtccagcatgttgttgatcatgttgagcaggatgcgactgttcttctcgatctcctcccatgagcgacggtcgtgctcgttggccgggtcgcacgcctcgcgcgatatctgcgcgaacgtgatgatggacgtcagcggcgtgcgcagctcgtggttcaccatgcttagcaggtcggacttgaactgcgtctcctgcgccaggtcggcgttaagctgctccagcttgtcgcgctggcgttccagcagggcgttcgcctcgcgcaggtccaccgtgcgctcctgcacctgcgattccagatgctcgtacatgccccgcagctcgcccgccatgtcgttgaagccggcgatgaggctcctcacttccttcgcggcgaagcgctggctgacggacgcgcccaagcgtccctgcttcagctcgccgaacgccgcgtgcatgccgcccaacggccgcagcacgaacacggtggtcaccaccaagatgaccaagccgatgaacacggtgatcagcaggaagtacgccatgtctcggatgacgttgccgcgcatggccgcctgctgctgatcgagggggatcacgatgctgatggccccgccgaccgactcgagcgtccaaccttccttcgcgtggtcggtgatgtcgagctcgccgaccggctcgccgtggcattcgaggcagctgtcgtccacttcgagcgcttgcagatagcggaacctgtcctcgccgtcgaacggggccacgccgtaatactcggtcaccgaacgatcggcgttgaacgcctcgagagccttcgtctcgaactcgtcgggaatgtcctgctcgctgcgcgggtcgaagttcgtgtaccggatgcggtagtcgctgcccgccgagaacagccggccgacgctcttgcccaccaccgagcagtgcaggcccttgaactcgtagccgccgctggacgaattgttgatgatgctttgggaattgtccatgaactgccacaccgcgtccatctcgcgcgcgaacgtgcgcgcttcctccagcatggcctgctcggtctgccgctgctgcgagtacaaatcgaacgcgacgaacgcgaaaaacgacacggcgaacaccgccgtcagagcggcaagatagatggtcttcagactgaaagcatgcttccccatgagcgccccctacgctgcgttcggaaaaattcgcagcgtgcaagcaccgtagcataatcgtctgatcgaagcaaagctgcgacaaggaatcagcgacctggggaaacacatgcattcgcatcgctcatctggctattatgatctcgttgctcaaagagcgaaaacctcagcgcttcttgcgcggcctgccctttttgggcgtttttccccggtcggaggctttttcgccgcgcatgcggcgagcctcttcgcggcgcgcgcgcaggtctttcgtctcctggcgaagcgcctggtacgatgcgtagcgctgttcgctgatatcgcccgactcgacggcggcgcgcacggcgcatcccggctcgtcctcgtggctgcaatcgcggaatcggcagcgctcggccgcctcctcgatatccgcgaacgctgcgccgatgccggcatcggcctcccacaggcccagtccgcgcacgcccggcatgtccatgatgaagccaccgccgggaatggccaccatctcgcggctcaccgtggtgtgccggcccttgccgtcgcggtctcgcacgggggttgtttcttgcaactcgtgtcctaccagcatgttgatcaggctcgacttccccacgccacttttgccgatgagcacggccgtggtgttcggcggcacaagcgcgcgtaccgcttccacgctggaaggatcgtcggccgacacgacgacggtctgcacgtcggggccggccaacgcgcgcacgcgatcgcgcaccgacgccacttcggcatcgctttcggcgagatcggctttcgtcagcaccacggtcacggccgcacccgtctcgtaagccagcaccagctctcgctcgagccgcctcacgttcacgtctgatagcggttgcgccacgaacacacggtcgaaattcgcagccagcacctgcgggagcgcgcgttcggtgggatctttgcgcacgaacgcgcgcgtgcgcggcaggatactctcgatgatgcccttgtcatggccctccggcacggtcacctcgacgaagtcgccgatcacggcgcgcacttcctcgcctttcaccagcgcggtggcatgctcgcaacgcacgaacgacccctcgtcggtgcgcacgagcggatatcctcgatcaagcttgacgacctggcctctttgcaaaagccctccttcgagtcacgaacagcgcgcctaccgctgccgttccctcagccaatagaacacgcccagcatcaccagtccgacgaccaccacgacaatgcccggaacgaacgcgttgaagtcgaactcgtcgggatggcgttcgcccggcgcgatgacggtcaccgcctccgcatgaaggtcgctctggccttcatgatcggcgcacacgagatggaacgtgccacgcacttgcaagatggtgcccgtagtaccatactcgccgaacgtgtcgatcttcgatgccgattcgttgctcatatacaccgagatcgtcgcagaatcgccctgagaggaaagcgtgatccaccgatgcctccccgacacgccggcacggatgctgtcgccgatgacctcgcctgttacctgcacggtctgattgtcgtaataggcatcggcgccgctgaggtcgacgatggacgtgtcgtagatgaacgagctgtcgggcagttgctgcgtgttcaccgcattgtcgccctcggcaggctcatcggcatgcgcggcagccggcagcgcaaacaccgccgcaagcagcacggccagcaccgcgacgaaacgcacgaacgcaatcggcagcggcagcggttgacgggttccccacctcatgacttcaacacccgccttttcggattgagcgacacgataatctccgccaccagagccaacagggtgacgaattccagacgacctgcccacatctgcgcgatgtagaagagctccaacgacggagacatgcccggagcggcaagccccgacgacacgccgccgttgctggccatggccaccgattcgaaaatggcctgcggcgcctcgtagccatgcgcgatgcccaccagcgtgcccaccgcgtacgtggccacgtacagcacgaacaccgtcatggcctccttcacgacttccggcgaaagaatgcgccggcccacatggttgtacgacaccacgacgcgcgccgaatcgggcgcgagcgcctccttgatggtagcgacgatggacttcatgatgatgcccatgcggctgaacttcaagccgcccgaagtggatccgccgctgccgcccacggccatgaggatggccagcacgaagaaggcgcccgacgacagcgcggttgtcagctcgttggtggtgatgttctggaagccggtggtggagaacgccgatatcaccatgaacagcccgcgtcgcaacatggcaggcagactggaaaac

SEQ ID NO: 9602 - DNA, 2446 bp, Unknown
  gut microbiota DNA sequence
tgaaagaatgcgccggcccacatggttgtacgacaccacgacgcgcgccgaatcgggcgcaagcgcctctttgatggtggcgatgatggacttcatgatgatgcccatgcggctgaacttcaagccgcccgaagtggacccgccgctgccgcccacggccatgaggatggccagcacgaagaacgcgcccgacgacagcgcggttgtcagctcgttggtggtgatgttctgaaagccggtggtggagaacgccgatatcaccatgaacagcccgcgtcgcaacatggcaggcagactggaaaactcggggcttgcgctgagcgaggctgccagcacgcatgtcatcacggccaaccacagcaccatcgtgcggatttccagatcgcggaagaaaacctccacgtgccctttccacatttcggagtgcagaacgaagttgatggagcccagcaacataagcaacatgagcacgatctcgagcgggaaccaatgatagtacatgacgctctggctcataggggcaaagccgcccgtggtgaaacccgagatggccaaccacagcgattgcaggaacgcgcgcagcggttccatgccgaggaacaggcacatggccgtgagaatcaccgtggcgacaaagatcatgcccatgccgatcttcgcgatgaactgcgtggtctgcacaacgttgggcaccacatgttcgctacgaccctcggacatgtacaggctggctccagcgcgcttgccgaacaaaccgaacgacaacgccaccacgataagaccgaaaccgcccaacaggtgcatcatgaaacgccacatgttgtcggcgttcgacaggtgatcgagatcgacgatgacgcttgcgcctgtggtggtcagacccgacacgccgtcgaacagggcatcgaggtagctgaggtaatggcccgacaggtacagcggcaccgccgccacgaacgcgagcacgatccacgcgaacccggtaacggcgagcgcctgctggcgattgagccgacccggatcgatgcgcaggaaccgcagcgccgatccgacgataagcgcaatgccgatggtcagcagatagtgcgtcgcaggagtccactcagcgcacgcaagagccgtgacgaacggcaccagcagagcaaggctggagaagagaacgagcacgccgagataatggccgatgacccgaacgtcgtacaatgtgaaccgttgccacattctgcgtctacctttgcctcgaaccgcgcaaacgggcgagtgtttcgatgtcgatcaacccagcacgatccttaccaagatgataagcgcccacagcagcaacaggaagcacgacagcgacagcagcaccacgctgtaacccagcagcggcgtctcgatgacctgtcggatgtccttgttccttttgcgcatgcgggtattctagtacaaatggccgctgtgcgatacgcccggcgcggcaacagacacaatgatgatgacttgggcgccgcgaggctcgcaggaaggccgttcgacgctctccataataaagtttacacgcgtagctatcgaagcacgcatgagcaaggtataatcccaccattctttgatcattcgatcaaaaaacgcgaagaggaacgagaaaggtacgatcatggctcctgaaaacgacatcgattactcgctgtcgcgcgttcctgatgaagcgaaacagccattttggcggattcttttcatcaggatcggcgcgatctgctgcgtatcccagctcatgttgggcgcggcactaggctacggcctgacgttctgggatgccttcctagcaaccatgctcggctcggtgctgcttcaggtggtcagctgggcgctgggcacggcggccgcgcgcgaaggcttgtccaccagcctgctgtcccgctggaccgggttcggcaaggtaggatccgccctgttcggcggcgtggtggctatctccatggtgggctggttcggcgtgcagaacgcggtgtttggccagggcatggctgaaatcgtcccgttcacagatttcctcggcacgcaggagatcctgcccggcatcatggctggaatcacgcccgagtacatcttctgggccatcatcaccggcctgggcatcacgctgctcgtggtgttcggcatcaaggccatcgcgaacttcgccacggtgttcgtgccgttgttcgtgatcgtggtcatcgtagccgcagccatcatcctgcagaaccattcgctgaccgagcttctcaccacggcccctccgggaccggcgctgtcgctgggcgcggcaaccaccatggtggcgggcggcttcattgcgggcgccatctgcacgcccgactacgcgcgattcctgaagaacggcacccaagcattctggatgacgctcatcggcacgttcgtgggcgagctgggcatgaacctgcttgccgtgctgctggcgcac

SEQ ID NO: 9603 - DNA, 4387 bp, Unknown
  gut microbiota DNA sequence
tatctgcacgcccgactacgcgcgattcctgaagaacggcacccaagtgttctggatgacgctcatcggcacgttcgtgggcgagctgggcatgaacctgcttgccgtgctgctggcgcacgccatgggcaccgagaatatcgtcgacatcatgatgggcacgtcgggcatcatcggcgtcatcatcgtggtcgcctccacggtgaagctgaacgacatcaacctgtactcgtccagcctgggcttggcaaccatgatcaacgcgctgttcaacaaggccatcagccgcaacggactcgtgtgggcgctcggcatcgtgggcacgctgctgtcggtcatcggcatcatcaactacttcaccaacttcctcacgctgctgggcgtggccatcccgcccgtcgccggcatcatggtggtggactacttcatcttgaagcgcagccgcgcgacgcttgacgcttcgcgcgccaagggcgagctgcccgagaaggttgagaagtggaaccccatcgccatcgtctgctggatcgccggtttcgccgtgggcgaggtcaccagcatcatgaacgtgggcattccgggcctgaactcactgatcctggccggcgtgctgtactggatcgtgatgaaggtgtacgcctccatgaagaaggtggacaccgttacgttcacggaaacggaccaagtgctgtaaggctcgccgcgatgcggtgggtgtgggcggggcgaagcgaaagcacaccccaccgccgcaaaagccctgatcagcaatgcgaagcccctgatgtttcacgtgaaacatcaggggcttcttctgttcacagcggcgtcctcggatgcaagatcctgtcgttgggcttcgttttatgggagcagcaccagatcgtaaaggtcggggcgacggtcgcgcaggtaggggctgcgctggcgataatcgaccacttcgttcaggtcgagctccacatgcagcaccccttcggcctcctcggccagctcggccaccacgtggccgcgcgggttgcacaccttcgtgtggcccggcatgaccagctgatcctcgacgccgtaacggttcacggccgccacgaacgcagtgttctctagcgcgcgggcgggcgcgttcacgtcccacacgtccatatcctcctggcaccacgccgaggggcacaggataagatcagccccctgcagcgccagcatgcgcgcgacctcggggaagcccatgtcgtagcagatcatcacgccgatgcgcccgaagtcggtgtcgaacaccgggcagtcgcagccggagcggaagtagaagcgctcgagcgcccacagatgctgcttgtcgtacgtgcccagaagctccccctggcgatcgatgacgaccgagctgttgaacgggaccccagccatatcgtacgcgagcgcgaggcccgccaccacgtagcagttgcctgcgcgggcagcgtcttgcagcgcacgcaccgtggggccgtctaccggctcggccagttcgggcacgtgagggccgacaatgttcagctcgtagcctgtagagaacagctcgggcaacaccacgaggtcggcgccttcggcagccgcctcggcgatcatccggcacgccttttgggtattcgctgccggatcgcacagcacgctctcgaactgaaccagtgccaaatgcaccgtgcggccgccagccgcttgtttcgtttcggtcatgggtttctccttcaacgcctcaaaccgtttcgctgcattatctcatgatcaaagcgccttgcacgcgcccagttggaacgatgaaggaaggcatcgggcgaaatctactttcttgcacctttagcacaaatcacgacagcgagcgttccaatgacaagggagaacgccgcagctgaaacaaaccacgttcctatcgtatcttcgatcgttctccagtcgccttgaagagcgctctctttcagcatccagatgattgccacaagaaccgcaagagagcccacgaaggacagacaaagcagaaccattcgcaacaggttgctcttgcaaagaaacgcacccgctatcccccctatgactaccactccggaaagaatcacgatcaaggcagagacgagaaccatcagcgtcacctacttaccctcagacgtcgtcgggcgtttccggcggtcggtcgaccgccggaacaaagctacagcatcagatcgccgacggctttgacgcggatgcacagcgcatcgcccagataggccatcgggatgtcctcgacgtcgaccacttccacggtgctcggatcggcgccggcttcgatggcctcgtcgcacgcgcgctgcttcgactcggcgagcgcctggtcgcgcggggtctcggtcagcgagaacaccttggcgatctggccggacacctgcgcgatggccgaacccactgcgttcgccacgccgaagttctcagggcgcagcacgttgtccgagccttccagctgatcaggagccagaatggagccgccgcccacgaggatcaccgtcacatcgccggccgaggtcttcatggcgtccaccgcatcctcgatgatgcgcgtgatctcgacataggccgcgtccacgagcgcggggtcgaggtcggccaccagtgcgggatcgcccacgccctcggccaggcccttcgccaccacgatatcggtcgcggtcagcgtgtcgccgccgaagcaccgcgccttcttcgtgaccaggtagcccacgctgtcggggcccaccgtcatgctgccgtcctccagctggcgcacgagcgagccgccgccgaggcccaccgacaccaggtcgggcatgcggaagttcgtgcgcacgtcgccgatttccacggccaccatgctctcgcgcgggaagccgtgcgccagcacgcccacgtcggtggtggtgccgccgatgtcgacgaccacggcgtccttctcctgcgtcaagaacgacgcgccgcggatggagttcgtcggcccgcacgcgatggtgaagataggatagcgcttagcatagtccacgctcatgagcgtgccgtcgttctggcccaggtacacggccacgtcggtaaggccctcagacgcgagcgccgcctcgaagctgtcggccgtcgtgcgcgccacgtcgtacagcgccgcgttcaggatggacgcgttctcgcgctcgaggaagccgagcgacccgatctccgacgacagcgtgatggggaagccctcgcccagctcctcgcgcagaacggcggcggcgcgcttctcgtgcgcgtcggacaccggcgagaacacgctggtcacagcaacggactcgaagccctcttcgcgcacgacgcgcgcgacctcgcggatctcgtcttccgacagcgcgctgatctcgcgaccgtcgaactcgttgccgccgtgcacgaggaagtcgcgcacgcgcatggcgttcttcagctcgtcgggccagtcggccatgcagctgatggccgtcgtggccggggcgcccacgcgcagcgcggcaaccttgttcaggcgcttgcgctcgacgatggcgttcgtgcagtgcgtggtgcccagcatggcgaacccgatgttgcgcgccgcgtcggcaccgatctgggtgatcacctcgtgcatggcggccacgatgccgctcatgacgtcctcggtggtggggcttttcgtcgcggccaccagcttgaggtcgccgtcgatgaccaccgcgtcggtgttcgtgccgcccacgtcgatacccagacgccagatgcgcttctgatctgccattacgcctgcacctcctcgttgttcatcgcggcgacgcgctgctcaaccggcacgtagtcgatgtcgtagccgaacgcgcgcggccccaccacggccaggccctcgggcgtgcgccactgcggcgcgcagggcatgcccaccaccacgatgcgggcgccgtacttcaggccctcggtagtcacgggcgagccggactccatgtccagcgacatgatgaggtcgggcgacgtggtcaccggctggccgtcgcgcagcgcgatgaggttctcgttctggaactcgatgatcagctggctgcccttgtcctggtcgagcccgtccaccacggcgcgaccgcgcacgaacatgccgtcggtcttgcgctcgacgtccaccactttgccgcggaacaggcgaaacccgttcgtcacgttcagcacggcctcgatggggtcggcatgctgctcgcgcgcctcgcgcagcgtgcggccgatctcctcgcacagcgtaggcgtgtcggggatgcagtagtccttgagctggcgccccgtgcacggatacgacgccaggatggtgtaaccgcccatcaccgacgtggcctggcgcgagatgcgctcgagccacttgtcgtcgatcgcgcgcaccgtgacc

SEQ ID NO: 9604 - DNA, 586 bp, Unknown
  gut microbiota DNA sequence
gggcgtgtcggggatgcagtagtccttgagctggcgccccgtgcacggatacgacgccaggatggtgtagccgcccatcaccgacgtggcctggcgcgagatgcgctcgagccacttgtcgtcgatcgcgcgcaccgtgaccgtgttgcccttctcgtcggccatgacggcgggctgccccttcacgccgttgatgcccagcgtggtcatctgcagctcggggaacgcgcggcccatgagatcgcagtccaccacggggatgcggcgcgtggccgccaggatgaacgggatggtggagttcacgccgccggcttccaccgcgtagatggcgtacggctcctggcccagctccttcaccagctcgtcgtacgtggccatgggctccaggccgctgcagatcttctccaccatgatggtgggggcgcccatcatctgggacacgcacaccacggcgtcgtcaggaacttcgtcgggcgagatgagctccacctcgccgtacttcttgatggcctcgatggccatgagcttgccgacgtacgggtcgccgcccccgccggcgccgagaaccgtcgcgccaagcgccatg

SEQ ID NO: 9605 - DNA, 3840 bp, Unknown
  gut microbiota DNA sequence
atcgtcaggaacttcgtcgggcgagatgagctctacttcgccgtacttcttgatggcctcaatggccatgagcttgccgacgtacgggtcgccgcccccgccggcgccgagaaccgtcgcgccaagcgccatgtcctcgatctctttgatgccgattttccttctcatgatggaatggaacctttctccatatgccgctgcttgaacaatctatacgttggattgtactggactgcccttgcgactggaatgccgaaacggcgatgcaccgaaatgccgcacgtttgccgctcgctgcatgagcaagagcatcccgtaagggcttttgtcctcgcaagatgttttcattgctttcatttttgctttcatccttgcaaaatgctttcattgctttcatatttgctttcatccttgcagaatgctttcattgctttcatatttgctttcatccttgcaaattgctttcattgctttcatactcgttgcaagcaactatgagcaaaccaggaggtgcggtcccaatgaaggaagacgatcttccgttcgaccttgccaaaaccattgcgtgcatgcgcgcagcaggcaccgatcttcaatcgtgcgaagtgaaaagcgcggtcggcaagctccctaaagacctcgccgaatccgtctccgccttttcaaacggttcgggaggcaccatcgtgctaggtctttccgaagaagaaggcttcaagcccgcccctggattcgacgccaagcgcgcgcaagacgctctggccgaagcgtgttccaccaagcttacacccgccatccgaccgaatatgaatatcgaaacgttcgagggagcgcccgtcctcgtcgcttcgattcccgagcttccccctcgcgacaaaccctgccacgtgaccacgaggggagcctacgaaggttcgttcatccgaaccggagacggcgatcggaaattgagccactatgaaatcgaccgcctgatcgaggaacattcgcagccgcgccacgatgcccgtatcgtcgaaggggcagccgaagacgacctcgatgacgcgttggtcgaagccctcgtggaacgcgagcgcttcctgcatcctcgcattttcgagaaattggagaagcgggatatcctgaaagccttacgcgtgctggacgaggacgaagacggggttctgcgaccgacgcttgcagggttgctagcccttgggttctatcctcagaaacactttccgcgcctcagcgtgtcgttcgccgcgtatccgggaacgaccaaggcaacgttgccggagacgggccagcggttcctcgactcgaacgatttcgtcggacccattcccgtcatgatcgcggaagcggtcgcagccgttgcgaaaaacatgcgaaccggctcgtttttcgaaggggcatttcgcgaagacgtgcccgactatcctcaggaagcggtacgggaggccgtcgcgaacgcactcatgcatcgcgattactctccggaagcttggggcgcccaagtgcaggtcaacatgtacgcagaccggctcgagatcctcaatccaggcggcctgtatggaagcgtgaccgtcgatacgctgggaacgctcgggttgtcctcaagtcgaaacgaatttttgtccaaaatactcggaagcaccccatacgctcaagcacccgggaaagtgcgctatgtcgtggagaacaaagggtcgggatatgcggaaatagaaacgcagctggcggccgcatacatggagccgccgaagccccgtgatcggcccggatcgttctcgctcacgttctgcaagaggcgcctgacccccagcgaacagcacgactactcgaacgagaacatcgagaacgccatcctcgccatggccaccgaacgcgaaaccatcagcgcgaaagaagtggaggaagcatcgcgtttatcgcgcggaaccgttcttaaacacatcaataacctgattcgccagggatcgctggaagcgacggaaccgggcagcagcaggaaaaaacggtataggttgacgcgtccctgataacggatatcgcactcgcgtctgcaaccatcgattgaaaaaggagatacctcccatgattttcaaacagttgatcgaactctacgacctgttggactcgcccgctgcaagcggagcgggcgtggtggagtacctgcgcggcatcgaccccgcgtgcgatgccgaaacgtacgtgctggaggggccgaagggctccaccgatatggtgcgcgtgcgcatccccggttcgcgcgggcgcgccgccggcggcgaggcgcccaccatcggcttgctgggacgcttgggcggcttgggcgcgcggcccgagcgcatcggcttcgtgtcggatggcgacggcgcgctgaccgcgctggcctgcgcagcgaagctgctgtcaatgcacgcacgcggcgacgtgctgccgggcgacgtgttcgtctccacgcacgtgtgcccgcacgcacctacgttcccgcacgagccggtggcgttcatgggatcgcccgtggccacggccgatgtgaaccgcgaggaagtgggcggcacgcagctggacgccgtgctggtggtggacacgacgaagggcaaccgcatcatgaacgaacgcggcttcatgatctctcccacggtgaagcagggctgcatcatgcgcgtcagcgaagacctcgtctcgctggtggaaatcgccactggccgtcgcgcgcgcacgtacccgctgtccatggccgacatcacgccgtacggcaacgggctgtaccacctgaactccatcctgcagccgtgcaccgccaccgacgcgcctgtcgtgggcgtggccatcaccaccgagacggccgtacccggctgcgcgaccggagccacccacctgaccgacctggacgaggcggggtcgttcatgatcgaggcggcgaaggcgtttggcgaaggcaagtgcgcgttctacgacgaagacgagtacgcccgtttcgtcgaacgctacggaagcatggcccacctgcaaggcatgggcgccttgcccgccgaggatccggaggcgtaagcgcaatcgggatccggaggcgtaagcgcaatcgggatccggaggcgtaagcgcaatcgggatccggaggcgaatgtttcacgtgaaacattcgatgacttgaaaggttatagtatggatctacagcaacgtgcacgcatcattatcgaaacgaatcttgcgcttcagccaggcgagacgctgctggtcgtcaccgacgaccccacccgcgaggtgggcgagctgttctacgaagccgcctgcgccatggatcatcgggcgctcatcatgcagatgcccgaaggctcggtagcaggcgaggaaccgcccgcgccggtagcggcggctatgaaggcggccgacgtcgcactgtgccccacggcgaagtccatcacgcacacgaacgcgcgcatcgaggcagcggcggcgggcacgcgcgtgatcaccatgcccggcattaccatggacatgctgcgcgacggcgccgcctgcgccgactacgcccaggtggagcgacgcacccgccaactcaccgagcgcctgacgcacgcgaagcatgcgcgcatcgagaaggatggccatgtgctggaacttgcgctgacagggcgcaacggcgtggccagtcccggcgtgtaccgcgaaccgggcgccagcggcaacttcccctcgggagaggcgtacatcgcgccgctcgaagacggggcgaacgggacggtcgtcatcgacggctcgatggtgggcattggcacgctgaccgagccgatgacggtcaccatcgagaacggacgcctcacgcgcatcgagggcgccgacgcg

SEQ ID NO: 9606 - DNA, 3214 bp, Unknown
  gut microbiota DNA sequence
aaggcagcagcggcgggcgcgcgcgtggtcaccatgcccggcattaccatggacatgctgcgcgacggcgccgcctgcgccgactacgaccaggtggagcgacgcacccgccaactcaccgagcgcctgacgcacgcgaagcatgcgcgcatcgagaaggatggccatgtgctggaacttgcgctgacagggcgcgacggcgtggccagccccggcgtgtaccgcgagccgggtgccagcggcaacttcccctcgggcgaggcgtacatcgcaccgctcgaagacggggcgaacgggacggccgtcatcgacggctcgatggtgggcatcggcacgctgaccgagccgatgacggtcaccatcgagaacggacgcctcacgcgcatcgagggcgccgacgcgcagggtccctacgccgaacgcctaagcgtgctgttcgaacagcccgaaaacggcaccatcgccgagctgggcatcggcacgaacgaggccgcgaagctgtgcggcatcatcctcgaagacgagaaactctacggcaccgtccacatcgccttcggcacgaacgcctcgttcggcggcgtcaccaaggcggactgccacctcgacggcatcatccttaaccccaccctctacctcgacgacgaatgcatcatccgcgagggcgagttcgtgtagcgaactagcaaccttccgcaaccaccgggatgtttcacgtgaaacactcctgcggacggggcggtgaaacggggcacggggtcgacggatcggcgccgcaacacgtaaacggcccggcaaatgccgggccgtttacacttgcgaccttgcgggaagccgcgctcgttctgttcagacgacttacttctcgccgtcggtcagcaggtcgtcgaggggcatggcatccagctccaggggctcttccacggtgcattcgtagttgccgtcctggtcgatgctgatcagcacatggctgcggtcgcgcagcttgccttccactaccttctgggcgatgcggtcgacgatctccttctggatgaggcgcttcaacggacgcgctccgaagatgggatcgtagccgtctatggacaggtgctccatcgccgccggtgtcacgtcgagcgtgatgcggcggtcggccagacggtcgcgcacctcttccagctgcaagtcgacgataggctcgatgttcgtcatgttcagcgcgttgaacaccaccacgtcgtcgatgcggttgatgaactcggggcggaacgtcgcgcgcagggcgccgtcgatggcctgcttcatggccttctcgtcgccatgctcggcgaactcgcggatgaattgcgagcccacgttcgacgtcatgatgatgatggcgttcttgaacgacaccacgcggccctggccgtcggtcagacggccgtcgtccagcacctgcaacaggatgttgaacacgtccggatgcgccttctcgatctcgtcgagcaggatcaccgagtagggcttgcggcgcacggcctcggtcagctggccgccctcgtcgtagcccacgtaccccggaggcgcgccgatcaggcgctgcaccgagaacttctccatgtactcggacatgtcgatgcgcaccatggccttctcgctgtcgaacaggtactcggccagcgccttcgcgagctccgtcttgcccacgcccgtggggcccaggaacaaaaacgagccgatggggcggttcgggtcggacaacccagcgcggttgcggcggatggcgccggccaccgaggacacggcctcgtcctggcccaccacgcgctcgtgcagcttgtcctccaggtcgaccagcttggccatctcgccctgcatcatcttctgcacgggaatgcccgtccacgtggaaacgacctcggcaatctcgtcgtccgacacctcctccttgaggatggcgccgtcctgctgcttcacgttcagctcttcctcggccgcatgcagctgctgctgcagcgcgggaatgcgcgcgtagcggatctcggaggccttcaccaggtcgccctcgcgggtggcgcgctcctcttcaagctgcgcgccctcgaggtcgctcttgaggttctgcacgtgctcgatggcgtccttctcgttctgccactcggccttgcgcttgtcgaggtcctcctgagccgtggcgatctcgcggcgcagcgcttccaggcgctcttgcgaggcctggtcgctctccttcatgagcgcctgctcctcgatctgcatctgggtgagcttgcgctcggcggcgtccacctcctcgggcatcgagtcgatctcgatgcgcaggcggctggcggcctcgtccatgaggtcgatggccttgtcgggcaggaagcggtcggagatgtagcggttcgacagctcggccgccgccacgatggcggcgtcggtgatgcgcacgccgtggtggatctcgtacttctccttcaaaccgcgcaggatggcgatggtgtcctccaccgtgggctcggtgaccagcacgggctggaagcggcgctcgagcgcggcgtccttctcgatgtacttgcggtactcgtccagcgtggtggcgccgatggcatgcagctcgccgcgggccagcgcgggcttcagcatgttgcccgcgtccatggagctgtcgcccgtggagccggcgcccacgatggtgtgcagctcgtcgatgaacaggatgatgcgtccttcgctctgcttcacctcgcgcagcacggccttcaagcggtcctcgaactcgccgcgatacttcgcgccggccaccatcgcgcccaggtcgagcgccacgaggtcgcggtccttcagcgaagagggcacgtcgccggccacgatgcgctgagccaggccctcgacgatggccgtcttgccggtgcccggctcgccgatgagcacggggttgttcttcgtgcggcgcgacagcacctggatggtgcggcggatctcctcggcgcggccgatgaccgggtcgagcttgccttcgcgcgccttctgcgtgaggttctggccgtactgctccagcgcctcgaactgcactttgttctgctggtcggtgacgcgcgtgtcgccgcgcagctcctcgtaggcagcctcaatgctcttgcgcgtgacgccggccgtagtgaggatcttgcccgcagcgcccttctcctcggacagcgcgatcagcagatgctcgctggtggcgtagctgtcgcccagcttctcggcg

SEQ ID NO: 9607 - DNA, 1930 bp, Unknown
  gut microbiota DNA sequence
acgcctcgaactgcactttgttctgctggtcggtgacacgggtgtctccgcgcagctcctcgtaggcagcctcgatgctcttgcgcgtgacgccggccgtagtgaggatcttgcccgcggcgcccttctcctcggacagcgcgatcagcagatgctcgctggtggcgtagctgtcgcccagcttctcggcgatcttgacggcgttgtcgatgaggttcatcagggccgggccaggcacgccgctcatcatgccggggttcccgctgaccttcggcatgcgctggatctcggcatccacgttggcctgcagctggaacggctcggcaccgatgcgcttgatgatagcggacaggttgttctctttcgattccagcagagccttcaacatgtgaatgggctctgcctgcgatgactcgttctcggaagcgatgacaatcgtctgttgcagcgcttcctgagcggtcagggctagcttgttcaggttacccatgttcatacaacgttcctccttcgcttagggcagctgccgcaaagcagtcggtaagtcggatacgcgcacgagggcgttcacgctttcgcgcgtttcaagctcgtgcacgcgatcggccagacggcgcacgcgcttgtgcaggtcgtccagctcggtgtcgcgctcctccaggcggccctggaggtcgagaatgcggatgacgcccgccaggttgatgccctcgctcgtcagctcgttgatcagctcgagccgctcgatgtcggccggcgagtacatgcgggtgttgccgctcgtgcgctggggcgatacgagccccttctgttcatatgctcgcagcgtttgcgggtgaacgcccgccagctgcgcggccacgctgatcatgtacagcgggcggttgcggtcggttcggtcgctcatcaccagctcctcacatcatcggtcgtagccgctaaataatcttccatggccttcttctggccttcgttcatctccttgggcacgaccaccttcacggtgatcttaaggtcgcccgagccgtcgcccttcaccttgggggcgcctttgcccctcaccgacaacacggtgtcgtcctgcgtgcccttcggcacgcgcacgcgcaccttcgtgccgtcgggcgcgggaaccaccacgctggcgcccagtgcagcttccgccacgctcacgggcacgtccatcagcacgtcggcgcctttacgggtgtagtacggatgcggatcgatcttggtggtgatcagcaggtcgcctgcagcaccgccgttctcgcccgggccgcccttgcccttgaaacgcaaacgcccgccgtccacggcgcccgccgggatcttcacagtgagcgtctcggactcgccgcgaccgggaacgcgcacggtcacgcgcttctcggcgcccttgaaggcctcgtcgaacgtcacgttgagggtgacgttcatgtcctggcccttgcgcggacgcggctggcggccgcccccgaaaccggacatatcgttgaagtcccagtccgttccgaacgcgccttcgccgtggcggatgctttccaggatgtcggcccagctgccgaagccgccgcccgcgccgccgaagatgtcctcgacgttgaccgagccgccgccccagccctgggggatctggttctcgttcgccgtgccgtactggtcgtagagcttgcgtttcttgtcgtccgacagcacctcgtacgcttcgttcagctctttgaacttcgcctcgtcgccgccggcgtcggggtgatgggtgcgcgcgagcttgcgaaaggccttctttatctcgtcggccgtcgccgtgcgtggaacgcccagcgtcttgtagtaatcaggagtcgccgccataaaacgctccacctcctcaatctatcgagtaaaccaaaagcgggcagcctcttggccttgcccgctctggtcgttt

SEQ ID NO: 9608 - DNA, 468 bp, Unknown
  gut microbiota DNA sequence
atcggccgtcgccgtgcgtggaacgcccagcgtcttgtaatagtccggagtcgccgccatccgctccacctcctcaatctatcgagtaaaccaaaagcgggcagcctcttggccttgcccgctctggtcgtttgcttttacttttccgcgtcttcctgcggtttctcccgtttgggaccgccggaggtgacggttaccattgcaggcctgagaactttcgttcccatcttgtaacctcgttggtatacctcggacaccgtctcgtcgggcacgctggcatcgtccaccgtggccaccgcttgcgcttccagcgcgtcgaacgcttcgccggccgggtcgataacctcaacgccgtccttcttcagcacgtcgacgagcttcgcatgcacggcctttacgccgtcgaacaggccgccttcgccgttcttcgtcgcgtagtcgatggtgcgctcgaagtcgtcgatgacg

SEQ ID NO: 9609 - DNA, 1155 bp, Unknown
  gut microbiota DNA sequence
ctccagcgcgtcgaacgcttcgccggccgggtcgatgacctcgacgccgtccttcttcagcacgtcgacgagcttcgcatgcacggccttcacgccgtcgaacaggccgccttcgccgttcttcgtcgcgtagtcgatggtgcgctcgaagtcgtcgatgacgggcagcaggctggtgaccagcttctccgtcgcgcgcgccttctcgacctcgcgctgctcggtggtgcggcggcgatacgtgtcccactcggcgtgcaggcgcaggtacttgtcctgccaatcctgggcctccgccttggcctgagccacctgctcgtcagccgaagggccggcgtcttcgatgacctcggcctcgatcgcctcgccttgcggcgccgcttccgcggcggcagcgtcggaagagggggtttccttgctgccgctcgcgtcggcgggccgggcctgcggctgggctttcgcatccgcaggacggtcgtcttcgatgggaatgctcttgcctgcgccttgagccgcgcgctcgggcgtgggctggttgggctgggccatagcgattacttcccttccttcttgtcgtcgtcctcgacgacctcgtagtcggcttcgatggtgtcatcggccggggtggactcggcggcagcggcctgcgaagcggcgtccgggccctgcgtggagtacacgacctcggccagcttgtagcccgcctgctgcatcttctcggtcgcggccttgatggcgtccatgtcggagccctcgagcgcctgcttcgcctcggcgatggcctcctcggcggcggacttcacgtcggccggagccttgtcgcccacttcctggagcgtctgctcggtggcgttcaccaacgcgtcggcgttgttgcgaacctcgatctcttccttgcgcttggcgtcttcctcggcatgggcctcggcgtccttcaccatgcgctcgacctcgtcgtcgttcagcgcggtggagccggagatggtgatctgctgctgcttgccggtgcccaggtccttcgccgacacgttcacgatgccgttggcgtcgatgtcgaaagtgacctcgatctgcggcacaccacggcgcgcagccgggatgccggtgagctggaacttgcccagcgtcttgttgtcggaggccatctggcgctcg

SEQ ID NO: 9610 - DNA, 571 bp, Unknown
  gut microbiota DNA sequence
gacgccgcccatcgtctccacgcccagcgacagcggggtcacgtcgagcagcaggatgccctcgacgtcgccggccagcacgccgccctggaccgccgcacccatggccacgacctcgtccgggttcacggacatgttcggatccttgccggtgagcttcttcacgaggtcctgcacggcgggcatacgggtggagccgcccacgaggatgacctcgtcgatgtcgcccgtcttgaggccggcatccttgagcgcctgctcaacgggcttcttcacgcggtcgagcagatccttcgtgatgcgctcgaactcggcgcgcgtcagcgtgtagtcgaggtgcttcgggccggaagcgtcggccgtgatgaacggcaggttgatgttggcctgcgtggtggaggacagctccatcttcgccttctcggcggcttccttcaaacgctgcagagccatcttgtcctggcgcaggtcgatgccgttctcggcctggaacttgtcagccatccagtcgatgatgcgctggtcccagtcgtcgccgcccaggtggttgtcgcccgcggtggacgcaacc

SEQ ID NO: 9611 - DNA, 2683 bp, Unknown
  gut microbiota DNA sequence
accgttggcgtcgatgtcgaaggtgacctcgatctgcggcacgccgcggcgcgcagccgggatgccggtgagctggaacttgcccagcgtcttgttgtcggaggccatctggcgctcgccctgcagcacgtgcacctcgaccgacgtctggttgtcggacgcggtggagtagatctcggtcttgcgggtggggatggtggtgttgcgctcgatcatcttcgtcatcacgccgcccatcgtctccacgcccagcgacagcggggtcacgtcgagcagcaagatgccctcgacgtcgccggccagcacgccgccctggaccgccgcacccatggccacgacctcgtccgggttcacggacatgttcggctccttgccggtgagcttcttcacgaggtcctgcacggcgggcatacgggtagagccgcccacgaggatgacctcgtcgatgtcgcccgtcttgaggccggcgtccttgagcgcctgctcaacgggcttcttcacgcggtcgagcagatccttcgtgatgcgctcgaactcggcgcgcgtcagcgtgtagtcgaggtgcttcggaccggaggcgtcggccgtgatgaagggcaggttgatgttcgcctgcgtggtggaggacagctccatcttcgccttctcggcggcttccttcagacgctgcagagccatcttgtcctggcgcaggtcgatgccgttctcggcctggaacttgtcggccatccagtcgatgatgcgctggtcccagtcgtcgccgcccaggtggttgtcgcccgcggtggacgcaacctcgaacacgccgtcgcccagctccaggatggacacgtcgaacgtaccgccgcccaggtcgaagacgaggatcttctcatccttgttggtcttgtcgaggccgtaggccagcgcggcggccgtgggctcgttgatgatgcggagcacttcgaggcccgcgatcttgccggcgtccttcgtggcctggcgctgcgcgtcgttgaagtacgcgggcaccgtgatgacggcctgcgtcaccggggagcccagctgcttctcggcgtcgttcttcagcttctgcagcaccatggcggagatttcctccggcgtgtagtccttgccgtcgatgtcgaccaccgcgcggccgtccttgcccttctgcagcttgtagctgacggtcttgcgctcttccggcgtctcgtcgtaggagcggccgatgaagcgcttcacggacgacacggtgttctcggggttcgtgacggcctggttcttcgcggccttgcccacgacgcgctcgccgtccttgcggaagccctcgacagacggagtggtgcggtcgccctcggcgttcacgaggatttcgggctcggaaccctccatgacggccatggcggagttcgtcgtgcccaagtcgatgccaagaatcttgctcattatctgcttcctctctgttggagttgttacctaagtaagtcgttagcagtcggtttctgtttatgcgccaaagcacgccctgagggcgcactcggtggacgaagggcggcggcttggagatgcgatccgcaagctcaacctcgcttcgacaaattggactatataatctaagtctcatgctgtcaagttagttaccaatttgtcatataagttttgttaacgtcccaaactatagctatcgaatgcctattgcgctcctctcgcgccgcaccgttacgccgcttccacgcacttgtttcccgaacgcaaagaacccccgcctcatgaaagagacaggggttctcgttgcgcttgtcgaaagcgaatcgagcgggaggttagtcctcgatgacctcggggatcgcacccatggggcactcctcgacgcagtcgccgcacgcgatgcaggcgtcctcgttcacgacctcagcgacgccgccgaccacttcgagcacttcctgcgggcaggcatcgacgcagatgccgcaaccgatgcactcatcggcttcgataaccgggtgagacatagttaactccttctcgtctaaagcattccgacgggatgcgtcgggtcacttccccaaaaactttatgcccgcaagataccattgttgtccgcaaatgcaagaagaaatggcgaatttctcagggtgcggcggcaaattctctatcgaaagcgccgccgctttcatgccccgaaaggcgctatcgaaggcctttgcgcatgtcagcgctctcttccatacgcatgagggtgctgcatggagagcttctagcaaatgcgcggcaattgctcgcccaccagcatgtcgaggatgcgcgtaccgccgaacgccgtgcgcaggaacaccttggagccgcgctcgggacgggcggccgacacctcgccgatgatggccgcatcggcgccgtaccggttcgcgcgcatggccgcgagcgctgcgtcggcctcctcggccgccacaacgcacaccatcttgccctcgttcgccacctgcagcacgtcgtagcccagcatctcgcacgcgccccgcacggccggcttcacggggatggcgtcttcctccaccgtgatgtccgtgttcgactgggcagccagctcgttcagcgtggaggccaggccgccgcgcgtcgggtcgcggaagcagcgcgtgttcggcgccgccgccaacacctcggcgatgaggtggttgagcggggccgcgtcgctttccag

SEQ ID NO: 9612 - DNA, 157 bp, Unknown
  gut microbiota DNA sequence
cactttcgtgtcgccggtgaccagatgcacgccggcctcctgcgcgcattccgccatggaggcgcagatgcgcttgagatcctcaatggggaagccctcctccagcacgaagccgcagctgaggtagcgcggcacggcgccgctcgtggccacgtcg

SEQ ID NO: 9613 - DNA, 36047 bp, Unknown
  gut microbiota DNA sequence
taccttcgtgtcgccggtaaccagatgcacgccggcctcctgcgcgcattccgccatggaggcgcagatgcgcttgagatcctcgatggggaagccctcctccagcacgaagccgcagctgaggtagcgcggcacggcgccgctcgtggccacgtcgttcaccgtgccgcacacggcgaggcgtccgatgtcgccgcccgggaagaaatgcggcgtcaccacgaagctgtcggtggagaacgccagccgctcgcccggagcgggcgcgggcagcaccgccgcgtcgtcgccgcgcagcagctcgtcgccggcgtacgcggcgaagaacacatcgtcgatgatgcgcttcatcatcgtcccgccgctgccgtgccccagcatgaccgtggtatccataaagctccttgcccttctcgtgagtcgatgcgaacgaatgtttcacgtgaaacaccgcccgtcctgcaaagccgacgagggtttccgcggcgcccgagatcgctccgcttcgcggccgcgcgtgcttcgcgcgcaagggaaagcgagcaaatggcgagatcgggtgccacgggaagccgcagcgtcgacccgttccgatagccggtaggccgccggaaccgtatacctatatatgctgccccgtcgtggtgaccacgagacgaccgttcttcacgcccttcgtgcccaggatgaggttcgcgatgtcctgcacgagacccgtttcgccgcgcagcacgatgacctcaaggcaatggtgcgcgtcgagatgcacgtgcatggacgagatgatggattcgaagtaatcgtgctggatagcgtgcagcttctcctgcaagtcgctggcgtgatggtcgaagacgatggtcaacgtgcccaccacctccatgcccggcgtggagcactcgtcctccaccaacgcgtcgcgcacgaggtcgcgcaccacttcgctgcggtttttcgccagcccgcggcgcgcgaccagctggtcgaagcgaacgagcagctcctcgggcatagccaccgagaagcgcatgagatcgttgctcatacgtgcggcgcctacacgaggttgacggtgacgttcgccgaagcttcggcatcgtcctcgagggcatccttggcctcgtcgagcagcgcgcgcacgtcgtccagcatggcctgggcggcatgcatcttctcggaaacggtggcgaagccggcgtctcccgccatatgccccaggttgtgcgcccagcgacgctccaacttgatatgatcgtcgatctgctcgatcatctgctcgaattgccctgtgttgattccgttcgtgcacatacgcgctctcctatcgtgatgccgccgcagcgcccatgccgcggcgggcgtttcttgctatcattacggttatacggcgaacctatctcgaccgcaagggatcgtgtgaaaaaatctgcgaatggtaacatgtacgaagtggctctcgacgaagcgtgggagctgttcgacgagcaccttgatggggcgcgcttggcgctcgtgtgcgtagcgagcggaagcgccctgagcgagcgcagccgagcagcgctgaacagcgcgatggcttcgttgggatacggaagcggcgcgtgcacgttcgccgccgtggaagggctggacgaccaggcgctgttcctgctggtggaggggctcgacccgctctgtctgatcgcgaccgattcgacagcggccgccgcgctgggacgcgcgtaccgctgcgaggttcccttgggaaagcccggccgcgcgttcgggcgcagcgtggtggcattccgcgacttcgacgcgatgctcgacgacgggcaagacaagcagatcgcctgggcgctgctcaagaagctgccccgcttcggagaataggaaacgccccgaaagctcgatgcctccgaggcgttctacgtacaaatgtttcacgtgaaacattcgcttcgctcttcgtttaggacacgaccacgctttcggcggccttcaggaggtcgtggacctcgtccaccgtctcggcttcagcgtagatgcgcacgagcggctcggtgccggaggggcgcatcatcacccacgcgtcgccttccaggtagaacttcacgccgtcgcgacgatccacgtccaccacctgcttgccgcagatctcggcaggcgcgtagttcggcacgatctcggcgcggaagttcgccatctgctcgtcagtgatcttcaggccttggcgctcgaactccagcttgcccaccttctggaacatatcgtccaccaactgacccaggctcatgccgcgctgcgccatcgtctcgcacaggagcagcgccatcagcaagccgtcgcgctccatgacgtggctggggatgccgatgccgccggactcctcgccgcccagcatgacgtcgcccttctccatctcggcgtagatccacttgaagcccaccggcgtgctggtcagctccaggcccaagcgcttgcactggcgagccagcatggccgacgcggtgatggtggacacgacgcgaccggtgaggcccttgtcctcggcgaggtgcgaggtaagcagcgtgatgatgcgatgcgggttcacgaagttgccgcgctcgtcaaccgcgccgatgcggtcagcgtcgccgtcgttgatgaagccggcgtcgtaacccagctcgggaaccttcgcgatgcagcggtcgacccagggcggaataggctcggggtgcagtccgtcgaacgtcggatcctcggcgttgttgatctcgcacacttccacgcccagatcgcgcagcagctgcgccagatagatgcggcctgcgccgtacagcggatccaccaccacgcgcaggttggcgttgcggatggcctcgacgtccacgcgctccttcaaggtggcgaggtacggggtcatgaggtcgaccgtttcgaacgcaccgcgcgcgtcggcgggtgcgtcggcgaacgcagcctccacgcggtcggtgaactccttgcccgccgcgccgccgtcgttcatgcgcagcttcacgcccaggtattcggccgggttgtggctgctggtcagcatgatgccgcccaccgcgtcggcgtcctgcgccaccgaccagcacagcgtaggcgtggggcagtagtcctgcgtgagcagcacgcggaagctctgcgccgccgcgacctcggccgccagctgcgcgtaagcgtgcgcatcctgtcggcaatcgtgaccgacgatgagggtgccgggcgcgtcggccggacggccggctgcaaccgcgtcctccttgaacacgcgcgcagccgcgtcgatgacgcgcacgaggttgtcgttggtgaagtcctcgccgatgatggctcgccatccatcggttccgaaatgaatttctgccacggagcttcctttctcaaagcctgttgctcaccagtatagtcaatcggccgagcaaggcgcggtttcgtcgcaaaatagacaggggaacggatgtttcacgtgaaacactcgcccgaacacgaaatgcatgtaaagcctccccgaacaaaacccgtgccgtcctgatacgacgacgagcacatacagcacggacgacctgcacagcaacggacgacccatccgcctctattttccttcgccaaatgcgatgccggtcatccgacgaggcctccgatggcaaaaaagcatcgaattcggaagcccggagtcgtgccttacacgcgccgacgtcacgccgaaaacgctcgccgcacagagcaccaggttacaggcgagacccctttcgccttcgcgcgaaaagtttgcccgaaagacgggatgatttccgaattcggttgctttttgccatttcgagcgagcaggctgactaaggcgcccgcaaaggaaggcaatcccgagcatgatgcgccaagcaaggaaccgaaactgttgtttcgcatgcagaaaccgaggaaggcatgctccgagggcgaggggcggaccgagaggcgaaggagaaggcgcacaggcgcaacgggcgcacgtcgcgcaaaatgactccgaaagcagcacaggccgcggggggaagcggcctgtgcttggacgagtgaaacgaggagaaccgttggagtcggtgtgtccacgagtcatactttacgacgtttattatcctgtgtcaagaataatattcctgccttttccgaatgtttcacgtaaaacattcgtgcggcttcccgcggcgccgcacggggccccgcgcgagcccgtgcggccttgccgccgagcggaacgcgggccatgtgccttttgctgaatttgcgcgcgatctgttccacctgctactatggcaacagtcagtaccgagaggagcttcaatggcgaacaagagcttggccaaggatcatgccgatatctgcgtgctcgtaacgggcggagccgggttcatcggaagtcacacctgcgtcgaattgctggatcagggctaccacgtggtcgttgtggacgacctgagcaactcgagcgagctcgcgcttgaccgggtgcgacagatcaccggcctggcggcaaacgacgaccgcctgaaattctacgaggcgaacatcctcgatcgcgcggcgctcgaccgcgtcttctccgagaacgacgtggacgccatcatccacttcgccggcttcaaggccgtgggcgaaagcgtgcagaagccgctggaatactactggaataacttcgcgggcacgctggccctgtgcgacgtggcccgcgcgcacggcgtgaagaacctcgtgttctcgtcgagcgccacggtgtacggcgagccggagttcatccccatcaccgaggattgcccgaagcacgacgccacgaatccctacggctggacgaagtccatgctggagcaggtgctgaccgacctgtacgtgggcgacgacgaatggaacgttgtgctgctgcgctatttcaaccccatcggcgcgcacgagagcggcctgatcggcgaggatcccaagggcatccccaacaacctgctgccctacgttgcgcaggtggccgtaggcaagctggaaagcgtcggcgtgttcggcgacgactatcccacgcacgacggcaccggcgtgcgcgactacatccacgtggtggaccttgcgcgcggccacgtggcggcgctcgactggatgggcggcaaagtgggcaccggcgaagcgaaaacggccggcaccatggcgggcgaaccggcagcggacggcacgcgtcgcggcgtgggcattttcaatctgggaaccggcacgggctccagcgtgctggacgtggtacattccttcgagcgcgcctgcggacgcgagctgccctaccagatcaagccgcgtcgcgcgggcgacgtagctgtaaactacgcggcctgcgacaaagcgcgcgacgagctgggctgggtcgcgcagtacgacctcgaccgcatgtgcgccgacggatggcgctggcagtcgcagaacccggacggctacgcgaccgctcgggcctagaccgaatcctcgacgcggccctcgttcttctcgtcgtacatggcccgatcggccgcgtcgaacagctcctgataggtagcgccatcctgaggatagcgcgccaccccgacgctcaaagcgatgggcacccccaacgagcgcgaggcttctgcgatcaacgaactcagagcctcgcgcttcgcttcgataaccgcatcgtcgtttgcgcccacgaggaacgccacgaactcgtcgccgccgacgcgccccaccggatcgcgatgacggaacacgtcgagcaacgaacgcgccacctcttccagaacccggtcgcccatgctgtgaccgtattcgtcgttgacctgcttgaatcgatccatgtcgatcacgaacagcaagcccctgcccgtctcgggcagcaatgccgccatcttctcctggaacgccatcttgttgaacgtcttcgtcagcccgtccatttgcgacttgcgcgtgagcagctcttcggtttcgcgctgtttcgtgatgtcgacgatctttcccacggccatgtacggctgggaaccttcgtacagatacaggcacgtgaacgagaaccaacaatattcgcccgacaacacgcgtgcgcgacaggtgatggtgcgcagctcgttcggcggcgcagggttttcgaacgccatccggacacgcttgtaatcatcttccaggaaatcgatgagaggaatgcctttggccaggtagccttcggctgaaagggagctgagggagaacatcccgcgcgcattcggcgtcagctcaagcgtgtcgcgcggataagaatactcgaacagcaccgtgtcggaaaattcagcgaggacctcgtaacgctccgcactgcgacgcgcccttttgcggatgcggccaaccaccagcgccacggcaaggcatgccgccgcgctgatgacgataagcagcgcagccgtgtacaccgtcaaacgcagaatgctctccgaatgctcgaccaacgaactttcctgcgtgaagttcacgatagtccaatcgttcacatcgaggcgaatagacgtgagaaaggtcatgtagccgttctgcttgcccaacatgaccgttgccacatctcgctcgttctcgatgctggcacgtacatcggcgatctgatcggaagacacgccccttccctcaagcacctggtacagggtggatccctcataaccttcgaattccttcgacacgggaacgacggttccgtcctctttgatcagcagcgtgccgagcagcgtaacctgcgagctcgcctggctcgtatccagaagcttctccgctttcacgatgctgcgcagcacgccgaccacgcgcccgtcgcgattgacgggcttggctatgctgaagtagtagccgttcaggcggttcgacttgcgcacgtcggacaccaccgtctcgcctgcgtacagatgccgaagcgtttcctcgtctcgctcgttgcgattgctcgcaacgccctgctccagctcctcgattggagtataggtaacctggaacgacccctgctggttccattcctccagatacgcagcgaacgtcgagccggaaggatcgatgtccggggactcggccaacacgcacatggtggagatgacggagctcacctcgctgatgaacgactcgacttccaccttttgcgcagccgtgtagtcgtccatgctgacgctggctaaatcgtagaattcgtcgctgagctcgttggagtagacgcggaagatcgcgaacatcacgaggcaaaccgcgatgatggagacgatcacccctatcacggtgcgcaaagagctggcagggccgacgcccttgttctctttcgcatgttcgtgattgtgtacgtcgctcatgtctttgcgagccccatccgtctttgcaaccggtgatcaccagtatcccgcagagggtacgaaaactcaacaggagagccgaagctcaacctaccggttgaggagccgattaaaaagcggcatcgatcgaagccgatgccgcttgcgcagttcgagaatcccaacgagacgccggctaagcagcggatgccgtcccgtcgtaggcgcccggatcggtatagccggggtcgtatccgcctgcaccgtcggtaccgcccgcgccgccagcaatagctccgttgtcgtacccgccggttccacccgctccaccggtgttgtcaacgtaaccgttgtcaacatagccgccgttgttggctcctccggttcccgatgcatcggtgtagcccggatcgtaataattggcgtttcctgcgccgttgccggcgcccgaaccagtgctgccgtaaccgttgccgtacgtgctggcaccgcctgcggtgtcgcccggatcaacgtatcctgacgagacaaccgagctcggatcctctccagcctcaaccagcttcatcatctccttcgtcgccacgggatcgttgatgacgtacgatacgtcgccgatcatcgccgtggtagaaggaaccatcgcagagtagatggtaagctcttcgtcgccttggaactgttgcgccagcgcagcaatatcgcctaccgcaaggtcggtggtcacgcagttcgacgcagcttgaacaacacccagcaactcggttgtgttcatcgccagcaccttgttgacgatagccatgatcagcttgcgctggttcgccgtgcgcgtgaagtcgccgtcagcgtaagcgcggctgcgcgcgaacaccagcgcttggttgccgtcgaggtgctgctcgccttcctcgatgatgacgcgcggccactcgggatgagccgtggtaccgtctgcgtcgggatcatcgacgcgctcggtcacttcgacgtccacgccgccgactgcgtcgaccaattccttcaacttgccgaagttcacttccgcgtagtgcgatatctcgatgcccagcagctgattcgcttcgcggatggttccggcagcgccgccgtaagcgtaagcggcgttgaacttgttcgtcccgtagccgtcgatgtcgatcttcgtatcgcgggggatggataccatcgtggcctggttctttgcaggatcgatgcgcaccacgatgttcgtgtcggaacgatgcatgtcctcggtgctgtcctcggcctcgtcggtgccgatgaggatcatgtagaagggctcggtgaaggtcatgtccttttcaggcttgagcgcatcgttgatggccatgatctcttcgtcagacttgtttcccttgatcagcttctcgttgacggagttcttccacaaggcgaacgccgaaccgccccccacggccaccacgagaatcgcgatgatcacgccgagggctatcttcttgccgcgcccggctttcttgcgggctgccgagtagcttggattgttgcgcgaatattgacttgccgcagtctgccgggcgtacgcgccgttcgcgccggaaccttggctgccgggcgtgtaggccgcacggtacgaagagccatcgccatacgcatcgcgggagaaagcgcttgcctggctgtacggggcgatgcgacccgactgcgcggccttggccgaccgcacggcgcgagcagactgaggagcccgcgatgagcgcgcttctttacggttcgttcgagagtttcttgacgccatatggtctcctcatcgactccgaacacgtctgccaaagcaggcaccgtacgtcgcgtacccctcgcgacacagcgcttcgattgtcgaagccttcattttctcatacctacgagaacccgctttcgccggcgattacaccatttccgcaacataacccgaggtcgacgcgcatagattctcacgtatggcaaatattgtagcatcgttgacctaccatcataaaataggcatgggctgggtacaaaccgcacattttctaaaaatgaaccgaaacgtattcatgcggttacagccttctgctcgcacgccggtactctagtggacatgcaagccgagcacgaacatagtccgctgaatgatgacgagcctgatcagagcaggttctctcccgtgcttggcgagaacgtcagacgcatgcgctcgtacagcaacatcacgaaaacgcgcctcgcgctcatggtgagcataggtcgcccgctgctcaataggatagaggacggcacggcggacgtacggctatccgtcgtcacgaaactggcggattcccttgccacgacaccgagcttcctgctggcgaagcacagcgatgaggacatccgccacgaaatcgcccatcggaaagcaagctcccccgtcgctgcggtgcgacacgcgcgcttttactaagagcgggcatctctttttcgcagcaccgcgtacgcgatcccggaacccagcgcgctgcccgcagtatccaccatccaatccaccgggtcgcacatgcgctcgggcacgaacagttgatgaacctcgtcgctcaccccgtacaagctggcacaggcgatggcgatgaggcacgcacgacgcagcggcatgtggcagcgcagcgcgttggccagaagcgcgccgaacatcgtgtactcgcagaagtgcgcgatggacgacagcgcgtccaccccaggccccagcagctgctcctgcacggcctgcattgcccggtagatgctggagaagatgccgagccccgtgttgagacccgtgccggtgttcgaagacatgaagaagatgaggaacgcccacgccgccacgagagcccagctgacgatgacgaaccgtttcgacgggcggggctgattggagagggtcgacggctgatgctccataatgcccgccgcctagcgctcgaccgcgaactgcagcagttcgcgcgcgtcttcgataacgacgtccgcgcccgccttacgcaaggcgtcggcgtggtgatagccccacgacacgccgatggcgaacgcgccggcgttgcgcgacaccaggacgtcccccggcgaatcgcccacgtacgccgtgcgggctggtgcggaccccagctcgtcgatgcagcgcagcagccccgtggggtcgggcttgcgcggaatctcgtcgcattcgccatactgcaccgggaacaagccgggaagataggcgtcgatcacgtcatgcacgccctggtcgaacttgttggacagaacgcccaggccgatgccgcgctgggcgagggcagccagcgtctcttccatatgcgggtagggcttcgtcagcttgttcccgatgacgggatagagctccatccagcggcgcatggcggcctcggcctgctcgggcgaagcatcggcgggcacggcctggtacatgagcgcgcgggctccgttgcccacgaagctgtggatctcgtcggccgtgcggctggggaagccctgctcgttcaaggcggcgttcgtcagaaccaccaggtcgggcagcgtatcgagaagcgtgccgtcaaggtcgaacacaaaggtatcgaaacgagccatgtcaatctcctcgctaaatgaaaaatccaagccgaagcttggatcgtaggttcatggagcgggtgacgggactcgaacccgcgaatacaagcttgggaagcttgggccttaccacttggcgacacccgcatgattgaggattatagcgcaagatgcgcgaagtgagaaacagtaacgaaaattcgcgcactgaccacgaataccggaacttgaattttctatcgcaggcttcgccttcaaagctgcgcttgaacctgcagacggatccgagccggacacgagaacctctaggccgaccggccgatacgcccttttagccgcgaaatcgtgtagcataacctcgtctcctggccttttgagtcttgacgggcggaaaaggccatgtcgtacgctcttttcgcaaccccgctgtcaagccaacagcaactggccccgaggtcgccccttcccccgacgatttctctgcgggatgccgcccgcccaggcctcgccgaggtcggcttgacggcggaagcggctccccatggcaagaaaccatcgaattcggaagttttgcgccgggctccggacgcgccggaaacccttcttccgcatagcgcctggtcgaagggaggcgagcttccgcgaccgcgcgccgcgggcggcgaaggcgcgcgccctcttccgaattcgatgccttttcgccatcacgggcggctcgccttgctcgcacgcggcccggacaagcggtcctggagcgcgaggaatgtttcacgtgaaacatccttacgagaaaacggaacgccggaaccgggcgagcgatggacggcgccgacgcgcgaggtgtttcacgtgaaacatccggaaagagggcgatgcgccgacgctggagaggcggcgggcagagcggcgtgcacacgcggggcaggcggctgatggcggaaggggcatgggcgcaggcgggcgaccaaccggtcggaggggcggcgcgggacgcgaccggcgcgggcggggcgggagaacgggaggccgacgtccggacgggcggcacccgggcgcccggatgtttcacgtgaaacactcccagctccccgccccttctgccgtcaacgcgcgcggcgctcgtcctcgtccgcacctgcgccttcgagcgcgaagacgtgggtgcagcactcgcgcatgaactcgttgtcgtgcgtgatgaccaccacggccgccccctcctcggctgcgcaacgcagcgcgtcggccaaccggcgcatgctgagggcgtcaagcccgctggtgggctcgtccaggatgagcaccgaccgcctcgacgccagcccgcaggcaatggacagccgctgcttctggccgcctgacagcgaggacggatgcctatcccccagctcggccaggcccaaccggcccagcacatgatcggcgtagcggcgcgccgcgtcgtcctgatccgagaacaagagcacttcttcgtcaacccgggaagagaagaactccatgctcacgtcgttggggctgtaccacacgcggcgacgcagctcccgccgggacagcttccgccctcccacgcgcacgcagccctcgtcgggtcggcccaagccaaccgcgacctgcgccaggctcgtcttgcccacgccgttttttcccgtcagcgccatgatctgccccggttccacggcgaagcagacacaggagaacagcagatttccaccgcgagaaacggccaggccgtccacctccagggacgcggcttccagacgcgcgccgaaagcttcgccggacgcggcccgctcgccttcccgcgcgagccccgcggcaagaggcgcaggcttcaaggaaggccgggggacgaaagcagggctgcgaacgcccatggcaacgcgctcggagccgtccatggcgaacacatcgtcgcgagagagaaccgcccgcatccgcccggcctccatatagcagaaccggtcggcgcactccatcaggtacgagatgcgatgctcggccaccaccagcgcgtagccctgccgcttcagctccatcagcaccgcgcccaactcttgagccgcatcttcgtcgaggttcgaagagggctcgtccatcaccacgagcctcggcgcaggagcaagcgacgaggcgatagccacgcgctgcttctgcccgctggaaagctcgtccaccgctatcgtgcgcaaacggtccagacccaaacggccgatcgccgcatcggtgcgcctcaccacctcctcggcgggatagccgatgttctcgcacccgaacgccacctcgcccgccagctgactggagaagaactgggcggtcgggtcttgaaacacgcttcccaccagctcggctcttcgccacgcctccatatcgcgcgcagaaagcccgcccaagaacacgtcgccggaaacgctgccgcgatagtagcccccggccaggccgttcaagacgcgcacgatcgtggttttaccgctgcccgacgcgcccataagcacgacgcattcgccggcatgcacgtccaaatccacggcatgcagcgtttccggagcgccgtagtacgagaagctcgcgcctttcagctgcgcgacaagatcgccggtcatccgaaccaccctccccgcacaacccagacgcacgcagccagcgccgtcgcgacggccgccaggcaaaccgcgtccgccactccgaaaggactgcgatagtagctcgtccgcctggtcggcgcttcggcggcgcgggcgatggcggatgaggaaaggcggtcggagctgtccaccaacgagaacatcaagggaaccagcgcatgctcgagcgcctgaacggggctgcgcgcgacgtttcccgccgaaagcaccccgcgccttttgcacgactcggacaaacgccggaagctcgagcgaacggtggggaagaacctcagcagtacgagcacgcccacgatcaggcgcttcggaatgcgagccttcgccaacgcggcgctgataagccccggaggggaaagcgccaccgcgaagaacgcaaccatgatgggataggttttgatcgcggcgtaaaaatgaaccggcgagaaaacgatcacagtcatcttcccgtatgcaagcgccaggcacgcgccccacagcgccgcgtagaaaaccagcatcttgaaagccatggaacgctgtccgcacgcagcaaggtagagcagtaaaaagcaggtcagcgcaggcgacaaccgcacgctgtccaccagggaaaccgtcgcgatcgtcgcagccagcacgatggacttcgtcgccatggagaaccgttccccgtcgggcgacgccgacgaacgcccgacggcgcgagcgcccgatgagaaccgctcgtttcggatgccctcctccacgtcagatcacccctgccttcaggaagtgcttcctcatcagacgcttgcccacgagggctcccaggaatccggcgaacgccgtgagagcgactatgaacacgatccattctgcattcccgtagtacttgaggtacgcgttcacgtactcctcgcccatcatcctcacttcggcaagctcttgcaggtacccctgaaggttgaccagtatggggatgatcgacgacagcgagtacagcgcgctgaacgtcgcccacgccgctacgatgcggttcggcttagcccgctgcgcggccgtgcgcaggaacagcgcatcgatagccaaacctcccaccaggtagaacggcagcatgtaccacaggtttccgaacatgaggtacaccagcgccatcacgcacgcgtagaacgccgtggtgccgaagcggttcaccctcataaccatgagcatgtacaacggcgcaaccaccaaaacgtacgtcgccgccatgaacagcatggagaaatccacacccagcatggtaaccgaccccaccacgaacaagacgacgatcatcaaggcgctgaacagcaccgcggtgacgacctccttgacgccccacatctcgaacgcggcccctttgcgggacttcgacgtctcataaggcgaatgttccatatcgacctctctttcccatgcgttttgcatgtcttggttcatctgatgttccggcaccgaacgcgccggatcgaatccgaagcgctactgctcgctggccagccgccaaccggccgcctgctggcgctcgcgccaaaacgaccgataccggccgggcaccttcaccagatcgccgtgggttccctgctgggtgatgcaccccttctctaggacggctatctgatctgcggcggcgatggtggacaagcgatgggctatggcgatgaccgtgcgatcgcgcgccaactcgtgcatagcctccacgatggccgcttcgttttccgcatcgagcgcggccgtggcctcgtcgaacagcacgatgggcgagtccttcagcaaagcgcgcgcgatagcgacgcgctggcgctctccgcccgaaaggcggcagcctccctcgcccacgggcgtgtcccatccctgctccagacgggcggccacctcgtcaaggcgcgcgacgtgcgcggcgcggcgcacctcctcgggcgttgcgtcggggcgccccgccagcacgttctcctcgatggttccgtcgaacaggtacacgtcctggaacacgagggatatctgctgcatgagctcgtcgggacgcatgtcgcgcacgtccaccccgccgatcgaaacgctgccctcggaaacgtcccagaaacgcgcgaccaaccgcgtcagcgtcgtctttcccgagccggaagggcccactaaagcggtcaggctgcgctcggggcacgtcaagctcacgccttgcagcaccggacgggattcctcgtaggcaaagcccacgcgatcgaacaccacgctggatccgcaaggaacgcgggggttgcgggtttcgggcagagggggcgtcttcaatatcccctcggacgcgtccagcgcgttcttcgccacgcgcagcgccatcccctgcgacccgatgagcgtcaaaggatcgaccagcctcaaggagagcaccgctacgaacacgtacgatgccacgtcgatctggccccaggccaaaagagccgtggccgttgcgaacacgacggcgaacacgacctggatcagcatcgtgtagcgcgccacgggtgccgatgccatgcgcaaggtggcaaccgtcgccgcacggtcccgctcgatggcctgctgcaaagcgtcccagccctccaccgaacgcttcgtcgcgcgcaaaacgggctgagcgtgcgcgaactccaacacccgggccgccacttcagcgttcgagagctcctcctgcctatggccttcgcctgcggccttcgccatggcgcgcgaagcccacagcagcagcggagccgcaatcacgaacaccaggccgatgcgccaatccacgaacaggaacaacaccaccaccgcagccggcgtggtgacggcgatcaccatctggcgcaaaaacgtgctaggcacgtccatggccatctgcagctccttggtgagcagagccgcaacctgccccgagcgctctttcgtgaaccaccccagcggcaggcgcacgatatggtcgcccaaggcgtcctgcagcgcatggcagatctgctcgatgccgatatagtagccgcgattgtccgcgaaaaagccgatcacggaatgcaacagcgccagcgccgcagccagcgccaccagataccccgccgcaacgtagtcgcccgctatcagcgagcgcagcagcggaagcagcgccacgtacacggccgcctccgccaggccgcacagcacgtacaggaaagcctgcgtcttcacgccggtcggccgccctaccagatcgtcgatttgggtcgttatcatcgttcctcgctttcgcgcgaatcggcaccgttcggctccgcttcgccatccgcttcttgcggccccgcggccgcgccgcgcatcgcggctccttccacaagtagcgccttttccagcgcatccacctgctgagatcgccacagtgccgcataatggccgtcggccgccagcagttcctcatggacgccgcgctccaccaccttgcccccgaccagcactaatatctggtccgcatgcacgatggtgtccagccgatgcgcgatcacgacggtcgtcctgcctttcgccaacgcgttcagcgctttttggatggccgtctcgttctcaggatccgcatgggcggtcgcctcgtcgagcacgagaataggcgcatcttggacgatggcgcgcgcgatggccacgcgttgcgcctcgccgcccgacagatccgagccttcgcttcccagcaccgtgtcgtagccttgcggcaactccattacgcgatcgtgaatctgggcctggcgcgcggcggcctgcacctgctcgtcggtggcaccgggacggcccaaacggatgttgtccgcgatgctcgctcgcaaaagcatgctgtcctggaacaccacggcaacacgcgaaagcacctcgccggaggccatctggggaagctccgttccgttcatgcgcaccgaccctgaaacgggatcccagaagcgagggatcaagcgggcgagcgtcgtcttgccgctgcccgaatctcccacgagggccgtcaccgttcccggctccaacgcgacgtcgacgtcttgcagcacgaaaggcaggttctcgccgtacgcgaacgccacgccctcgaactccatgcacacgggtccttcggccgccgggcgagaccgctcgggttcggccaacggagccacgttgagaacggaggccagatggtcggcggcctgcagcgacatctgcagcattcgaatgcttcgaaacaggttgaccagccccgcgggaattcccacgcccaacaccagaaaagggacgcaccgctccaaaggcaaaacgccgttcgcgacgaaggccagcgttgcagccagcagaaccaccagcattgctcccggcgagaacaaggccgacacccagctgaacgcgttgccattgcgcttcgtccacacatagcacgctttcgccagctcctcggtagccgcccggtaccgtgcgcccgcacggcttcgggaaccgaaggtcttgatgacggcgatgccctccaccatctccaccgcagcggaggaaacctccaccatcgcttcgttgaacctcttgttgagaggaccgaaatccctcatcatgaacggccacgcaacgcctatcaccacgacgaagtacgccaccagaagaagggcgaagcgaacgtccaccgtgaacaggtacaccaaggggatcaagggcgagagcagcgcggcggtcacgtcgaccggcgcatgcccgaccgattgatgcaggttgagaacgtcatcggtggcagcttgcttcacctgcgccgagctgttgtcgttgaaccatcccagcggaatcttccccaagtgctctatcagcacggtgcgcacgtgaacgcgaaaatcggcgtcggcgtaatgacagcggccggtggccatgctgaacagcatccttcccgccgccgcgcccgcgacggcgaccagaacccacatcgccagcacgtcggacgggggaacgccttccgtgatggacagctgggcaacgcgcgcgattgcgagataggggacgaactcgcacgccgacgacaaggccgcgatggcgacgttgcctatgatcctccctttcaccggctcgatcagacgcagatacgtgcgccgagcggcggcactgtcgacagattccataagcggcactcttttctctctcggaaacaggggcggcggcggggcaagccggccgatgtgcagatattagccatagctaacttcaagaaatgattttggggatttcaccacataatctacatacattcttattccgcacttgcatgagtcggaaacaacaagtaagttagacatggttaacatatagcgagcagacccgctcccgacgttcgggcggcttatgcccgacaaggaaagcgaggaaactcatggctcgacaggttctacagcaagacaaacgcgcgctcatgctcacgcaaacgcccggcaagctcatgatgtcgctcagcctgcctgccatcgtcggcatggcggtcatcgggctgtacacgttcatggacgccgtgtacgcaggacagcttatcgggatggaggccatgggagccgtggccgtggcctacccgttcacgttcatcaattccggcggcgcttcgatgatcggcatggggtcggcctcggtgctgtcgcgcgccatcggcgcgaaagaccagcgcaccatcgaccaggtgatgggcaacctcgtggtcatgaacctggtgctgtcgctcaccgtcacgatcgtcggcacggtgttcgcgcgcccgctgctggccctcaccggcgcacaggggcaggtcctcgacctggccgaatcctacctgcgcatcatgctcgtcggcagcctgttcgtgaacttcgcgcaaagctcgaacatggtcatgcgcggcaaaggcgagctggcgcgggccatggccatcatgggaggaggcgccgtcctcaacatggtgctggcccctctgttcatcctggccctgcgcgaccaagggctcggcatccagggggcgggctgcgccacggtgatcacgcagatgatccaagcgggcgtcatgctgtggtggttcgtcaagcgcgagaagacggcgcgtatcgtccgcgtggccgtttcgcccgcgatactccccgaagtgctgaaggtgggcgcgtccgccatgctcatgcaggtgctcgtgctggtacagcaagccatcgcctaccgcgcggccgccgcatggggcggcgcggaatggcaggtgctgctgggagctgcgctgcgcatccaggcgttcgccttcatccctttgtggggcatgagcaacggcctgcagcccgcggccggaacgaactacggcgccggactctacggtcgcgtgcgcaagctgacgatcgtcttctgcctgggctcgatggcgctggcgctgctgttctgggtacccgcgatgctggcgccggaagccacgctgtcgctgctcgtctccgacccggccgtcgccgcgatgggcgccgacgatttcagggtgttcttctccacctacctggttgcaggccccatggtcatgggcatcacgctcttgcaagcgctcggacaaggcggcaaggcggcgatcctcacgttcgcgcgacccgtggctctgttcgtcccactcgtgctgatcctgccgaacgtcgcagggctcggcatccacggcgtatgggccgcatcggccctgtccgacggcgtcatgatcgtggtggcggcgttcatggtggcaagcgtgatccgcaacctgggaaaggacgaaggctccgcagctgaccgcgtgaccatggaagaggaagccgcccgagcctagcgggccggcgcgccgccctcttgccgctgccgtcttgctcgtgcatcatgcaggcgttaccctcgaagagctggcagcgcaacggttctgcgcatacggcatcacgagcaaaccgcccgatgtttcacgtgaaacatcggggttcgcacgctgccccgtcgcctcgttcagccgcaaacctttccgagcacgcatgcaagcccgtctatgtcgaccggtttcgccacatgggcatccatgcccgcatcgagcgcggacttcacatcttcggcaaatgcgttggccgtcagcgcgacgatcttcacttcttccgagcgggcgctgctgcaagcgcgcagagcgcgcgctgcctcgtagccgttcatcaccggcatcatcacgtccatgaacaccgcatcgtaatatcctgccgggtgcttcgagaatgcatcgatcgccttttcgccgttctcggcccactccactttcgcgccgcggcagccgagaagctctatcaatatctcagcgttcagctcgttgtcctcggccaggagaaacctcttgccctcgaatcgataggaggtgctctccggcacgacttcaagcggcggacaagcatccgccgacgagacgacgcgaagttccaatgtcacgcgaaacgagctgcctcgtcctttttcgctgtcgacctcgacaatgccgcccatggcgtcgatcagcgccttcgttatggacatccccaacccggttccctgtatccgcgcgatagacacctcttcgctgcgctcgaacggatcgaaaatacgctcgacgaattccggcgacatgcccatgccgttgtcggttatcgtgaaagcaacgctcgcatagctgggccgcgttttcgccagctcctgcacgacgagggctatggagccgccctcctgcgtgtacttcaccgcattggacgcaaggttcaaaaggatctggcttatgcgcagctcgtctcccgagaacgccttatgcttcatcttcgagcgatcgatgcgcagctcttgactcttcgcctgagcctgaggacggatgatggcctctaccccgcccacgacgtcatcgatgtcgaaccgacgctcctgaagctccatctgcccgctttcgatgcgcgacatgtccagaacgtcgtttataagctccagcaaatgacgagacgacgcggtgatggcatcgaggcaaccggctatcttctcgctggcctcgccgctttcccgtgcgatcttcgtcatgcccacgatggcgttgatgggcgtgcgtatgtcgtgcgacatgttcgcaaggaactggctcttcgcctcgttcgacgatcgtgcgatatcgagcgcctgctcgagcatcaaacttcctttttgctcgttcgtgcgatcggacagcaccagcacgtacttatccacccctttgatggattcccggtacaacgtttcctggtaccagcgacgctctcctgtgcgcgcttgaatgcgctcgcgaaacacttgaaggcactcgccctcttccaacgacgcaatgtcatcgattcgagggtcggacgatggatcggccgccgaatccgacagcgctcgtatgttgttcttcaccgcttcgaccgacacgcccaaaagcttctccacattgggactgacgtattcgacctcgtacgcatcgggagagaacataacgtagatatcgtcggcattgcgcaccagcatgctgaacagctgctcgcggctctcgatggccagctccttcgcatcagcccggcgccgcacgcggcgaagcagggtcagcaaacccgccaacccgaagatgcgcgtccagcgcgcattcggcgctcgcttcatgcgtcagccaatctctgagccatcgacatcccctcgatcaaaccgacctgcctgagtgcagaaattgttatacctgatcaaacatagccttattgcatgcggtgtcagagtatagcaccctattgggaaggaggtaaaccgtcggagcccgccgcggtcctagggcacgatcgtgcggtcgacgtcaatcatacccgccctctcgagaaacgcgagcacggactggagcataaggcggtaatacgcggtcatcgattgggagaacccctcgtcgtcggctctgcgcgcctgcccgagagcgatgctttcgagagacgagagagcggacgcgctttctcgcgaagccgcgaacagcgtaaggaaggctccccagcgcagcaaatcgttcagctcccgcagaatcgtctgcaatgcgcaaggctccgtgcattcgatcaaacccgttatgagagccttcgacaccgcccaatccccctcctcgaccgcgagggcgcgttccgcagaagaggccacctcctccgcatgaccttgcacgcggctcaatgcagcaggcagcacggcgcacatcatctgcgccgcatggacgtacgtgcccacatctctcttgaacgagtgatcttccagccagcgctcgctgaacgtcgcattgcccaactgcacgcgcgtgcccaacccgttgacggtgcgcgcgacgcctatgacgttgagcgcgccgtacgctttctgcaccgtggaagcggagactccatactgcgccgacagctcggcgatggaaggaagcagctggccgtcaacgaattccccccgaacgatgcgttccacaagattgcgagctatttgtccgtgcacgaattccaacccggccttcgcattccacgcgtacccgaacgatccgatgtccacggcgggggcatatgcgttctcgagcgcgtcgaaatacgccccgacgcgctgcgcgacgccgcgatacatgcaaccgaaccgatactgcacctcatcagcatcgcgcaaaagcagagaggagaacatccacgtcatcaaacccccgtcgacgtcgaccgcacgcgaggcaaaagggctttcgaaacccggaaccaccggcaccagaccgatgcgctccaagcttgcgaagcacgacgtgaacaacgggttgcctgcctttgccaccaggccgtgcaaaacaatcgatgcgtgcgatatgcgccacccttccgatacgccagagcgatcaacgcgcttcgcatcctgagccaaagcgaaaagatcctcgtcagagcagcatcgagcggctaagtggaacaacgggggcatgaccagttcgagggttctgtagcaatcggcaaccacctcgcgacgcgccagcagcgcacggatgcgaccgtcatccgcgtcatcggccggacggtacgccacgacagcgcgctttcgctcctccacgacaatgtacccgtcggccttcaaagcacgctgcacgtcgcggatggttctgatgcccacccgaaatcgatcgcacaagtcgtgcagcgacggcaacgcgtcgccatagcgcagcgctccctgctcgatgtcgctgacaagctgacgatacacgtactcgaataaggtggctttcttttccaaacctctccttcgccgcttccatgatgcggtattgtaccgcggcggctaccaatcaagcagattgcttatcgaatgaagcagaaaatattttatcggatatctaatgaaatccccggtcaaacagctgctacgacaacgagaggaagcaaacgagcaccgatgtcgattcaccatgctaaacgtggttgacattaaatgttttaccgtctaaactactggaagtcgtcataatttgacgaattcacggggaatgttaggacatggtgttgatgtttgagctgaacgtcaaatcctacatcaagcggaacccacgcttacgccaagcgaagatgggtatgctcatgagcaaatgggcttggaaccgcaaagtctgcccccgccagttcaagcgcttcttctccagcttcacgttgccgaagacttccgcgctgttcgcctcgttcttgaatactcgccgcgttgcgtattcctccgcaaactacggagacgcctcggcaaccaagctcttcatcttcctttcctaagttggtgcccctcgggggaagtgcgcccttcgtcgggtcgcgcttgccttgtatcgttgtgcccgaagtaaggagagaaagggggtgaaggcaggacgttgacgtcctaccttcccggaggatctccggatgcccctaacaaccgatccttctcaccagatcgttgccaaaagtatacgaacaccagccgatctcagcaagagttcggcaagcggtcgcatattttcctccgatctcctatcggtagttaggttccgcatcccgcctcccggaaggcgacgcgaaagtcgagggcacggctcagcgtcactccactgaacatcgttttcaccaggaccgcctcatagcggccagggcgaagcacggtctgcggtggatatcgatccgcaagaatcgtaactgaatcgcggacggtccctgcgaccgaacgcacacaggaggtaaacatggctaccactacagccaaaaagaaggggatccacttcgcatagttcgtcctcatcggcgttctgctgatgatgggtctgtgccgtggcggcatcaacagcggcatgggcttgttcttccagcctatcagcgccgacatgcacatcggcgtgggcgaagtggcaatgatgtcgtccatctcggcattgatcactatgttctggagcccgttcgcgggtcgcctgctcgacaagttcgacatccgcatcatcaccgtagtcgccgtcgccatccaggcgggctgcttcgccgcgctgtcgctggtcgacgcagtgtggggcttctacgcgctggccggcatcatggcgttcggctcggtgttcgccacgcagctggtgggtcccatgatgatcaaccgctggttcaaggataagaacggcctggccatgggcatcatgatgagcttcgtggccatctgctccgccgttctctcgccggtcgtcgcctccatcatcgcatcgaacggctggcgcatgggctatatcgtgctgggcgtgctcgcgctggttatcgtgatcccggccgtgctcatctggttccgcacgcccgagcagaaggggcagctgcccctcggcgccaccgaggccgacatcgaagccgccaagaacgccgatccgaaagccgccgccgaggccgcgaagaacctgccgggcctcacgtccaagcaagcgctgaagacccccacgttctggttcttcttcatcttcatggtgctgctcaccggaacgctggcgttcgcctccatcgttcccaccctggctatcgaagctggtttcgataccgtgaccagcggattcgctatgacggcgtacatgatcggcacggctatcgccgccgtcgtgttcggcacgatctccgacaagctgggccccctcaaggccacgatggtggcgtgcgcgtgcggtttcatcgccctcttgggcctcatcttcttccgcacgaacctgtacatgttcttcggctcgctgttcttctacggctgcctgtccgccacgctgggcgtcatcggcccgctggtgctaggcacgctgttcggccagaaggaattcggctccatctacggcatcgtcatgatggccaccggcatcggctccatgatcctcatcccggcgtacggcttcatctacgatgcgacgggcagcttcacgcccgccctcatcatgatcttctgcttcatcgtcgtctgcctgatctccatgatcatggccttcaagaccggcaagaaggttcaggccatgtggatgccgaaggcgtaaatcagacgcgccacccggcgctttgcgcggaatgcgctgcgcgccacccgtttggttccactgcggggcacgagccccgcagccggcgggcaccggaaacaaccggaccgcccgtcacactacagtccttttgaaagaggaggaaacacatggctctgaaacttctggaaggcatgaaggtcatcgagatcgccgcgttcatggcggctccgatgggcggacgcatcctgggcgaatggggcgccgacgtcatcaaggtcgagcctcccaccggcgacagcaaccgcggcatcggccttgcccgccatatctacaacggcgaccaggccggttgggactccatcaactcctgcaagcgctgcatcacgctcgacacccgcaaacccgaagggctggccatcctcaaagagatgctgaaggactgcgacgtgttcctctcgcatctgcgaccgaaggattccaagatgctgggtctggactacgagagtctgtcgaagatcaatccgaagatcatctgcggcaacacctccggctacggcaccaagggcgagtgggctccccgcggcgggttcgacgcggcctcctacgccgcgcgtgcaggctacgacttggactgccccatcaagggcgacaacccgatgatcccgtacttcggcttcggcgacatccccacgggcacctatctggccatggccgtgctggccgcctacatcgagcagcagcgcaccggcaagggtcaggaagtgaacgtggccctcatgcacgccggcatgtggagcgtgggcgtccccatcgtgaccgccgcctacggcgacgagtaccccacggatccgaactccgtgctgcccctggcccgtccgtacatgtgctccgacgagaaggccatcgccctgatgggcctgcagtggcacaattcctggcctgagttcgtgcatgccttcggcatggacgaagacctcatcgccaagtggcccgactatcagaccgcgctggccgcttctgccgagatcacgccgatcatcaccgaggtgctggccaacgtcacgcgcgacgaggccatcgagaagctcatgaccaccgatatcccgttcgacctctgccagcatttcgccgacctgcaggatgaccagcaggcttgggacgccgggttcttccagggcatagattatccttccggcaagcacatcggcatcgtcaaggctccggccatcttctcgtcgggcgaggccgagttcggtccctccggctatccgggcgagtacacccgagaggtgctcaaggaatacggtttcgacgacgcgaagatcgacgagctgcgcgagcagggtctcgtgaccgaagaggatcaatgggacaaggatcagtacaacatggagaagctgatggcccaggccgcagccgccaagaagaaggccgagtaactgctgagacgccgttagtggaaagcggatcgccagctgcgacggcgatccgatgaagtaccgttttcaaccgcgcggataccggtgatccgcgatccgcgcaaaacaaccgccaaggaggcacagaaatgatcgatttctctaagaccgaggaacaggaactgctcatcgaaagcatcaaagagcttctcgagcgcgagatgccggccgaaaaggagcgcgaatgctatcgcaacggcgagttcccctgggatgcttggaaggccatggccgaggccggcttcacgggcttgggcctgcctgaagaagtgggcggcaccgacgtcgacctcatgacggtggccctggccaacttcaccatctcccgctacggcggcccgcttgccgcgttctactccatgggcatgcccacgatgtacgacgtgtgcgagttcggcacgcccgagcagatcgagaagtacgtgaagccttacatcgcgggcggggcgccgctggccctgggcatctccgagccctccaccggctccgacgtggccggcatgcagacgtcctacgcgtgggacggcgacaccgcggtcatcaacggcggcaagcactacaccacctgcggcatggaagctccggccatcatcgtcatcgccaaggatccgacggttgacaacgtccatcgcggtgcgacgatgttcttggtcgatcgcgacacccccggtgtgactatcaacaagcttcccaagatgggccacgagaacgcccccaccagcatctgcgaggtgttcctgaacgacgtgcgcgtgccccgatcggctatcctgggcgtcgagcacaacggcttcatgcagaccatggcgaacttcacccgcgagcgcatcgccaacgtgtccggcgtcatcgccacggcggtcaatgcgttcgaggatgcctgcgcctacgccaaccagcgcgagcagttcggccagcagatcggtcgcttcgagctggtgcaggagatgatcatggaaatgtcctgcaagatcgagaacatgatgaacatgctgtacaagctgtgctggcaggccgatcagggccaggacgtgcgcatcctcgccggcatggccaagtactactgctccaaggccacctgcgaagtggttgacgacgccatccaggtgctggcaggtatcggcgtggtgggcgaccatcgtgtgggccgttactacatcgacatccgcagcgcccgcattgccggcggttccgaccaggtcatggtgttcaacaccgctccgcagatcctcaagcgctaccggtaagacgacagaacgagcaaggggcgggctgacgaaagcctcgcgtccgccccgttcaacgcacatgaggaaacgggcagcgcttgctgctgcagaaggaggtgagtaacgcgatggatcgatgtgacggcataccgattgacagggttgctttttcgaaacagcttcaacagcttgccgaaaagtggggggacgagacggctctcgtcgatgtctcccgcgacggatcggaacgggcgttgtctcgtcgagagctgttcgaggcgatcgagaaggtcgcctgccatctcaatgatcgaaacgttcaacagggagattacgtcgtcatagcccttcccaacggttacgagaacgtcgttgcgacgcttgccgcctggcagctgggagcgtgttgcgtattcatgtcccccaagggaaccgatgaagaacgcaaccatatacacgcgctgttcgagcgcaagctgctgatatcgacatgggattgcgacgacgaggattgcatatcgcagcaagacgtgcggaactggatccgaggagagttcccccatggagccgagatcctgccgttcttcgcctgcgagccctcgcgggctatcccgacgggagggtcgtcgggaaaacccaagctcgtcgtgcaaaaagtcaggccggcctactgcgagatggatctgtcggcttggacggcgatgacggggcagaccccttggtcgaaacagcttatccccggttccctgtttcacaacctgtacagcaatgccacgtacatcggactgttcttcgggcagaccgtgtacctcatggaacgcttcgacgaaggacaggcgctcgagctcatcgaaaagcatgggattcaattcataggcttggctcccacgatgatggacaggatgatgcgccatccttccttccaaaccagaaacctggaaagcctggaggccgtgttccacagcggcggcccctgccccgacaaagtaaagcttgcctggatcgagcgcgtcggcgcgagaaaagtgtacgagatgtacggcgagaccgagatgatcgcaagcacgttcatacgaggcgaagaatggctgcagcaccgcggcagcgtgggacgccccttcggttgcgagctgcagatacgcgacgaggagggtcgggcgcttccctgcggcgaagtaggcgagatattcggcaagccggctatggggctttccgcaaagtacgtggggccgcaatccatcaaatccgaggaagacgggttcttcagcgtcggcgacctcggttggctcgacgaggaaggcttcctgtacatctccgaccgtcgttcggacatgatcgtgaccggcgggaagaacgtgtacaccgccgaggtggagaacgccattttcgactatcccggtatctccgacgctgtggttataggcattcccgaccagcaatggggtcttagggtgcatgcgattctcgagatcgaaggcgcggaaagcgagttttcgacggatggtctcaaagaattcctccacaccaagctgagcggatacaaatgcccgaagacctacgaaatcgtacaggacatgcctcgcaacgaaatggggaaaatccggagacgcgaactgatagagcaacgtgtgtccagcttatccgaacgcgaacccggaacgaaagcgtgagaaagcgatgcaagagtcgcatcgcgaagattaaagaaagggagtttcattatggcagaacgagagctgaaggcgaccttggccgaaaagcgcgacggcgtgggcatcatcacgctgaaccggcctgagaagctgaacgccatcaatcaggacatcatggacgacctgtactacctgttcgacgcgtacgaggaggatcccgaggtccgcgtcatcgtgctgaccggcggcgacggcaaggccttctgcgccggtggcgacatcgagggcgagatccagatggacgtcgtgggctcgtaccatggcggcatcgagggcaaccgcctgaacacccgcatcgagaagtgccgcattcccgtcatcgccgctatcaacggcttctgcctgggcggcggcttcgagatggcgctcgcgtgcgacattcgcctcgcttccgagcgcgcacgcatcggcctgaccgaagtgaacatgggcgtcatcccgggctctggcggcacccagcgcctgccccgcctcatcggccccagccgtgcgaagctgctcatgatgacgggcaaccactacaagggcgaggctgcgctggccatgggcctggtggacatggtgttcccggccgaggagctgcttgacgcagccgtgaacatggccaaggagatggccgcgaagccgccgctggcgctcgagtacgtgaagtgggccgtgaacgagggcatgcagatggatctcgaccgcgcgctgctgttcgaatcggccttgttcgcccacttgtacagcaccgaggatcagaaggaagcgatgtcggcattcctggagaagcgccccacgcgtcccttccagggcaagtaggaaacgcggctcatccgcaaagggcgggaaggccgcaacgacatgcccgccccggcggagccccgcgctccgcgaaacatgattttgaaacagctgcgcgcatgaggccgcagcgagtgaaaggaacgagcaatgtctgatttgaagcttcttgatggcgtcaaagtcgtcgacatgtccgcgttcgtcgcggcaccgatggccgccgagatcctggccgaatacggtgcggacgtcgttcgcatcgaaccgctgaccggcgacggcatccgcggctcgggcatgacgcagaacatctacaacggcgacgccccgctgtacgacgccatcaacggcaacaagcgccacatcgcggtgaacacgcgcacggcggagggcatgggcgtgctgtggaagctgctggagacggccgacatcttcatctgccacatgcgcgagaaggatatggtcaagctgggcatcgactgggatacgctgcatgcgaagttcccggcgctgatctatgccaacaccaccggctacggcagcacgggcccgctggccagccgcggcggcttcgacatgatcgcctacgccacgcgcacgggactcaccaccgacgtggttcccgagggcgcgcatccctacatgccctaccaggcgcagggcgacatccccacgggcctgtacctgtccatcggcatcatggccgcgtacatcaaccgcctgcgcacgggcctgggcgaccaggtgtcgtgcagcctgtacggctccggcatgatgagcgcgatggtgcccatcctctccggccagaagccctacaacaacctgtggccgaagggccgcgagaacgtccttccgttctcctgcatgtaccgcggctcggacgaccgctggatcatggttgccggcctgcagtggcataaggactggccgcgcttcgtggcgcgcctgggcctcgaccccgagctggtgacgaagtaccccgactacatgaccgcgctggccaagtccaacgagatcatccccatgctggacgagttgttcgctaccaagaccgtgcaagagtggagcgacatcctcaccgaggaagacatccccaacgacatctgcctgaagttcagcgaagtcgccgacgatcccgcggtgctgaccggcaaccttatgaaggaagtcgagatgcccagcggcgaggtcatcaagatgccgcgcaccccggtctacttccgcgaggccggcgctcccgacccggtcgttgctcccaccgtgggtgccgacaccgaggtcgtgctgaaggaatgcggctacaccgatgaggagatcaagaagatggccgaggagaaggtcgtcggcctgggcgacacctgggatcgctccatgtacgtcatcaagttctaactgcatcacgaaacgatttcgcgggtcgcacggagcatcgcgcgcgacccgcgcatcggaacaagaagcgcaaccaactgaggaggagtcagaatgctgcaagcacctttgtatttcgaagacgtcgaggtcggctacaagttccagtcccccggcggccgcaccatcacgaacgccgaagtggtgaacttcgcgcagatcacaggcgactacaacctggttcatctggaccacgagttcgcgaagaccggcatgtacggcgagaacatcgcccacggcgcccttacgctgacgctggccggcggcatgttgaagcgcaccgagttctggtcggccacggccgagacgctgggagacctcacgggcttcaagcacgtgaagttcatggccccggtgaagttcaacagcaccatccacctggagtgcgagatcacggacaagacggacaacggcgacggcacgggcaccatcgagctggccgtgcatggtatcgaccaggacggcacgctggttctggacaacgtgcgctactacaacatcgccaagaagaactagccctcgcccgccatcatcctgaaggaggaattcaacatgaacgagcaactgcaagctgctttcgacaagaagttcaaggacacctggttcttcgaggacgtgccgctgaaccatgcgaccccggccaccacgggccgcaccatcaccgaagccgacatcctcaacttcgccggcatctccggcgaatgggcgcccatccacatggatctcgagtattgcaaggcccacggccatgactccgtgctggctcagcacatgctgatctatacgttcacgccgtccatcaacccgtccgatcccatgatggcgaagatgaacaactccattcttgcgaccaagggcacgaagaactggaagttcttgaagatgccggccgtgggcgacaccgtgtacaccacgtccgagatcgtcgcgaaagacgacaacaagcccgagcgcggcgtcatcatcatccagatgtcgatgatcgaccagaacggcgacgtgctgcagaccggcgagtaccacctcgtcgtagccaagaagatcttcttcgagaagcagttcgaagctgccgccgccaaggcgcagcagtagcaccccgctcgcccgttgccgcggccttggagggagggtcgcggcaacgcccgcgggcatggacatgccggtcaaacgggaactgacccttgtcatcctgagagaagcaccgcaggcgcgaagtcgaaagatcccgtgcggcgccagccgcagcactccctgttaacgcagcacgggatctttcgacttcggcttacgctcggaacgacaggcaagcagtttgcccggcatgtccatgccgcagaacggcaggacgataggagaagaaaggaaaggcatccatgaacatcattgttcctatcaaggtgctggccgacgatcaggacatcgtcgtagccgccgaccggagtctggacgactcgaaagcccatcgcatcgtgtccacgtacgacctgaacgccatcgaggccgccgtgcagctcgcctccgcccacgcggactcgaaagtcgtctgcgtgtcggtcgccgacgcgaaggccgacgactccaagctgaagaagggcattctcgcccgcggcgtggacgagctggtcatgatcgccgacgacgcctgcgccgacctcgacgcccacgcgacggccgccatgctggcgcgccttgtagacgggctggacgccgccgacctcatcgtgtgcggcgacggctccgccgacaactacgcgcagcaggtggacgtgcagctggccgatgcgctgggcctgcccgtggtcaccgccgtgtccgccgtgtcggtggagggcgccgtcgccacgtgcgaccgcatgctggagacccagttgcagaccgtgcaggtggacttgcccgccgtgatcagcgtggtccccgacatcgcgctgccccgcatccccggcatgaaggacatcctcgccgccggcaagaagccgtcctccgtgaacgccgcttccgatgtggaggccgcggtcgtcgacgtcgtggagaccaaggcgccgcagcaggccgagcgcaagatggaaatgctggacgcctcggtcgacggcgatctggagaaattcgcggccgccctcaaagcggccctgtaggaaaggtgatgtggacatgaaagcatgcgttatcgctgaaacctccgccgccgcccgcgccctgtgcgccggcgcccgcggcatggccgacgaagtggtgctgatcgcccccggcgtcgaggctctgaccggcgtggccgacaaggccgtgcatatcgacgttccctccggaaacgccatcgacgacgcgtacgccagcgtgaactccgtcgtggacgccgaggctccgggcatcgtcctggtcgagcccacccgttccatgaaggttctggccggcaggctggccgcccatctgggcacggcggccatcaccgacgtcatcgagttcgaaggcgacctggccaccaccatgtacttcggcggcgtgggccagcgcaagagcaaggccaacggcacggccatctacacggtgggtgccggcgtgttcgacgaggcctccgcttcgggcaccgacgccgtcgaggaagcccccttcgccgccccggctcgcgccctgcgcgtgacgggaacgaaggatctgccgaagagcgacgtggacctcgcagcagccggcgtggtggtggccggaggccgcgggttcgccgaagaagccgacctgcagctcatgcgcgacgtggccgcgaagctgggcggcgagtgcggttgctcgcgtccgctggccgaaggcgtggactggatgccgcgagaggcctacatcggcgtgtccggcatgatgctggcgccgaaggtgtacctgggcatcggcatctccggccagatgcagcacatggtgggcgtgaaccgcgcgggcacgatgttcgccgtgaacaaggacaagaacgcccctatcttcaagcagtgcgactacggcctcgtgggcgacctgaaggacgtcctgccgaagctggcggcggctctgtaggccttctcgacctgaccgggagggtacccggcatgcccagtcgctcggcagtcctggctcgcacggacagtccactggactgtccggctcgatgggtgcggcgccgcggagcgaagcggagcaagtccccgaaggggaaactcgcttggtgggcacgccgggcaccctcccttcgattcacgtcgctgccgcccgccttggacggtgggacggctttggagaacttgagggatgccctggagagaggcggccccccttcgggtggccgctttcgcctccgtgatgcaggggggggcagggcgcccttaccgtattggaaaaaagagaaggaagagagaggaggggaacgtggctgagaccgatttcgacgcgatcgtcgtgggctccgggtgcgcgggcgccgtggcggcctacgagctcgcgaaggccggc

SEQ ID NO: 9614 - DNA, 182 bp, Unknown
  gut microbiota DNA sequence
atcgactacgtggacgcgcgcgacgccgtgcgggtcgtcgtggaggacggcgggctggcggtgctcgcgcatcccggccagcttgacagctacgatctgcttcccgacctggtggaatgcggtctcggcggcatcgagcgcttccatcccgaccacaccttggcagatcacgctcgctgcgc

SEQ ID NO: 9615 - DNA, 381 bp, Unknown
  gut microbiota DNA sequence
gggtgaagatttatacctgatcggaacaagtgaacattctatgatcggtaaatttatcgatcagatcattcctgaggaagaacttccgaaaactcttacaagctattctccatgtttccgtaaggaaaaaggtgctcatggacttgaggagagaggcgtttaccgtattcatcagtttgaaaaacaggaaatgatcgttgtctgcagaccggaagagagtccgatgtggtttgataaattatggcagaatacagtagatctgttccgttctctggatattccggttcgtacacttgagtgctgctccggtgacctggcagacttgaaagtaaaatctcttgacgtagaagcatggtctccacgtcagaaaaaatatttcga

SEQ ID NO: 9616 - DNA, 230 bp, Unknown
  gut microbiota DNA sequence
atccgaggctgggcgaggcgatggcggttatcggacgcatcgagcgcgaggtgcaccccgacttgttcgctgtgctcgcgaactgcatcgtgggccagcagatatcgacgaaggcgcagaccaccatttggaaccgcatgctggatcggttcggggaggtgacgcccgaggcgatggcggcgtgctccgacgacgagctgcagcaggtgggcatctcgtttcgcaaggtg

SEQ ID NO: 9617 - DNA, 175 bp, Unknown
  gut microbiota DNA sequence
gacgacgtagatcacgaggaaagccagcgcagccgacgggatgcccagcgccgccaaggcgatggcgcccgtgcccacggttccgatgaagaacttcttcttgttgcccttgaggtcggccaggctgcccagaaccggcatgagcagcgccagcagaagcgacgccaccgtctcg

SEQ ID NO: 9618 - DNA, 399 bp, Unknown
  gut microbiota DNA sequence
acgggcaccgaaagccccaaggccagcgcaccgcggatgagacgcgggtaccatcgctcgaagcgctccatgcgcgcccgcagctcctcacgatactcctctttgtcagacaacgctctgaacagctgcgacacgcgataggggcgcgcggggatctccacgtcctccccgttgaagatgccgctctcgcgcacctggcaggccaccatgcggttgacgttcgccatgagcggccgcacgaggatgccgaacgccatgaacagcgcgaagaacagcgcgagcatgcccagggcgtcggcgtactgcgatccgtagaagccgaagatggcctcgcgcatggcggagatgccgtaagtgaaggggaagaacgggtagacggcctggaagaagctcgaggtc

SEQ ID NO: 9619 - DNA, 262 bp, Unknown
  gut microbiota DNA sequence
tagcgcgagcatccccagggcgtcgacgtactgcgatccgtagaagccgaagatagcctcgcgcatggcggagatgccgtaagtgaaggggaagaacgggtagacggcctggaagaagctcgaggtcatctcgatgggatacagccccgtcgcgccggggatctgcgcgaacaccagcacgatgcagatacccttgccgatatgctgcagggtaaccgacagcgcgtagatgatgctgagataggaaagggaggccacgatg

SEQ ID NO: 9620 - DNA, 160 bp, Unknown
  gut microbiota DNA sequence
accgtccacttcctgcttcatgatgaccagcagcatgaacgcgccgatccagaacgtgaggttcatgaacagcggagccatggccgaaccgtacgcgttcagctcgtacagctgctcggtgaccagttcggtgggcgagcccatgaagtcggcgattttg

SEQ ID NO: 9621 - DNA, 1632 bp, Unknown
  gut microbiota DNA sequence
aggatacagccccgtcgcgccggggatctgcgcgaacaccaacacgatgcagatgcccttgccgatatgctgcagggtaaccgacagcgcgtagatgatgctgagataggaaagggaggccacgatggcagcgaagaagagcgcgggagcgttcgccgcctgcaccccgatggccagcacgccggcgcagcagatcgccgcctgcagcaccgccatcgcggccagcagcaggaagcgccccaggtagcgctgcgtgacggtgagcttgcgcacgccttcgtcgtccacttcctgcttcatgatgaccaacagcatgaacgcgccgatccagaacgtgaggttcatgaacagcggagccatagccgagccgtacgcgttcagctcgtacagctgctcggtgaccagttcggtgggcgagcccatgaagtcggcgattttggccgcgtcgaggccgtcctcgccgaacgccttcgcgagcgctcccgattcgccgagcgacagcacgtcggtctgcacggtggacaggctttcctccaaatcggcaaggatgccgtcggtctggtcgagcgcctcgcgcgcggcgacgagcgtggaggtcaactggccgatcgccaactcggtctggtcgatcagcagacgttggttcgacacggcggccgcgagcgaagacgaaaccgcgctcagctgcgcgaggcttcggttgacggtgggaaccgtatcgccgaacaggccgtccgcgtacgcccccgctgcatcggccgcgccctgcaccgatccgtcgaaggacgttcccgcttgggacaccgcgcgcgcgagatcgcccgcttgcctgttcgccgcgtcgagagcgtcgagcgtcgcctgcgcgtcggccgcacgctggtcgagcgcatcggcgaccgcgacgagcggctctttggccgcatcgccttcgggcagcgcctgagccgcctggcgcacctgggcggccagcgccttgctctcctcggcggcggcgcggccctgcgcgatggtcgcgccgatgcccgcctgcgcctcgcccgccgccgcggtcatgctgccgacggcgccgttcgctttcgaggacgcttccgacaccgtgcggatcgtcttgttcacggcgggcatcgccgccgaggaaagctccgcggcctcgccctgcagctgggaggtcaggttcgcgatggccgcgagggcgtcgcccgccgcggcgatgtcctcgcgcgcccgtccgagcgcgtctttggagccggcagccttggcctgagcttcgtcggtggccgcgacgatcccgtcaagcgtggcgcgcgcctcggatatcgcctgcaccgcgcccgccactttgaccgccgccctcgccttcgatgcgtccagcgcgtcgttcgactccgccaacgctcggtcgaccgcgcccacggccacatcgctcaccgtagagacgaaggtggagttgatcgtctcgtcaagggtgctcgcgcccgtgtcggtgatcttcggcgccacgggccccgtcttctcgttcacgtagtaggccagctcgggctgcacgaagtcgccggtggtcagcgacagcagccgctcggtgaagtcttcgggtatgacgaacgcagcgtagctcgcgcccgcatcgag

SEQ ID NO: 9622 - DNA, 1055 bp, Unknown
  gut microbiota DNA sequence
gcgccggcgtcctcgttcaccacgcacacgcgcaagttgcccgtgttgtcgtaggggttccagaagccgaccacgttgtaccaggtatacactgaaggcagcacgagcagcgcgattaccaccaccagcgcgcagggcgccttaagcaggcgcagcacatcgcgcttgaatacgcgcagaacgttacccattgcccgtcggacccctctcatcgctcgctcgaaaacaacccgaacaatgatacctcctccgttgacactccgtcagccccgattgacgatccaaccccttccgtcaatcgcacgccgcgcatagcacaacaggttgcttgcagataagagcatgttcgacgaggcggctccacagctcacgcaagctcctttgcaccggctccgcgtccgaaaacggaagcggccccgacgtgtcgtcggggccgcaggaagagaccttgcgcgatacgcaagcgtccttttccgccctacgcctccaagcgtttcgcgatggccagaatgaagtcgcgggtgctcagcttcttcgggttcggcagcgtggtgatgagcgcgaggtcgcccgtcatctcgccggcctcgatagtgtcgagcgtggcgcgctccagcttgtcggcgaacgccacgaggtcgtcaaggccgtccagctcgccgcgcttgcgcagcgcacccgaccacgcgaagatggtggccaccgagttcgtggaggtctcctcgcccttgaggtgcttgtagtagtggcgctgcacggtgccgtgcgcggcctcgtactcgtagtagccctgagggctcaccagcaccgacgtcatcatggcgagcgagccgaaggcgctcgacaccatgtcgctcatcacgtcgccgtcgtagttcttgcaggcccagatgaagccgccgtcggccttcatcacgcgcgccacggcgtcgtcgataagcgtgtagaagtactcgatcccggcttcctcgaagcgcgaggcatactcggcgtcgtagatctcctggaagatgtccttgaagcggtggtcgtacttcttcgagatggtgtccttc

SEQ ID NO: 9623 - DNA, 1075 bp, Unknown
  gut microbiota DNA sequence
aaagtactcgatcccggcttcctcgaagcgcgaggcgtactcggcgtcgtagatctcctggaagatgtccttgaagcggtggtcgtacttcttcgagatggtgtccttcgtggcgaaccagatgtcctgtttgatgtcgagggcgtactcgaagcagctgcgggcgaagctctcgatggacgcgtcgaggttgtgcatgccctgggcgatgccggggccgtcgaacttctgcaccagctcgcgcgtctcggagccgtctgcggcggtgtacacgagctccaccgtgccgggaccgggaacgcgcaactccgtgttcttgtacacgtcgccgtaggcgtgacgcgcgatggtgatgggcttgacccagttgcgcacgcacggctcgatgcccgcgacggtgatgggcgtgcggaacacggtgccgtccagcatggcgcggatggtgccgttagggctcttccacatgctcttgaggtcgtactcgtccatgcgcgcggcgttcggcgtgatggtggcgcacttcacggccacgcccaggcgcttggtcgcctcggcggaatcgacggtcacctggtcgtcggtggcgttgcgatgctccaggcccaggtcgtagtactcggtcttcagatcgatatgcggaagcagcagctcgtccttgatcatctgccagatgatgcgcgtcatctcgtcgccgtccatctccacgagcggcgtggtcatcgctattttcgccatagtcaacctttccgtgtccaaagggccgtctctcccccgttttcccatacccgcacatgatactcgtcgaagcgggcgcacgacgcgcgggaaagcgatttccagcgcaacgccaaaaaggaagcctcttcgccgcagcagcactacatcaggccctcgcccgatcgtcggaggccagcgccatgtagccgtcttcgagggtgggctcgacgggctgcgaccccgcgggcggcgcggcgctcacgatgcggtagcgtgtgccctcagccgtggtggctgcgttcaccacgaccgcgcccgtcggcggcgccatgagcggcggcgtgagccacgtgcgtcc

SEQ ID NO: 9624 - DNA, 471 bp, Unknown
  gut microbiota DNA sequence
gatcaccgtgcggtcggctcccagcgtggcgatgagcgtgcggaatcgcatgcgctcctcggggtcgagcccggccgtgggctcgtccaccacgagcaggcgcgggtcgcccatgagcgcctgcgcgatgcccacgcgccgccgcatgccgcccgagaaaccgccgatgcgccggcggcgaacatctgccagccccacgcgctcgataagctcgtcggcctggcggcggcgctcgcgcttgttgtccatacccttgaggatgcccacgtagtcgaggaactccggcggcgtgaggttcggatagggctcgatgtcctgcggcaggtatccgagggtcttcttgagcgcgcggcggttgcgcggctcggcgatatcgcggccgtcaaccagcacgtgcccgcgggtggggctcacgatgccgcacaggatgcgcatgagcgtggtcttgccggcgccgttggggccgatgag

SEQ ID NO: 9625 - DNA, 885 bp, Unknown
  gut microbiota DNA sequence
aagctgaaggccgagggcgtcgagcacgagtacggcgcgttcacctggttcaacgccgaccaggaaggcgtcatcgacgagaccggcggcttctgggagggcgagaactacgactccgagaaggcgcgccaaggccgcgaggccgcgcaggacaacctgctgccgggccagacgcagggctggctgcccgatcccatgccgttcgaccccgccatcgaccccgcgctggaaggcgagttcgagatcacgctgaaggacggcaagaccgtgaaggtcaagccggtgtgggagcactacaaggcccgcgccgccgagtacaagcccgaggtggcggccgagatcaccggcatccccgcctccgagatcgaggcggcggccacggcctacggcacgcgcatcgacccgtccaccggctacggcaacggcggcatccagtacatgctggcggtcgagcacttctgcagcgccatccagaactgcagcgccttcgacaacctcgtgggcatcaccggcaacatggacaccccgggcggcaaccgcggcccgaccatcgtccccatcgacggcgacctccagggcttcagcgcctgggcccccggcgccaccaccccgccggaggaagtcaaccgcaagcagatcggcatcgacaagttcccgcttctgggctggtggcagtactggtgcgacagccattcgctgtgggacgccgtcatcacgggcgacccctacccggtgcgcgccctctggaacgagtccggcaacttcatgagccagacgaacaccacgcgcgcctgggaggccctgtgctcgcttgacttctacgtggacctcaacctgtggcacacgccgcagaacgacaccgccgacatcatcctgccggtggcc

SEQ ID NO: 9626 - DNA, 295 bp, Unknown
  gut microbiota DNA sequence
catctccttcgagacggccatgaccgacctgggcggccatgcgcagttcttcggcccgggcaccatccagctgggcggccacgagtccctcgaggacaccgcccgcgtcatgggctcgctcgtcgacatcctcatggcccgcgtgaaccgccaccccgacgtggtgaacctggcgaagcactccgccgcgccggtcatcaacggcatgtccgacttcaaccaccccacgcaggagctgggcgacctcttgaccatgatcgagaacctgcccgagggcaagaagatcgaggactgc

SEQ ID NO: 9627 - DNA, 330 bp, Unknown
  gut microbiota DNA sequence
gcgcgcaccgccgcgtaatgcacgtcgccgaacacgcgctcggcgaaggccagatgctcttcgctctcccaccggatgccgcttttcgccagcagatggtggtagccgctcacgcccaggccaatgggacggtactggcggttgttgatctcggcgtagggcaccgggaagaagttgaggtcgatgacgttgtccagcgcacgcaccgcgctttccgtgacgtgcgcaagctcgtgcggatcgtccatgtcgatatggcccagcgacaggctggccaggttgcacaccacgaacgcgcccggcttcgtcacggtgaccaccacctgctcg

SEQ ID NO: 9628 - DNA, 367 bp, Unknown
  gut microbiota DNA sequence
aaggattgccctggcatgaccggcagtgatcatctcatcaatcagcatctgctgcactttttcactgagtttgagaagtctcattgcatttgttactgctgttctgctcttccctacacgctctgcgatttcatcctgtttcagatgaaattcatcaatcagtcgtttatatgccatcgcttcttccacagggtttaaatcttcccgctgaatattctcaatcagggaaatttctactaattcctgctcagaaaactctttaacaattacaggaatctctgtcagtccagcaagctttgccgctctccagcgtctttcacctgcaattatttcatagtagtcctttttatcagacacaagaagtgga

SEQ ID NO: 9629 - DNA, 5517 bp, Unknown
  gut microbiota DNA sequence
cggcgcgcgcccgcccgccgcgcgctcgccgccgcgcaggccggggctgccgaggctgccggggcgcccgcagcggcgccctcggcggaccaaagggttgcggagggcgcgaagtctggtatatccttgaagttagccatgactaataatctagcgatgcaacgaaaaggagcggcgtgcaatgagcgatcgcgatgattcagccgaaattctagacgatgacgccgaaatgaggtgcgcggcggcgggatcgggctcgcgcgccctcgtcgagtcgaacctgatcggcgtcgggggcgaccccgcggcgcgctcgcgggcggcctacctggcgcaacgcacctcgctggcggacggcttggggtcgaacggcccgttcaccgtccacgacatctacgagacgcagatcgcctccatgcacggcgtgcgcgtggaggccgccgagcgcgggcgcgtgggcatgctctgggagatcgacgagcgctacggccagggaacctactggtactacccgctgggcgacgacctgtccgtggcgatcttcgacctgcagttcaaccgggaggtaggcttcacctgccagacgcccgacctgttctgcttcgggtcgtacggccgcaacatggtgccctacttcggcatcaccgacgaccccgccgaccggacgctgctgggctacgcgtggaagtcgcagccctacgggcaggtgacgaaggccgacgagcgcctcgacgtgacgagcatctgcatgctgccgaagggcctgcagcgcctgagcctggcgtgccactgcgacccgctcgtgctctcccgcgccatcgcctcgctcgacggcatgcaggatgtgcccggcctcaacatggtgttcgacgagatgaagcgggcgcggccctcgtccatcaccgcgccggcctactacgaggcgaaggtcaccgaggccgcggcgatgctgctggactggtcgctggccaacgcgcgcggggcggcgagcgccatccgcgcggtcgaccgcagcgcgctcaacctgacgcgggcccacatccgcgagcacctggaccgcgccgtgccctcaagcgagctgtgccgcatcgcctgcatgagcgcgagcaagctgacgaggctgttcaagcaggccgagggcatgacgccgcaggagtacgcgcgcaccctgcgcatggagcgcgcctgcgagctcctgggcgacaccgacctcagcatggccgagatcgccgcccggctgggcttcgcgcgccagggcagcttctcggaggccttcaaggagcgcttcggcgccaccccgcaggagttccgcgcgctgcgggccgcccgcaggagcgcccgctagcgcccggccctcgcacgctgtctctcttcgcacatgtgccgatcagcgcgcggcatcgggtaccctgcacgtttcacgcgctttcccatcacgccggcgccctcctcagccgcgtcgtgccagatcctgcgacgtccgctcgcccaaatcgatgagctcctggcggccgtgcgttcccgtcttgacgtagatgcgccgcaggtgcgtgtccaccgtgctcttcgagatgaagaactccgcggcgatgcgctcccccgtgcgccccttgagcgccaacggaaggatctcggcttcgcgcttcgacaacccgtgctccgaggcgatgagacggcatgcgtcgtcgaagcggtcggcatcgcgcacgatgaccgacagggcgcggaaatcccgctcggtgaacaggaagaggtacgcgtacaacgcggccaggcccgcgaacgcggcgacggcgtagggcacctgcccggccggctccaaaagctcgatgccgttgccgcaggcgatgcccgccagctcgcccgcgtacagcgcggcgaacccgcgcgcgaacgaaacggcggcatcctgccccgtgatcttcgccatgacgaggaacagcgacaccagcacgaaggtgagccccagatagcccgccagcacgatggcctcgcccggaacgccgaacgagcccaacacgggcacgaacagaaaacccgccatcatcaccagaacggccaaccggtacaccccgtcgagcggcccgtccacggcgccgcccgtcttgcccgccggatcccctgccttgccgaggctcacgcccagaagctgcagcgatgcgatgcagaacagcacgagcagcagcaagctggccagcaccgtgggcgtggaagccatgccgggatcggagccgaacgtctccatgaagcctgcggccaggccgaacaacacggtaccggcgatgatcttcttcgaaagccgcgccgtctcgtcacgctgctccttcgtcgccaagaggtcgccgaaggacaaggagcctccctgggacgtcccctcgcttgcggcggcgcgcgtcggcagcagcccgcgcagcgcgaaagcgcttcccagcggaagcagcttgagggcgaacgccgcctggggcgcggcgatcgcgaccgcgagcaggcagacgcctgccgcgacggccgcggacaagaacacctgcggcaccgaatcgcccaccggccggcgcccgagcgcccggccccatgcggccaacatgaaacccgccggcaggccgacgagcaagctctccagcacgatgccgtggtcgccccctccggcgatggcgggcatgagcgagcccagcaccagcagcccggcgtagcaccacacgagcggccgagacagcagcgcatcgcgcgcacgcggcgaagccatccgcagcagcgcgaacgcgatcagcatgcacgcgagcgtgccccataggtcggcgcgctcgaaggcgaacgggccgtccccgaacgcgcggttctctccaaggtagaacaacgagaacacgaacccctcgttgcaggcgaaaccgccgatcacccgcaaggccgccgttctgccttccttatcggcgcgcaagccgagatgcacgtgctcccctttctccgtcaggccttacagctccatcataacggagatgccgtgtcgcttcgcgcctgccgcccgccctcctcaaaatgcgcaaccgcccacggcacggatgccgcgggcggttgctgggcgcgagggagggagggttcgcgcctcggtaagggaaggataggttggtttatgcgaccttgtcggccttcttggccaccttgacggtcttcttgggggcggcagcgggagcagcttcctccacgatttcctcaaccgcctcttcctcgtcgtcggcttccaccagcttctcaccgccgccgaggccttcgcgcaggctcttcacggtcttgcccaccgacgcgccgagcttcgggaggttcttggggccgaagatgagcagtatgacggcgaggatgataaggagctcgggtacccccatgcctaagattttcatgtgcgcctcctacagcgtatcggtggcgcgcgtctcgcctgtgagccgccgccggtttcaacgaggcacatcatgccccagaacgggcggcgcgcctatcgtgcagacgcatgattttatgcgcatagaagcgcgaatccatgtcatgcaaacggcgtacgggatgcgtcctgcctgttcacagctcctctgccacgacacgccctgctagccagcccatgacgctggccatcatgagcccgcgcgtccatccgctggaatcgccgaggcacataaggtcgcatacgctcgtcaggaagcgttcgtccatcttgacgcggttgctgtagaacttgagctcgggagagtacagaagcgtctcctgcgctgcgaaccccggcaccacctcgtcgacggccagcatgaaattgaggatgttggtcatggcgcggtacggcatggccgccgtgatgtcgcccgccaccgcatcgtccagcgtgggtgccacgttcgagcgcacgagctccttctcccacgtgcgcttgccgtcgaagatatcacccaagcgctgcacgaggatgcgtccgtcgcccaacatgttcgtgagctcgcccaccttctgggcataggcgatgggctggtcgaaggggtgcgagaaattctgcgagcacaggatggcgaggttcgtgttcggcgacttgcgctccttgtaggaatggccgttcaccacggcgagaccgccgtcatagttctcctggctgacgaagccgccggggttctggcagaacgtccgcaccttgttcttgaacgggcgcggataaccgatgagcttgctctcgtacagcacgtcgttcaccgtctccataacctcgtttcgcacttccacgcgcacgccgatgtccacaggaccgggtgcgtgcgctatcgcatgctcgcggcacatgcgctcgagccagtcggtgccgcgccggcccgtggccaccacggtacgccgagcgcggatctcgcacgcgccgtccgggccggcgacggccacgcctcggcaccgctctccctcgatgagcacctgggtgcattccgtgcggaagagcaggtctacgcccgcctcgcgcaggtggcgctcgatacgcgcgtacagatcgcgggcgcgctcggtgccgagatggcgcagcgggcaatctaccaacttgagacccgctttgatagcgcggcggcggatctcgtccacctccggtttgcgttctgcgccctccacgcgcacgtcggcgccgaagcccaggtacacgccgtccacttccccgatggcgtcctgcgcctcatcacgcccgatgaggtcgggcaggtcgccgcctacgtcggccgacagcgacagctttccgtccgagaacgctcccgcgcccgagaaccccgtcgtgatacggcagggttcgcagttcgcgcatggcgcgcccgcctgcttcgggcatacgcgatcctccaccgccaagcctttgtccaccatgacgatgcgccccgtgaagccccgctccaaaagggagagcgcgcagaaaataccggcggggcccgcccccacgatgaccacgtcggtgtcgatggttcgcataagcacgctcctgttcccgcgccgttccgacggcgcgattcgtgttctgcatcattgtacccctcctgccgtaggctcgtccgggatccggcgacgggagaggaacagccgatcggagcggatgcttcgcatgaggagctccgacgcggaacgcggtctgcccgccaagttcctgtgaaggattcttgaacctcgtgtgacggttcgccggacattcatacggtcgcgaactgcgacgttgccgttttgttaccattcctcttcgcgcccgcaaccataccacgccaacgaacccgacgcggacgcaggaaggatgcctcaatggtatcgcacccctcccgtcgcgcgctcgcgttctgcgcggcggtctccctcggcatcgcgtgcatcgcaccctcgcaagctgcgttcgccgtcgaaaaagctcccgcgatccccctcgtccggcccgccgtcctctccgcagccgtcacgctgccgggcgctgccgccgaagaagccgtcgccgacctcgagcaggtgcgcgctctcgcggcgcagcga

SEQ ID NO: 9630 - DNA, 630 bp, Unknown
  gut microbiota DNA sequence
tgcgttcggcgcggcggtctccctcggcatcgcgtgcatcgcaccctcgcaagctgcgttcgccgtcgaaaagctcccgcgatccccctcgtccggcccgccgtcctctccgcagccgtaacgctgccgggcgctgccgccgaagaagccgtcgccgacctcgagcaggtgcgcgctctcgcggcgcagcgagcagccgagcagtccgccgaacagcgcgacaagcgcctcgactacgaccccgccctcatcgccgccatcggcaaccagtcgacgggcggccacaccatctgctgccccgcctatgcgtgcgcctacggcgacgcgatcctcaccggccaggccaacgaccacggcgcgtacggctgcggctgctgcacgtggcccggctggggcggcggcaattcgtcgttccgctcgctcggctccgacgaggctttgctgcgcgaggcctacgacgagatcgcggccggacggcccacggtcgtccacgtggcaggcccttacggcgagcactggatctgcctcatgggctaccagggcgtggaggatcccgacgcgctctcgctcgacaacttcatcgcgctcgatccggcgaacggcctggaggtcacggcatcctatcggtac

SEQ ID NO: 9631 - DNA, 10870 bp, Unknown
  gut microbiota DNA sequence
gggcccttacggcgagcactggatctgcctcatgggctaccagggcgtggaggatcccgatgcgctctcgctcgacaacttcatcgcgctcgatccggcgaacggcctggaggtcacggcatcctatcggtacgcgccctacggcgacgcctgcgagcacgtgagcgacctccgctaacgccgcacccatcctcagaacaggcgaggcggcgcttcgggcagcttggccgaggcgcattcctccactgtatcgtcgggagtcagctcgtcgcagagcatcggcgaagccggatcgtagcgccgcaagcgccagggatcggccgccccgcacggcgcggccgacgtccccggattggcgtagcagtacacgcagccgttcgcgcacgtgtcgtacgtgccgatgtccacgctcggcgagcaacggcaggctcccctccgagcgccgcccggagcgcgttttgcccgtacgcctgcaacgcgctccacgacagcggcatcgatgcaccctgctcgagccagccccgcatcgtcgagcgccccgtcaccgcaaccgcccacctcgatgccgtgcgcggcgcccagttcggccagccgcagcgcaagcgcggccttcgcctcttccggcactccgacgaacccgagcgccgccatgcgaccggcaatcttcggatacatgtcgaggaagctgatgcggcaggtgcgcgtgctgccttccaaccgcgccgcgaacgcctcgaaccactgcatatggtgcgcgatgtcgtaggcgcctcccaacaggatagggctgtagcgccacaccacgcgatcgggccccagagcgtccgcaagcgagcggaacgtttccagcagccgcgccttgcggggcaggcccgcctccacgtcggcaccgtaggcgttgagcgtgaactgcacgaaatagggcgatgggcagacgcgatccagctcggttttgcgcgcgagcagcacggaaggatccttcgtccagaacgcgacgcaatccaccgtgtccggagacaggatcacacggctcacccgagtgcgcaccgccgggttgcgcacgagcgcgaagccctcttcgaaccgtccgagcagccagtcgaaatgaaaccgcgggatgtcggttcgtctcgatgcgctgacgatcacagctcttcgatgaccttcgccgacacaacgttgctgggggatatgaggatggtgccgaccttgcccgcctcgggagcgtccacgtagaaggtgccgtcgatggtttcgcccatcacgaacaggtcctcgtcttgagtcgagatcacgatgtcgatgccggaggcgtcgtcgacgtaggctttgtcgggcgttatggccacgatgaagtccaccttgtacttgacgaagtacgcaacctgcttatcgatggcgcgcaccgtggtgggggcggtcacgctgaacacgccgaagcgatgaccgcccttcttgaggatgatgccttcgccgtactgcccgagatcggtcgtgtccaaggagaacacggtggccttcttgtcctcgtagcttttctgagcctccgccaccgtcacggtcggcttggacttcgcgctcgtcccgttcgagcgcgctcccgccgccgcgctcgcatccggttccgtttcgaccgccgacgaagcagcatccttttcgggaagctcccgctcgtccgcttcccgtccggattcctcgcgctcggatggcttcccttcgtcgtcatcggcggcaggatcgagctcgtgcgaccccttctcgtccgaagaagccgagccagcagcccccttcgcggctttttcctccttcgccgcttccgccgccttctcggctgccgtctgcggcacggcggtaccctcgtacacgatagcggtatagccgtccatactgccgaacgtgtcgtcgatgttcgacgcggcaacattccaggaatgcccggcgaccaggtaccatcctaagcccagaaggctcagcacgatgagggcggcgaacaccgccaatgctattttctcgcgcgatttgaccgacatagtgctccgtattataccctgtggcgagcgggcgtccgccgaagcgcgcgagcgacagaatttcgacaggaagctgaacggcaccgcgcccgaacggcgcgttcccgacaacgacgcccctttccggtcgccagaatctcggaagaagctcgcctggctacacgagccgctcgtaagcgatgcgctcgggcgtccccccttcggcatgggcgatgtagatgatgccgcactgctcatagccggctttcgccagcagctttctcataggcgcgttgccggggtgcgtgtcgatgcggacgctggcgcttccgttcgcgcgcgccagctcttcggcgcgagccagcagaaacgtcgcggcgccgcgattcttcccgtcggaagccacggccactcggtgcaccacgccgtagcacggacgctcggacgtgcaggaagtgagccacgagccctcttcgatgcgatcgtagtcgcgctcgcccgagaagccgatcatagcggtggcaacgatgcggtcgtcggcctccaccacgtaggagtcgccgcgagccgtatcgtcctcgatgacggcgcgatgcgggtagccgccctgccattggtcgatgccgagcgctgcgagcgaggcgcggccgtcggcgaggatgctcatgatgcgatcgatgtcgcatgcgcaggttctgcgaaattgcacaggaggttctctttcttctttggatacgttcgctaaacagaggttgggttggagcggcgaagccgaaaggctacaagacgcgttcgaacacggctcggtgtttgacgcggccgaagcgggagcggatctccacgttgccgcagaactgatagccgtacgacagcagcagctcgcgcatggggacgttgtcctcgtagatgtcgcagcagatgctgaccttcccgtcgcccttggcgatgcgctcggcggttcccaggatgtaaccgcccacgccgcgtcttcgcgcatcggccgccacggtcacccaatgcagcgccgagtaggcggggttgtcgggcgaggagggctccgtggcccacttcgcacccgtcatgtgcgcataggcgggatcgccttgaggattgagcgcgaacatgccgatgatgcggccttcgtcggccgaggagccatccgccctcgaatcgctcgaggacgcaaccacgacataggtcttccccgcgtcgatagaacgcatgagacggcgcgcggacgggtacttcttgagaccttcccttatgccgagcgaggccatggcgcgatgaccgtcctccagcaacgccttcgcgcgttcgaagtcgtcgcgcgtggcacggcgcgccttgtagtagcccagctcggtggcgcgcccttggaacggcggaaggtcgtatgccgccccgtcgtacgaggccgcgccgccggagccctcttcgcgctcggtgacgaggaacaccatgccgatgatcatggcgcaaccgacgacgtcgacgacgcccaccggcgtgcccagccacaccgccgatatgaccgtggccgacaccggctcgacgcagccgacgagacccgcgcgcacagggccggcgtcggtgatgccctggaggtagaacaggtaggcggcgaacgtgcccacgatgatcatggcgaacatgaccccggcaagctcgggcgaaacctcgacggggatggtccagggctgcacggcgacggtggccaccgcgccgccgatgagcatggcgaggcccgtcacgatgaagctgccccacttctccagcaccttgccgggaagcagcgtgtagaacgccaacgcgaacgccgagatgatgccccagaacaggccttccgcaggaatggccaacgaaccgaggttgcccttcgtggcgatgaggacggtgccgccgatggcgagcacgaggccggcggcctcgcggatgcgcggcaggcgccgcatgcgcaggcacacgtacaccatgatgacgatgaggccgaggcgctccagcacggtgccggtgcccgcgttcgtgtaggagatagccgacaggtagctcacctgggtcagaagcacgcccagcaaggcgaacgccgcgatgcgcccgagcgagcgcacgtcgcgcagagcggccagcaggttgcgcggctcccgcacgccgcacaccacgaggaagatgaccgcggccagcagcaggcgcacgcaggtgatccaggaaacgggaacgccgaaaccgctggtcatgagctgggcgcacgtgcccgagaagccccagcagatgccgccgagagccgcgaagacgatgccgcggaccacgtggttgcccgatgcggcggtaccgccgccctgcccggagcccgatgcgaccgtctgacccacgtttcctcctctcatcgatcctgcgcctcgcgcggcagcaagcctctcggccggcgccacgttgcatcagcgcattgtcgcatgtatgggcagcgcggtaaagatgttttgcaagagttttgccccagttttggacaggcgagcaaaacaccatgtcaaggggtgaataccccctccgtcaacgcaacattctctcgtagcccacgcgatgtttcacacgcccgaacacgtctttgatcgtgatggttccgcagcgttcgtacccgtgcttctcaagcaggttctgcatgggcccgttcagctcgtagacgtcggcgcgaatgctggaccggccgcccgcacgggcgatctggtcggccttgtcgaggatgaacatgccgacgccgcggcggcgagccggatagtcgacggccacccaatgcagctccgcatagggctgcggttcggccgacgtgtcggtgagccaagcgccgtcgatggggcgctcgtagttcttgtcaggcgagaaggacacggcgaacatcgcgatcatgcggccgtgggcatcctcgatgacgtgcgtcgtgccgttcttgatgctgtgcatgagacgacgcgccgatgggtacttcttgctccgaccctcgtctatgccgagctccgcgaacgtctgatgcccgacgtcgagcagcgccgtggcacgctcgaaatcatcgcgcgtggccggacggctggtgtagtagcccagcaccgaagcgcggcctgcgaacagcggcgggtcgtcgtaggcgtcggcgagcgcgccctcgccctcggcggcctgctccgttttcggctctcgctcggtgacgaggaagatcatgatcacgatgagcgcgcatcctgcgaggtcccagccgctcaccggcgtatggagccacgcgagcgcgaggatcatggccgaaacgggctcgacgcagcacagaaggctcgccttgacggggcctgcgtcgttcacgccctgcagatacagcatgtaggctcccaaggtgcccacgatcacgatggcaaccagcgccgcgatgccgccgagcggcaggttcaccggcatggtccacggctgcaccaccaccgaggcggccgatccgccgaacagcatggcaaggcccgtcaccagcatggagccccacttcttcagcacgcgcacgggcatgagggtgtagaacgtcaaagccacggccgacacgaggccccaggccaatccctcggcggggatggccagctggtcgatctcgccttgcgtgacgatgatcagcatgccgcccagcgcgaacacgaggcctgccgcctcgcgagcacgcggcaggcgcttggcgcgaacgcacacgtacagcatgatgagcacgagccccacctgctcgatggtagtgcccacgccggcactcgtgtacgagatggcgttcaagtagctgagctgggtcaacagcacgccgaatatggcgaacgccgcgatctgcgcgagcgagcgccagtctcggaacaccgctacgagatcgcgccagttgcgcaccgcggtaaggaacaggaagaacacggcggcgatgaccatgcgcacgcaggtgatccacgtggcgggagcgccgtagtcgttcatgagcagctgggcgcacgtgcccgagaagccccagcagatgccgcccgcaagcgcgcatacgatgccgcgcacaacatgacggttccccgccaccgtttccgccacttgaatcgaaccctcttcccgcatgctctctccgccgtctgcaaagcgggcattgtcgcacgtcccgccgacgcggtaaagggggtttcgagagatcgccgcaaaacaccagcaagcggtcgaaaagatccctcggcctgcgttccctacagccggccgtcctccagcatcttcttcacgaaggcgccggtgtagctgccctccacctgggcgacctcctcgggcgtgccctgggccaccacggtgccgccgcgctcgccgccctcggggccgaggtcgacgatgcggtcggcgcacttgatgacgtcgaggttgtgctcgatgaccagcacggtgttgcccgcgtccaccaggcgctgcaacacgatgagcagctggcgcacgtcctcgaagtgcaggccggtggtgggctcgtccaggatgtagaacgtcttgccggtctggcggcgctgcagctcgctggcaagcttcacgcgctgcgcctcgccgccggacagcgtggtggccggctgccccaggcggatgtagcccaggcccacgtcgaacagcgtctgcagcttgcgcttgatgccgggtatgttctcgaagaacgccagcgcgtcctccacggtcatgtccagcacctcggcgatgttcttgccgcggtaagtcacctgcagcgtctcgcggttgtagcggtcgccgccgcacacctcgcacggcacgtagatgtcgggcaggaagtgcatctcgatcttgatctggccgtcgcccttgcacgcctcgcagcgtccgccgttcacgttgaacgagaagcggcccggcgagtagccgcgggccttcgactcctgcgtggaggcgaacagcgcgcggatgtcgtcccaaaggcctatgtaggtggccgggttagaacgcggcgtgcgcccgatggggctctggtcgatgttgatgaccttgtcgatcttgtccagcccggtgatcttcttgtaggcgcccgtgcggcggtgcgcatggttcacgcggttcgcgagcgccggcgccagcgtgtcggtgaccagcgagctcttgcccgagccggacacgcccgtgaccacggtgagcgtgccgaagggaacctcgagcgtgacgttgtgcaggttgttctcggtggcgcccgtcagcttgagcgacccgcggcgcggcttgcggcgcttctcgggcacctcgatgcggcgccggcccgacaggtagtcggccgtgagcgagccttcggccttcatgatctcgtccggcgtgccgatggccacgatctcgccgccgtgctcgcccgcgcccgggcccatgtccaccacgaagtcggcgctgcggatggtgtcctcgtcgtgctccaccacgatgacggtgttccctaagtcgcgcaggcgctcgagcgtggcgatgagccgctcgttgtcgcgctggtgcaggccgatggaaggctcgtccaggatgtagagcacgcccatgaggcccgcgccgatctgcgtggccaggcggatgcgctgcgcctcgccgccggagagcgtcgccgtggcgcgctccagcgtgaggtagtccagacccacgtccacgaggaacttgaggcgcgccttgatctccttcacgatgggcccggcgatatgctcctccgacccgtggaacgcgaggccgtcgaagaattcgagcgagtccgccgcgctcatctcggtgatgtcgtggatggagcgttcgttcaccgtgacggcgaggatctcgggcttcaggcgcttgccgccgcaggtcgggcacggaacgatggcgaagtagctggccagcttctcgcgctgagcgtcggactgagcctcctggtagcggcgctgcactgcggccagcgctccctcccactcgatgtaccagtacgtctcgcgaccgtccaccgtgacgtagtcgacgcgcaccttgtccttgcccaggccgtgcagaagcccgtcctgcgccttcttaggcatatcctcccacggggtgtcggcgtcggtgccgaggtgcgcggccacggcgcgcagcacctgcgggtagtagttgccggtcttgaacggcgcgatggcgccctcgttcagcgacagcgacgggtcgggcaccaccagcgacgcgtccacctcctcgcggctgccgatgccgaggcagtcggggcaggcgccatagggtgcgttgaacgagaagtcgcgcggctgcagctcgtccatggagtgtccgtgctcggggcatgccagcgcgagcgagaagatgtgctcccccgcgcccaggccgcccgtcgcgccggacgagcgcccgccgccctcgccgagcggcttgccgtcgtcgcccagcacctgcacgagcacgcgcccgtcggccaacttcgtggccagctccaccgcctcggcgatgcggctcgtcgcgctcgctttaagctgcacgcggtccaccaccacgtcgatgaagtgcttgatcttcttgttgagcgtgcgcggctcgccgtccagcttcacgatctcgccatcgatgcgcacgcggctgaagccctccttctgcaggtcggcgaacagcttcgtgaactcgcccttgcggcccgccaccacgggagccatgatgatggccttcgcatcgggcgcgagggcgaggatctcgtcggtcacctggtcggtggtctgcttcttgatgacgcggccgcactcggggcagtgcggcacgcccacgcgcgcgaacaggaggcgcaggtagtcgtagatctcggtggtggtgcccaccgtcgagcgcgggttcttcgacgtggtcttctggtcgatggacaccgccggcgacaggccgtcgatgctgtcgaggtcgggcttcgacatctggcccaggaacatgcgcgcgtagctggacaggctctccacgtagcggcgctggccctcggcgtacatcgtgtcgaacgccagcgacgacttgccgctgcccgacaggcccgtgatgaccaccagctcgtcgcgcgggatggagaggtcgatgtccttgaggttgtgctcgcgggcacccttgatgacgatggcgttctgtcccatgtggcttatcgctctttctatcgttcgcagcccggcgcggcgccggagtcgaatatggctaccggagaactatcatttccgtgcaatcgctcattttagcgcagtccgaccgcggaataggcaaaaacatccgttcgtctgattcgttcaaattctgagcacaaactgttcgattcggcatggttcgaggtcgatccgcattccccgactcaagggaaaaacgcgcgtgcgcgttcggttggattctggtatcctcgcgatcgagaccaggaggagtcacatgacccaacaggacagccccaagatcgctcggcgccgcgaccgcgaaaagcgcaccatatcccaaatggtggcgttgtattgcgccgacaatcacgacgcggccgcgcgaacggaaaccgcccactgcggcgaggccgtgtgccccggctgcgcgagcatcgacgcctatgccgtgctgcgcaccgagcgctgccgcaagatggacgtgaagacctcgtgcgacgaatgcgagcaccactgttacaagcccgaggaacgcgaacgcatccgcgccgtcatgcgctacgccggcccgcgcatgctgaaaaagcatcctttggccgccatccgccatctgctgggaaagtagaggcgccttcgacccgcatgccgagaccctactccgctttgtccccgtaggcggcatagtaggccgacgttgcggtatcgcagcagttcattaccgtccccacgagattagcgcccgccgcgcgcaactgttcggctgccttctggacgcttgcgcgctcgacgaagccttcgcgcaccacgagcagcgtcgcatcggatacctgggcgacgacggcggcgtccacgaacgcgcccaccggcggagtgtcgatgaccacgtggtcgtaacgagcggccaggcatccgagcaagcgcctgaatcgttgggaatcgagaatgtcgacggggctggtcacgcctgcttcggcatcgaggaaatgcatgcgcggctgacgagtggccacgatagcccgccccggttcctcatcccccatcacgacggcgcagagcccgacgggagcgcgcacccccaacctgtccgccagcgagcgccgccgcaggtcgcattccacgagcagcgtgcgcttccccgccacggccatcacgcgagccagctcaacggccaccgtcgttttgccctcgttcggcaccgagctcgtcaccacgatcgtgcgcatcggcttgtcgaagctcatgaaccccaagttcgcgtacagcgtgctcatcgcgttgcgctgcagcgggcgcggaagctcggcgttcagaaccctcgtcttcttcttgaacatcttcatcatcgattctccggttcgcgcaggaggaagcccggctcgaccgcccagggtcgcttacgcaccgtcaaacttcctcccacatcctcaacacggcttcatatatgaagccgtgttgaggattataccgaataatctgaacgaatggatgctgataggaaaagagtgcttttagggagcgcgattcgcgagcgaagggaggcgcagagcctgtctcagcagaagctcgccctcatgatcggcagcagcaaatcgcacatctggcgcatcgagtcgggacgcgtgagcgtgggtctcgacgacctcggccgtatcgccgacgccctcgacgtgcaggtccgcgacctcttctcgttctaaccgcgcatcgttcgaggcgcggcaccccccc

SEQ ID NO: 9632 - DNA, 254 bp, Unknown
  gut microbiota DNA sequence
aaggcgagatccatcgcgacgacaaggtgcgcattgtccgcgacggcaccatcatcttcgagggcgtcatggcatcgctgcgccgcttcaaggacgatgtgaagtccgtgaagcagggctacgagtgcggcatcggcgtcgagaagttccaggacctcaagatcggcgaccacatcgaaggctacaccgtgaaggaagtcgagcgcaccgagtaagaagatgaacctgcgccgcggcgtcgcggggtaatgccc

SEQ ID NO: 9633 - DNA, 393 bp, Unknown
  gut microbiota DNA sequence
tacagcgaaatgctcgaaggggttcagtcgttggatgccgaaaccggtaacgcccttctcgacgacgccgaggtccttttgcagaagcgcttgtgcgacatcctggtgttttcccgcaacgtggtgcgcgaggttcctccgtatctgcggggaaagaacctggttcatcgcgtgtcgttcttgaatcgagcggagggggtgagcgtggccgaattccgtcgagagtggtgttatgctcacgcgaagctggtggaggctgctcccggccatgcgggctacaatcaaaacctcgtgatcgaccgattcgtagacggggcgagcgtttccagcgagaagcttccctgcgatggcatggccgagttctatttcgaggacatggatgccttcgagtgc

SEQ ID NO: 9634 - DNA, 207 bp, Unknown
  gut microbiota DNA sequence
ggctgaacaaggagaagatatcgaatcgctcggtttgaaggttcccgacgaagcggaaagcgtcagcgcgccaatagcgatgcccgcatgggagcgtgttgccgaaacggctgccgatagtcgcgagggggaagttgccgaggcgcaattgagcgacgaagaggtcgagcgtctgtttctgacggcggtattcgatgacgtgcgcgc

SEQ ID NO: 9635 - DNA, 2179 bp, Unknown
  gut microbiota DNA sequence
ttcgacgggctgaaatgggtgagctccgtcgccgcgccgctgctggtggccatctgcctgtacggcgtgggcgcttcggtggcgcagaccggcagcctcgacgcgctgttgggctacgtgccgctgcccgccgacgccatcggcctcatcgcgggcgtcaacatggcggtggggctgttcgcgttcgcgggcgccacggccggcgacttcgcccgcttcgcgcgcacgcgcaaggacgccgtgctttcgtgcgtcgtcggcgtcatccccgcagcgcttgtggcgctgctggccggcgcggcgctggccatcgtaaccggccagggcgacatcgcgcgtatcatgaactccatcgggctgcccgcggtaggcctcatcgcgctcgtgctgtcggcgtggacggtgaacgcgagcaacgtgtactccgccgggctcggcttcgcggtcatgctggggaagggcgagggcggcagcaagctgaccacggccgtctcgggcgttgcgggcatcgtgctggcggtgggcggcatcctcgggcagttcgaggcgttcctcaccgtgctgtcggcttgcggccccgcgctggccggcgtgatggtggcggactactggctggtgcgcaagggccgcccggcgaacgtgcgcgtgcccgacggcgtgtccgcggcgggcgtggcagggcttgcgtgcggcatcgcggtggcgctcgtcacgggcggcacgttcgcgctggtgccggggctggaagcgctcgacctgccgttcttcgtcgggccggtgaacggcatcgtcgtggcgatggccgcctatgcgctgtcctaccgcctgacgggcggcgagcgcttcgcggggcccgtcgcgttcaagcgacccgcggaatcggctatcatgaaccaggtcacactcgacgcttcggaacgcgcacaggaaggacaagcatgagaaagatcggcatccaggaaatcgaggacatcgcgctgggcgcggcgctcctcggcgccggcgggggcggagatccctacatcggcaagctcacggccatcggcgccgtgaaggaatgcggcgaggtggagctgatcggcatcgacgaggtgcccgacggcgcgttcatcatgcccgccgcatccatgggcgcacccaccatccttgccgagaagggcgtgggcgccaacgagttcgccaagctgttcgatatggtgtcgcgctactacggcaagcccatctacgccaccatgcccatcgaggccggcggcgtgaactccatgctgcccatcgccgcggccgcgcgtctcggcattcccatggtggacgtggacggcatgggccgcgcattccccgagctgcagatggtcacgttcaccatcggcggcgcgtcggccacgcccatggcgttcatcgacgagaagggcaactccggcatcctcgataccatcacgaacaagtggaccgaggacatcgcccgcgccgccaccatgaccatgggcggcacgctgaccatcgcgctgttctgcatggacgtagacacctgcaagcagtacggcgtgcacggcatcgtgacgcgctccgaggaactgggccgcgccatccgaacggcgaaggacgaggcggctgcggccggcctcacgcccgaggggttcttcctgaagttcacgggcggtcacaagctgttcaagggcaagatctccgacgtgctgcgcgagacgcgcggggcgttcaacttcggccgcgtggtgctggagggcatcggcgaggaccgcggcagccaggcgttcgtcgatttccagaacgagaacctcagctgcgtggtggacggccagatcaaggccaccgtgcccgacctcatctgcctcgtggaccccgacacgttcacgcccgttcccaccgacgcgctgaagtacggcaagcgtgtgctggccgtgggcctggagtgcttccacctgtggcgcacgcaggcgggtctcgacctcgtggggccgcgctacttcggcatcgataccgactatatccccgtcgaagagcgcagcgcgcggaaggaggcgtaaggccatgtacaaattgggcatcgacgtgggcggcaccaacacggacgccgttttgatcgacgagaacctgaacgtggtggcggcggtgaagaaccccacgtcggacgatatctacacgggcatcatgggcgcggtgg

SEQ ID NO: 9636 - DNA, 2954 bp, Unknown
  gut microbiota DNA sequence
gacctgaacgtggtggcggcggtgaagaaccccacgtcggacgatatctacacgggcatcatgggctcggtggacgccgtgctggccgacagcggcgtggaccgcgcgcagatcgcgcaggccatgctgggcaccacccagtgcacgaacgccatcgtagagcgcaaggaccttgcgcctatcgccatcctgcgcatcggcgcgccggccacggtcggcatcccgccgatggtggactgggccgacgatatcgcttcggtgtgcgtggactcgctcatcatcgagggcggcttcgagtacgacggcaagcgcctggcggagttcgacgaggccgcgtgccgcgcgttcttcgagggcgtgaagggccgcgttgaggctgtggccgtgtccagcgtgttctccaccgtgcgcaacgacgacgagctgcgcgccgcgaccatcgcgcgcgaggtgctgggcgaggacgtgcacgtgtccatctccagcgagatcggctcgatgggcctgatcgagcgcgagaacgccaccatcttgaacgcggcgctgtacgacgtggcgcgcaagttcaccgagggcttcgcggccagtctggccgacaagggcgtgacgaacgccgaagtgtacctgtcgcaaaacgacggcacgctcatgaccatggaacacgcgcgccgctatcccatcctcaccatcgcgtgcgggccgacgaactccatccgcggcgccagctacctgtcgcgccgcgacgacgccatcgtcatcgacgtgggcggcaccaccactgacctgggcgttctgtcgcacggcttcccgcgcgagagcggcgtggcggtgaccatcggcggcgtgcgcacgaacttccgcatgcccgacgtggtgtccatcggcctgggcggcggttccatcgtgcgcgtggccgatgacggcagcgtcaccgtggggcctgattcggtgggctacgccatcaccgagcgcgcgctggtgttcggcggcgatacgatgacggccaccgacatcgccgtacgcctgggaatggcttcggtgggggatccctcgctcgtggcggatatcccgcaggacgtggccgagcgcgcgatggccgtcatacgcgcgatggtggagggcgccatcgacgtgatgaaggtgtccagcgatcctatcgacgtggtgctggtgggcggcggcgccatcgtgctgccgcacgagctggccggcacggccgaggtggacgcgcccgagcacgcgggctgcgcgaacgccatcggctcggccatctcgaaggtcagcggcgcgtacgaggcgttggtggactacgatgtcacgccgcgcgacgaggcgctggccgcggcgcgcgcagcggccatcgaggcggccgtggaggccggcgccgtgcgcgacaccgtggagatcatcgacgccgaagacgtgccgctggcgtactacccgggccacacgaaccgcgtgaaggtgaaagccgcgggcgacctggcgtagttcgggttccgagcatcgcgccttgccgagcgcggccgtcaacgcgacggccgcgcttcttttcccagtcgatccgttggcgttcgcttgtgttatcatacgactagatgatactttgacaggaaggttggggcgcgtgttcgagacgttgcgggtgaacgatacgtcgggcgttcccgtgtggatccaaatccgcaaccacatgatcttcctcatcaggtcagggcacttgaggccgggggatacgttgcctacggtgcgcgagctggctattcagctcggggtaaactacaacaccatccataaggtgtatcaggatctggagaccgacggactgatcttgtcgggacgcggaaaacgctcgaccatcgcggaaatcgatcgggaagcgctcagcctgcccgattcgcctgtagacgtggtgatcgaggaattggttcgcgtgatacgggagacgggggtttcccgcgcggacgcgatggcgcggatcgaggaagcgttcgcgaagctcgaggatcgataggggagagccatgggcgagaagaagtcgtatttcgacgagcaggacgagggaagcgtcgacgacgccgtcattgccacggaggcgcagttcgacgagacgacgaccagccgcacgggcgcgacagcgcttcggtgggtgctgacgctgatcgtgttcttcctgttcgcaggcatggggtggcttacatggtcgcttgcgcctgtcgtcgtgggcgcgttggccagcgccgtgctgttcagctgcatgcacgtggtgctggagtgggagcgctcggtggttttgcgcttcggcaagttcaaccgcgtggccggccccggcctcatcttcatgatcccgctcgtggaatactcggcggccaccgtggacatgcgcatgcgctcgacggcgttcaaagctgagcacgtgctgaccgctgacctcgtacccgtgaacgtggacgccgtgctgttctggacggtgtgggatgccgggaaggcgtgctccgaggtgaagaactacgtccgcctggtgtactgggcggcgcagaccaccctgcgcgacgtgatgggcgcggtgaacatcgcccagctgagcacgcgccgcgagcagatcgaccgcgaagtggccgacattctcgagcgcaagacgaacgagtggggcatcaccgtggtgtcggtggaaatccgcgacatcgagatccccgacgacctgcaggaatcgctgtcggccgaggcgcgcgccgagcgcgagtacaacgcgcgcatcatcctggccgaggtggagaaggagatctcggagatgttcgtggatgccgcgcgcacgtacgggcgcgaggatgcggccctccagctgcgcgcgatgagcttcgtgtccgacagcgtgcgcgagaagggcggtctcgtggtcatccccagcgccctgtccgaggcgttcgaggggttggagaacatcgcgaagaaag

SEQ ID NO: 9637 - DNA, 245 bp, Unknown
  gut microbiota DNA sequence
gcaggcgcccacgcccgtgcatttttcctggttgatgtgcaccaggcccgtcttggtatccttctcgatggcaccctgcgggcacttggccatgcaggccggcatcgcgcagtgctggcagcccagcgacacgtggtaggcgaacgcgtcggacgtgaaggtgccgtcgcccacgtcgctccaggcgccgccctcgtagtcgtacaccttgcggaatgcgatggtggcggacaggtccttgtagt

SEQ ID NO: 9638 - DNA, 213 bp, Unknown
  gut microbiota DNA sequence
ggcgtcgccgagcgattccaggaacatcgcggcgaacgcggggccgcagccggcgatggagctggccgtggacagcagtttgccgtcgacccattcgatgagcgcgatccggccgaacaggttctcgaacgtctgcagctgctcgtcggtgagcgagtggcgctgctcgcaggcgatcacgcccgcgcccacggcgatgggcgtgttggggat

SEQ ID NO: 9639 - DNA, 633 bp, Unknown
  gut microbiota DNA sequence
tccagatgaagcttggcggtgcccatcatcatctgcgccgcgaggcggtaggcggtggcgcgcggcaggccgtgcttcacgccggcgtcgccgagcgattccaggaacatcgcggcgaacgcggggccgcagccggcgatggagctggccgtggaaagcagcttgccgtcgacccactcgatgagcgcgatccggccgaacaggttctcgaacgcttccagctcctcgtcggtgagcgagtggcgctgctcgcaggcgatcacgcccgcgcccacggcgatgggcgtgttggggatggtgctgaggtgacggctgttcggagcgaggacgccctcgtagaacgcgaagtcgcgcccggcggccaccgagatcacggccttgtcggcaagcaggtcgcgcaccggctccaccacctgttcgatgaggtagggcttcaccgccaggacgacgaagtcgctggctctcaccacctcggccgcctcgcggtaggcgttcacgccgagcttctcggccgaggcctgcagtttgtcgaagtgtcccgcgcacgcgtggatgtgctcgcccgaaagcgcgcccgagtccacgaggccctgcgccatcgcctgggccatgttgccgaacccgatgaagccg

SEQ ID NO: 9640 - DNA, 325 bp, Unknown
  gut microbiota DNA sequence
agtccagccgacgaagcgcttggcagccgcagcggcctcgaaccgccacgagttcaagcgatcgaacgtggtcgttccgtcttcgaacacgtccacgatggtgcagacgaactccaccttgtgagctgcgcagcgcgcgagcgcgtacgacggatcgggcagaagctgcaggtgggcgtgcgtgtcggccacaggcccctcgagctggggagcgtccaccacgcggtaacggccgtgcttgcgcttctgccggaactgcggatcgtcgaagacgggttccgcgctctgttcgtcgaccatggtcgcgtcctttcttgctcgcagg

SEQ ID NO: 9641 - DNA, 958 bp, Unknown
  gut microbiota DNA sequence
cgtttcctcaacggcacgattttcggtgtggatgacaatacagcccagtttgcgcatgagcgcgcgggcgtcttccagatcccggtacacgtactcggggtcggcgtagcgcgacgcgacggcgctcgcccgccccaaacggcgctggcggatgccgatgagcacctcgggcgtggtcatcaagccgaacagccgcgtgcgatcgatctgctcgagctcggccgggggctcggtggtgggatcgagcgggatgttcgccaccttgtagccctgctgcgacaagtagatggacgtgggcgtcttcgacgagcgcgacacgcccagaagcacgatgtcggcctgatgcagctcctgcgggttgcggccgtcgtcatgggcgatggtgaactcgatggcctcgatgcgccggaagtagtactggtcggccacgtgcaggccgcccggcttcgtggagggctcgcggcccgtcatgcgcgcgatggcgccgatggcgtcggtgacgaggtcgacggccacgatgtcgtcgcggcctgcggcatagtcggcgaactgctgcgacaacgcgcggtcgaccagcgtgtagaacacgagcatgcgcccgtctccggtgttgcggcggtgcacggcgctgtgctcgtcgatgaaggcagatatctcctcgaacgtgcgcaccttcggcagcacttcgatgacggggttcgtgacgccgaactgggcggcggccgcacgggccaccgcttgggccgtcaggcccaccgagtcgctgatcacgtggatcgtgggcaactcggtggagcttccgtaggcgatgaactcgtccatgggctacttcgcgcccttggccatcttgccgaagtccgccacatgggcgaacacggcgacgaagcggttgagcaggcgcaggcggttctcgcgcagggcgaggtcgtcgtccatgatgagcacgtcctcgaagaac

SEQ ID NO: 9642 - DNA, 211 bp, Unknown
  gut microbiota DNA sequence
gcccgtcagcgccaccagcgtctcggccaagccgataaagcccagcgacaacgtgccgtgcttcagcacctcacgctgctcgtcggtaggcgccagcttctcggaatcgatccacacgccctggcccatgaggaacggtgcgttgtacacgtgcttgcgcgcctggatctcgaagcgctcgtcaagctgccccaccgccagcgcaagcttc

SEQ ID NO: 9643 - DNA, 571 bp, Unknown
  gut microbiota DNA sequence
gcgaggtcgtttacgagccatgcctggccgaggatgttgaacggcagctgcgagttgtcccacaacgggtattcgccggcggcgttcggctggttcagcatgaaccccatggccagttccatgagcatgcacatgaccacggtggcggcgaagaactggatcccggcgctgacgagggtggcgcgccgggcgaccagcgccgtcttgagcggcatcagcacgagcgcgcagacgacgacgcccacgccgtacacgagaaacgggtacatcgggtcgtcccacacaagcgaatcggcatcgacgatgccgaatacgttcatgaacgagcagtagacgatctccatccagtgtcccaccacgctgaacacgcagaagtacacggccaggttccgccagaacgcgaaggagccgggctcgtagccgtaccgctcgtcttctttggagagaatgggcatggacgctgggtcgttctagccggccgcttcagaatcgtagctgtacgagagctcgatcgaggttgcgtccgaggagccggcatcgtcggcgtcgtcgaggtcgggaagcgccacgt

SEQ ID NO: 9644 - DNA, 1217 bp, Unknown
  gut microbiota DNA sequence
cctagccggccgcttcagaatcgtagctggacgagagctcgatcgaggttgcgtccgaggagccggcatcgtcggcgtcgtcgaggtcgggaagcgccacgttcacgtagtacaggaagatcaggatgcagaagccgacggtcacggctatgaaggcgatgttcatgccgtcccgggggaccttgctcagcagctgctcgagcgccgggtagatcacccatgtcatgagcgtggccaccacgccgaaggcgatggcgttctgcaggcacacctggcccatgaagttgcagaacatatcggagtagtcccataagggcagcttgccgtcagggccgggctggttgaccatgaggcccatgaccagctcgatggccgtgcagacgagcgcgttgacgacgaagctgatgagcaagggcaccacgcggctgcggatgcgcttttcgaggaagttcttgacggggtacagcagaagcacgcacgccacggctccgaacccgtacacgatgaaggggtagagccaatccgaccagatctgggaattcgggtcgtaggtgccgggtatcattccgaagcggatgagcgtgcaataggccgcctccatccagtgtcccaccacgctgaacacgcagaagtaaatgatgatgttgcgccagaacgcccaggtccgaggctggtagcagtccaggtccttcgcgagctcgcgttgtttgacctctgcgtcgaagggctgcgtcagcacggctttcgcgcgtctcgacgtgaggaagtacgcgagcaggatgaggtcgggagtgcacgagaacagctggccgacaaggctgaagtgaccggtcgcgatgttgaaggcggttccgatgaagatgttgaacaagctgaacccgatgatgaaatggcgcgccaggcgtttgcgctgccagatgagccagaagctgatgctgtcgaatatcaggttgacgaaatcgaggatgttcgagaattccagctcgtagctgcctttgatcaggaacgccaacagcgagatggtgacgacgacgttgaatgcaaagaagaactggaggacccgcatgaagccgagcttcttcgggttgctgaagtctttcgccatgggctgcggctccaatcacgcgcgacagatctatcctggtggcgcgcgtccccgatggcgttgcgcgcacagttcgtccagtatatctcggcagaccggcggaaggcgcgtt

SEQ ID NO: 9645 - DNA, 350 bp, Unknown
  gut microbiota DNA sequence
tcgacggatctatgcttgcggcgcgcgtccccgatggcgttgcgcgcacagttcgtccagtatatctcggcagaccggcggaaggcgcgttcggaaaggcagatgccgcgttcgcttcgcagaacgcggcgttcgtgccgctaccagcgtttgagcgtggggagcagggcgcccatgaacgaaacggcttcgtcgcgcgtgatgtggcacgactcggccatgaacggggcgcagcgctcgatcagctcctcgagcgtctcgtcttccagaaacgcgccgttcgcatagcaccacgagcagtagtcggccgacagagagccgtccgcctcggtgccatgatccttctcctg

SEQ ID NO: 9646 - DNA, 419 bp, Unknown
  gut microbiota DNA sequence
gacgagtacggcgacgacgagcgggcggcgcgcgccatgcgcacgaagtccgggcgtttgaaggcgcatcggcgcctcgagcgccgcgtggccgcgcggcgcggcgtggaaggcgcgcgcgaaaccggcgcggcggtgcccgttgcgccgagcgccgccgccgaaggcgagcgggacgagcgggcgagccgtcgcagccccgaggccgacgaggcgctggcttcgcgcgccgagaccgtgacgagcgaccgtatcacgcgcgacgtgaagcgtcgcgtcgacgaaagcgcgcgggcgcgatccgcgcgcgaccaggtccgcgatgaggcggagctgggagaggaggctttcttggataacgactacctgccgggcgagctggagcagcccgatgagcgcatcgcgcaggtgcgcagccc

SEQ ID NO: 9647 - DNA, 193 bp, Unknown
  gut microbiota DNA sequence
caccacggcatcgggttcgcccacaaacgcaagcgcgatacccagctgtgcgagcttctgcgatgtgagatccttcacgcgcacgttcgccacgtcgcccagctgccactgccgcaggtagtccgtaaccgcctcgcggcgcggcttacgaccgtacagctcgaactcggctcccaacgcatatgccgccgtc

SEQ ID NO: 9648 - DNA, 195 bp, Unknown
  gut microbiota DNA sequence
tgaacgtgttcgatggacgcgatgccctggagctggagttggcgcgccttgcccacgagcgcgatctgcccatgctgggcatctgccgcggcatgcaggtgctcaacgtggcgctgggcggcacgctgtaccaggacgtgcacgcctgcgggctcaccgacgcggcgcatcagcagaagcctccctacgacgtcg

SEQ ID NO: 9649 - DNA, 316 bp, Unknown
  gut microbiota DNA sequence
gggcttgaagatctccgaatcgcagatcaacaccgacctttctcgtcgtcagtccggttacgggcgcggcgggcgccagcgcatcgagcgcgacacggttgaggtcgtctccggcgtgcgcttcggccgcacgctgggaactcctatcgcgctcgtggtgcgcaaccgggactgggagaactggaccgatcgcatggccgcgttcggcgaggcttcgtccgacctcgcccgcgaggtcacgccacgccccggccacgccgacctcgtgggggcgctcaaaaccgacacgtccgactgccgcaacatcctcgagcgc

SEQ ID NO: 9650 - DNA, 877 bp, Unknown
  gut microbiota DNA sequence
ggagcgcacgcgcacccatgcagccggagggggatacccgtacgcggaacactcaccttcttacgatgatccccaggcattctgcaacatgaatggaggaggagacatgtctgagacgaagagcccgctcggcggactcacgcgtagaggcttcctgaagacgacgggtgccgtcacggccgtcgcggctgtcgcaggcacgggcgctgcgctggcgccgatgccggcgaatgcggagggaagttcatccgccgatggcgagcagacgttcaggagcgcatgccgcggcaactgcggtagccgctgccccttggaggtgacggtgcgcgagggcaaggtggtcaaagcccgtcccatggatatgcccggcgaggatgccgtccgcaagcgcttctgcgtgaaggggttcagccagccgcagcgcgtgtacgataccgaccggctcaagtaccccatgaagcgcgtcggggagcgcggagcgggcgagtgggagcgcatcagctgggacgaggctgttagcaccatcgcggagaagatgggcgcggctatcaaagattacggtggcacgtcggttgccgtttggtcctcgtatggttcgtacggcgttctgaacggtgcgatggcaggctacatgtccgttgcctacggtcgcttcatcacggccgtcgggggctcggtactgggagccggtgccgatacggcgcagcaacatgagcagtcgacgctgctggggatctcgggcaacgacttcgtggatgccgccaacgccaaaaccattatctcgtggggcggcaatccggcagaggcgtacgtgcatgcgtggcagttcgtgtgcgatgcgcgcgagaagggcgcaaagctcatcaccatcgacccg

SEQ ID NO: 9651 - DNA, 1396 bp, Unknown
  gut microbiota DNA sequence
gcatgagcagtcgacgctgctggggatttcgggcaacgacttcgtggatgccgccaacgccaagaccattatctcgtggggcggcaatccggcggaagcgtacgtgcatgcgtggcagttcgtgtgcgatgcgcgcgagaagggcgcaaagctcatcaccatcgacccgcagttcaccgcgtcggccatgcactccgacgtctacgttcccgtccggccgggcaccgacggcgcgctcatgctggccatggccaatcatattatcgagaacggcttgatggacgaagaattcatgcgaagcagcacggtgtctccgttcttggtgaaggaggacggcacgtaccttcacatgagcgatctgggcacgcctgccaccgagggaccggtcgatccgcgcacgggcaagcccaccgtgatcgatccggttgcggtgtgggacgaggctgccggcgcacctgcgaccgccgatgccgcgcagaagcccgccatcgaaggatcgttcgaggtgcagggtttcgccgtgaaaccggtctaccaagttgtcaaggagagcatttccgaatacaccgtcgagagggctgcggacatttgcgacctcccgaaggagcagatcgaggaactggcccgcgtgtatgccaccgaaggccccgtgtacgtcatgacgttccagggactcggacaccatgcgaactcccatcacaacttcaagaacctcgcgttcctcgcggctctgaccggcaacgccggcaagccgggcgcttccatctgcggcagcccatcgacgggcatggtgggctacaacgtgaaagcctacatgttgggaactcccggtgccagcttctgcggcatgtacctcccgaaggtcatggaggagaaaaagtgggcggggcaggatctcgagatccgtgttctgtggtgctgcaacggcaacatgctgtcctgcgagtcgggccgtcaagacctcatcgacgcggtcaagaagatcgacttcgtggtgtgcgcagacgtcaacatgaccgacactgcgcagtgggccgacatccttttgccggtgccccattcgttcgaggtgcaggatttcgacccggtgtgctcggtgccgtatcccacgttcacccagaaagcgctcgatcccctgtacgaatgcaagaccgatctggagatcatgcgtttggtgaccgcgaagatgggcatggacatctacccgaaatcggacgatgatttcttgaaggaagtcatcgacaccgaggccaacgtcaagcagggctgcacgttcgaagagcttaagacgggcaagctggttcgcgatgcttcttacaccgattcgcgtatggtgccgaagttcggcagcgccgaggcgcagcgtttgaagtactacctcgagaagcccacgccg

SEQ ID NO: 9652 - DNA, 919 bp, Unknown
  gut microbiota DNA sequence
tcgcgttctgtggtgctgcaacggcaacatgctgtcctgcgagtcgggccgtcaagacctcatcgacgctgtcaagaagatcgacttcgtggtgtgcgcagacgtcaacatgaccgacactgcgcagtgggccgatatccttttgccggtgccccattcgttcgaggtgcaggatttcgacccggtgtgctcggtgccgtatcccacgttcacccagaaagtgctcgaccctctgtacgaatgcaagaccgatctggagatcatgcgtctggtgaccgcgaagatgggcatggacatctacccgaaatcggacgatgatttcttgaaggaagtcatcgataccgaggccaacgtcaagcagggctgcacgttcgacgagctcaagacgggcaagctggttcgcgatgcttcttacaccgagtcgcgtatggtgccgaagttcggcagcgccgaggcgcagcgtttgaagtactacctcgagaagcccacgccgcgcaacaacttcgggcagaagatcgccgattgcgagcgtctgccttactacgagcacgcgaacgaggcatacgaggagaatccgctgcgcgacaagtatccgctgttcggatgcagcgagcacagcaagtatcacgtgcattcgcagctggcgtacacgccggtcatgcgcgagctcgagcccgagccgttgctgaaggtcaacgcgaccgatgccgccgagcgcggaatccagcagggcgactacgtgcgcgtctacaacgatcacggctatgccgtgctcaaggcgcgtgtgaccgagggcatcaagccgggagtcgtctctattccgcacggtttccaggctagccagttcgtcgaggggcatacgcaggatctgacgaatgtgtacatgaacgatttctgctcgaacagcgccttctacgac

SEQ ID NO: 9653 - DNA, 555 bp, Unknown
  gut microbiota DNA sequence
cattccgcacggtttccaggctagccagtttgtcgaggggcatacgcaggatctgacgaatgtgtacatgaacgatttctgctcgaacagcgccttctacgacttcctctgcgaagtcgagaagtacgaagggggtgtgaggtaatggcccgctacggcatggtcatcgacacgaagcgatgcgtggggtgcaacgcctgctccgtgaactgcaagataacaaacaaccttcccgagactaattggtggacccgggtcctcacggagggcggcgacgagatcgacacgccggccggcgtcttccctgacgtgtcgatgcgctatatcactgtaggctgccagcattgcgagaacccggcttgcacgaaggtgtgccctgtgggggcaacctacaaagatcccgagacgggcgtcgtgcgccaggactacgacaagtgcatcggctgccgtatgtgcatggcggcttgcccgtacacgggcgtgcgctcgttcaactgggaggagccgaagtaccccgtcgaccatgctgtcggcgatgcagacgtcccgaagcac

SEQ ID NO: 9654 - DNA, 1058 bp, Unknown
  gut microbiota DNA sequence
tcaggactacgacaagtgcatcggctgccgtatgtgcatggcggcttgcccgtacacgggcgtacgctcgttcaactgggaggagccgaagtaccccgtcgaccatgctgtcggcgatgcagacgtcccgaagcaccagaagcatgtggtcgagaaatgcaccttctgctaccagcgccttgcccgtgaggaggtgccggcatgcatggagttgtgcccggcccgcgcccgtcacttcggtgacttcgacgatccggattcggaggtgtcgaagcttgtcaaagagcgctcctacgagcagctgctggccagcgaaggcacgaagccatccgtgtactacctcgtgtaaggggattgatcatgtctgagaacgtatcggcggagaagtccgccaaggtttccgctgccggattcggcggcaaaggggttgctgtcgccatcgtggtggcggccattctcaccgtcggcggtttggctttgtgggcatttcagctgaccagcggcatggtgaacaccaacatgcgcaatctggactcgtgggggctttacatcacgatgttcatgttcctcgtcggtctgtccgccggcggccttatcgtctcgagcgctccgcgcgtgttcggcatggagggtttcggcggcgtgtcgaagatcgccgtgtggacctccatctgctgcacggtgctggcgatcggcttcgtcgtgatcgacctcggccagccgctgcgcctttgggagctgttcgtgtactccaatctcggctcgcctttgatgtgggacatcatcgtgctgggcacgtacctgatcctgtccgtcgtgtatttgtgggctatgctgcgcttcgagggcggcaagggctctgccgctgctttgcgcgtggtgtccgccatcgctctggtgtgcgccgtgctcgttcactcggtcaccgcttggatcttcggtttgcagcagggtcgcgagatgtggcataccgcgcttctgggcccctggttcgtgtcgtcggctctggtgtgcggcgtggcgctcgtgctcgtcgtggtcatcgcgctgcgcaaggc

SEQ ID NO: 9655 - DNA, 380 bp, Unknown
  gut microbiota DNA sequence
gccggatcgggggcggaggtcgtcgccatgctgaccacgggtccgctcgctcctttcttctggatcgaagtcgtagggtgcgccgccaccgcggtcatcgccttcgtgccgaagctgcgcacgaacccgcttatcgtgattgcggcggtgctggctatcgtgggcatcttctgcaagcgcgtgcagctgctggtgggcggcttccagatcccgaacctcgatatgcccgccgtcgtgtccggtccggctcttacggatgcgggtgcggctctgcagagcgcaggcggatcgatggtgtactttccgtcgatgctcgaattcggcgtcgtgctgggcgttttcgggctgggcgcgctcatgctgctgctgggcctcaagtt

SEQ ID NO: 9656 - DNA, 2486 bp, Unknown
  gut microbiota DNA sequence
ctttacgggaatcgtcgtgttcggggctgttgcggctgcgagtcccgcggtggggcttccccggcctatcgagccccactcgccttgcccggtcgtcgggtgcgcgtcggggtcgtgccatggtttcggcgatgtgcccgagccggatggcgtgcacgagatggcctgtcccgaggcgggctgcgccagcgtcgagtgtcatgcgtgggacacgctggcgacgcgctatcaccgcgcgtccgatgccagcttgaacctctggatcttggcgccggtcgtgctcgtcgggctgcttgttctgatcgtgcgaaagctttaagaggggaagtgacctggtgaagcggatgttcgttgttgatttctcggcgtttctggcttatgcgcttgcagcgcttccctcgttgacgggcgtgcctgcgcacgaatggtttggtttggccttgctggcgcccgttttcgtccattgcgcgcagcatgtcgatcgggtcgcgcgcgcccttccgcgatgcgcccgcggggcgcgtctgcggagctgcgggcgtttggcgctcgatgccgcgttgctcgtggcgctctcgaccgtcttcgtgtcgggattgggcatgtcgggcgcggtgctgcaggcgttcggcctgtatgccgaggggtattatacgtggtcgcctctgcatgccgcggcggcgaaggcgctgttcgcgcttcttctcgtgcatatggccgtgcatgcgggttcgctgtacaatctgctgaaacggcgcggcgttgcaaaggccgccgcgcatgacgacggaggtttcgacgatgagcgccgatctgtttgaggcgaggcccacgctgcgcgcgtggcttgacgaatatgccgccatcgaagccgattatcttgctcggcttgtcgattggggcatccgcatcgcgccgcgcgatgcggatgcggatgcggcccgcgcggcgaaggatcggctgcgggagaagggcgcgcagttccgcaacggcgatgcaggcgtcgtctgcggcaacctgtcgtcggcgtgcgtggcctgcacgggaggacgggggagcaagacgttcttcctgtcgctcgcatgcaatcgatcttgttatttctgcttcaacgccaaccaggccgactatgccgatcgtctgcgcgtgaacgatgcgtggcgcgacgaggtcgatgcgttcgccgatgcgtgcggcggcgaggtcacccatgtggggctgacggggggcgagcctttgcttcatgccgacgagtccgtgatgttctgcgcttacgttcgccagcgctttccgcgtgcccatatcaggttgtacaccgccggcgatttccttgacgaaccgctgctcgattgcttgcgcgacgccgggctcgacgagctgcgcatgagcatcaagctggacgttttcgacgtcgatcgcgccgatgagatcatcgatgatgccgtcgacgtgcttgcccgtgcgaagcgcttcatcccgcaggtgatggtggagatgcccgtgataccgggcacgggcgaggcgatgcgtcgtctgctggatcgtcttgatcaagtcggcgcgttcggcatcaaccttcttgagttctgctaccccatgggagcttgggacgagttcgagcgccgcggcttttcggtgaagaacccgccgtttcccgtgctgtacgactacggctacgcaggcggtctgccgctggcgggcagcgagctcttgtgcttggagttgttggagtacgcgcttgacgaggggttgtcccttagcgtgcattactgctcgctcgagaacaagcatcgcgatcagatctgcgttcaaaacggcgcttgctccgtcgatgcgggagtgtacgagcgcgatccgcatgatttcttcctgaaaacggtgaaagtgttcgacggcgacgtctccctggcgcggcgcgcgctggaggcgtgcggcgtcggcgcgttctcgcttgaggacgaaggccttagcctggccttccatccgcgccacatccctatcgtgcaagcactgcccgtcgtattgtgtcgatcgatcaacgtgctggaagaaaccgcggatggcttcatcgttcgcgagctgaaactggaacccttgaaaggcgaatgacgatgactgttgatgagctctggcaaacccgtgccgccgcctgggagctcgcggcgctgagcctgcgctacccgggcgcggagctggccggagccgcggcgggcggcgagtgggacgaggcggcaggggagatcctggccgcgctgggcctgcccgcggaggtccccgcggcggcgggcgagggcggctgcgacaccgcgggtcctgctggtgccgacgcgctcctgcgcgccctgcgcccggaggccacgcgcctgttcgtcggcgcgcccgggccagcctgctcgccctacgagggcgtgtgggccgccgaggccgacggggtgcagccgcttttgttcgtgaacccccgctccatggaggtcgagcgcttcatg

SEQ ID NO: 9657 - DNA, 503 bp, Unknown
  gut microbiota DNA sequence
ctgtgcttggagttgttggagtacgcgctcgacgaggggttgtcccttggcgtgcattactgctcgcccgagaacaagcaccgcgatcagatttgcgttcaaaacggcgcttgctccgtcgatgcgggagtgtacgagcgcgatccgcacgatttcttcctgaaaacggtgaaagtgttcgacggcgacgtctccttggcgcggcacgcgctggaggcgtgcggcgtcggcgcgttctcgcttgaggacgaaggccttagcctggctttccatccgcgtcacatccctatcgtgcaagcgctgcccgtcgtattgtgtcgatcgatcaacgtgctggaagaaaccgcggatggcttcatcgtccgcgagctgaaactggaacctgtgaaaggcgaatgacgatgactgttgaagagctctggcaagcccgcgccgccgcctgggagctcgcggcgctgagcctgcgctacccgggcgcggagctggccggagccgcggcgggc

SEQ ID NO: 9658 - DNA, 274 bp, Unknown
  gut microbiota DNA sequence
gcgatcccggaagctcgcgtaccgcagtacgcttcgcctccgcgatcccccgaatcttcggcacgggaacggccctcgctgacgttactgaacctgttatgtttgagaaaggccgaacatggaattcgctaccatgatggagcttctgctctcgggcttggcgttcactttgcagatattcgtcaccacgctcatcggctcgctgccgttgggcgtgctggtggcgttcgggcgcatgagccggttcaagccggtcgcgctcgttacgcgcttc

SEQ ID NO: 9659 - DNA, 567 bp, Unknown
  gut microbiota DNA sequence
atgatggcgtcgggctcaagcgacagggcgcgcgcgatggccacgcgctggcgctggccgccggacagctggcccggcagggcatccagcacggagttcggcaggcccaccatctcgatgaggtcgagcacgcggcgctcgcgggacgtcttgtcgcccaccttgtgcaccacgagcggatccatcagctggtcgtgcacgctcatgcgcgcgttcagcgccgtggccggatcctggaacaccaccgagatcacgcggccgatgagacggcgctgcgcagccgagcgcttcgtcacgtcctcgcccttgaagaacaccttgcccgacgtgggctgttgcaaaccgcacatcacgttggccgtggtggacttgccgcagccggattcgcccacgatgcccaaggtttcgccgggcatgagcttgagggtgaggccgcgcacggcctgcaccttgttcggatgcaggatggagcccgtgcgcgttttgaacgtcactcggatgtcgtcgaggaagatgatgggggtgggttcgcccgctcccgttgcgggctggacgcccgcgttcacg

SEQ ID NO: 9660 - DNA, 516 bp, Unknown
  gut microbiota DNA sequence
tttgttcggatgcaggatggagcccgtgcgcgttttgaacgtcacgcggatgtcgtcgaggaagatgatgggggtgggttcgcccgctcccgttgcgggctggacgcccgcgttcacgcgttcctgctcgctcatatgatggcacctcctgggacgtacggtttgatgccgaggcgcttgagctcgctgtcgggcagctcggcgtagtagtggtcggagtcggacacgcgcttgagcacggggcgcagctgggacaccttgtcaggatggctggagcgcggcgtgaagcggtcgccctcggggaagtctttcgggctggggacgctgccgggcacctggtgcaggcgcgttccgccggcttcgatggacagcaccgaacccaagagaccgcgggtgtattcgtgcacgggatggcacaggatgtcggacacggggccctgctccaccacctggccggcgtacatgaccgtgatggagttggccacctcggcgacgagcgccaggtcgtggctcacg

SEQ ID NO: 9661 - DNA, 478 bp, Unknown
  gut microbiota DNA sequence
taccggaccctgttcgaccacctggccggcgtacatgaccgtgatggagttggccacctcggcgacgagcgccaggtcgtggctcacgaacaccatcgcgaagcccagctccttctgcagcttgttcaacaggtcgatgacctgcttctgcacggtcacgtcgagagccgtagtgggctcgtcggcgatgatgagcttcgggtcgcgcgtcagcgccatggcgatgagcacgcgctggcgctggccgccggacagttcgtgggggtaggagtcaagcgtgcgcttcggatcgagtcccaccagctccagcagctcctcggccgtgcgggttcctccgcgcttcgtgagctgcttcatctgggctttgatcagcatggacgggttcaacgaagagagcgcgtcctgatagatcatggcgatttcgcgaccgcgcaaggcgttcatctgcttctgatccatgttcagcaggttctggccg

SEQ ID NO: 9662 - DNA, 1904 bp, Unknown
  gut microbiota DNA sequence
taccagctccagcagctcctcggccgtgcgggttcctccgcgcttcgtgagctgcttcatttgggctttgatcagcatggacgggttcaacgaagagagcgcgtcctggtagatcatggcgatttcgcgaccgcgcaaggcgttcatctgcttctgatccatgttcagcaggttctggccgtcgtagaggatctcgccggacaccttagccttcggatccagcagccccatgatggtaagggaggtgatggacttgccgcagccggactcgcccacaagacccatggtctggcgcgggcgcaccacgaagctcacgtggtcgaccacgttcacgtcgccgtggcgcgggaacttgatgcacagatccttcacttccagaataggcggcacgtcggtgcgcgcctcgaagcggtcggtgcgcgtcttctcaatcgcctgaagctcgctgaggcgctgttcgagcatctccgcctgggcggcgtatgccagcgtggggtcggccacgagcttgtcggcctcgcggttcgcgcggacggcggcgtcatcggccttgaccggggccttgggcgcggcggccatggcatcggtgatgccctcggacaggatgttcaggcacagcacggtgatcatgatggccagacccgggaacagcgcctgccaccaacgaccggcaagcacgccgccgcgggcgtcggacaggatgttgccccacgtgggcgtgggctcgggaatgccggccgagatgaacgacagcgacgcttcgaacacgatggcgtcggccaccagcacgatggtgaacaccatgaccggggcgatgcagttgcggatgacgtgcttcacgaggatccagggggcgcgggcaccggaaacgacgacggcgcgcacgtaatcctgattgtactcgctcaccacgttggcgcgcacgatgcgggcgatctgcgggatgtacaaaaagccgatcgcgaagatgagcgagggcaccgagttgccgaacacgagtacgaacgtggcggccagcgcgataccggggaaggacatgatgacgtccaggatgcgcatgatgacctcggacacccatttgcgcgccacggcggcgacggcgccgatgatggagccgcacacgagggcgaaggcggtggcgcccaggccgatgatcagcgagtagcgcgcgccgtacatcatacgcgacagcacgtcgcggcccttgtcgtcggtgccgaacaggaactgggcatcgggggcttggcgtgccgtgaagatctcaagcgggttgtgcggcgccaggatgttggcgaacacggcgatcatgacgatcaggatgagcacgacgagcgagatgcgcgatccgatgctcatggccttccaccggcggaaatgcaccttgccgggattggcttccatcttatcagtgaggtttcctcgaagtttgaccatgttgctacaccgtcctgattcgcggatcgatcaggatataaagcatatccacgatgatgttgatgatgatgaaggtgatggccacgcacagcacgacgccctgcacgagcatcgtgtagctggactggatgcctgagaggatggccatgcccatgcccgggaggttgaagatgacctcgatgaccacggcgccgccgatgaggtagccgatgcgcaggccgagcaccgtcacgggcgtgatcagcgcgttgcgcagcacgttgcgggccaccacgacgcgcttcgggatgccggcgcccagcgcggtgcgcacgtagtccttgtccaactcttccaccatggacgtgcggatgacgcgcgtcagctggccggccacgggaacgcccagcgcgatggcaggcatggccatgcgggccagccaaccgcccggatcggccgtcagcgagggcagcgggccggaggcgggcagc

SEQ ID NO: 9663 - DNA, 6955 bp, Unknown
  gut microbiota DNA sequence
aatgccggcgcccagcgcggtgcgcacgtagtccttgtccagctcttccaccatggacgtgcggatgacgcgcgtcagctggccggccacgggaacgcccagcgcgatggcgggcatggccatgcgggccagccaaccgcccggatcggccgtcagcgagggcagcgggccggaggcgggcagcacgtgcagcatcgaggagaacagcaaaatcatgagcaccgccagccagaacgacggcgtggcgatgcaggcgatggagaacacgcggatgatctggtcgggccatcgatcccgatacaaggccgagatcacgccgaggatcactgcgatgaccacgccgatgatgaggccgaagaacgtcaactgcaacgtgacgggcagagcttcgccgatgcgatcggccaccgaggcgttgttcgcgccgtaggtgccgaggtcgccttgtacgaggccgacgatgaagttaccgtattgcacgaggatgggatcgttcaatccgtgctcctcgcgatactgctcggcttgggcttcagtggcgttctcgccaaggaccgaatacgcttggtcgataggagagagtgccatgatgaagaagacgaggatggtgacaccgaagatcatgatcggcaacgctatgaggcgtcgtccgattaatcgtagcaggttgctcaccgtatccccctttcgcttcgtgggctcgaaagcccgcttgcactgacaaactgctgcctgcatcgcgcgcgcaggcgcggtaaggcgtagacaaccaatggtattttatatgattcgcactgattatgcggagaaataagaacgatcttgcttcgtgtccgacgccgtcggtacgacctcgccgctcgagttaggacggattccgttcgcatacgagaaaccagctgctcccggttccgcgggcatgctcgcatccgacgcatgcctcgccgggacatagctccccggagcgaaacgtttcgtcgaacaggtcggcgggcagcagtcgttcatcgggttcggcaccttcgatgcacgacgcgatcaaagcggacagctggcgcattccccgtgcggtggggtgggtgccgtcgacggcctcgtagtctatgccgaacgcctcgaggtcggccacgttgcagccgtgctctcgcgcagcagcgcgaatggcgtcgttgtagctcttgaacggtgcgccgcgcaggttccatgcgaacgtggggctcgggcatccggccacgcgtccggggcagagcgtgcagcaccatacctcggcttgcgggtaggctgcgcgcatccgttccagcagcagcccgtaggcggcgcggaagcggtcgatcgcgccgggcgcggcggctgccggggcgtgcggttcgatggcgtcaagatcgagcgcgacgggcacggcgttgccgcggccggcggcttgcgccgtcgcgccgccccagccgtaatcgttgatgcccatgaacacgatgacgacatcgggctgcacgccgtcttcggccagcgcgtcgatgcgttcttggctgtttccggcagggaagccggcgccttccacgaggcttccggagaacgagctgttcgccagcagccgtccgccgaggcgttcgataacttgggaccaccaggtgtcggcgctcgacgtcacgccggtctgctcgcagcgttcgccctggtagtacacggtgaatccgtcggggttgcatccatcgaacgtgctgatggaatcgccgagaatggaaaaggatctcatagggcctctttctcaaaagcaagggctcgctccttgcggagcgagccctggggttgccttgctctacgggttcacagcgcgcgcttacgccttcacgctcgcaccgaggaacacgaggcccgtcgtggcgatgggctcgaagccggtgatctgcgtctcctggtagcccgtggccagctcgcggtggaacagcgggtacagcggaacttcctcggccagaaggtcgaagcacttgttccacagctcctgctgctcgttgccggtggcctcgcgagcctgctgcatgagggtctgcagctcgtcgaacttgccgtcgccggccttcttccagcagctgcggccctgggtccacacgttgtcgccgtaccaccaggacatcagcaggtcggggtcgttgccgaagcaggtcgggtcgcccggggtcagcatgacgtcgtagggcagcacgtcggccgactcggccagagacgcccagtcgatcttcgtctcgttgatggtgcagttcacgccgatggcatcgaggtcgttcttgatgccggcggccaggttcttcacccagttgttgttcgtcatcagctcgaagctcaggtcggtgacgccggcctcggaaagcaggctcttggccttctcggggtcgtaggtgtacaccgtggaagccttgtggtagttctcgtggctctcgggcaggaagctcgtcaccttcgcggcatggccggccatggcgttggagatcagcttgtccacgtccacggcatagtagaacgcctggcggacgcgcttatcgtcgaacggcttcttgagcgtgttgaacatgaagaacggctggttgaagccctggatgtagtcgacggacgcgccggcggccatgagctgttcggcgttggcgtcgggcacgttctccataacctggaccgtggcctcctgcagcgcggtggtgcgggaggtgtcgtcgagcaggatgtcccagtgcatcttgtcggccgtagcggcgtacttgccgttgtagttcgtgttcggcacgaactcgatggagccgccgtcgtcgccgttgatggtgtcgtacacccacgggccggaaccgatcggcttcgtcttcagatcatcctcggtcagcgaggcggggaacaccttgaccacgctcagacggcccttcagcaggctgtcgaaggggtacttcagcgtgaaggagacggtcttgtcgtccttcgcagacaccgtgtcgatgaattcgaggaaggcgccgtaggtggcgtcggccatgttcttctcgaacgcgttcaccacgtcggcggtggtgacgtccgtgccgtcggagaacttggcaccgtcgcgcagggcaacctcgtactcggtgtcggagaccttcgtgggctcgccggcggcaagcgcgttataggtcttgtaggtgtgcagatcgaggtcgtacaggccctcgaacacatgccacgtggcggccagcatcagcgcggagctgttgccgatcgggttgacgttcgtgctcgtgtaggccatggcgccggtcagcgtgccgccctgggccgctgcgccggcgtcggtgccggcatcggtcgacggggtgtccgtcgtttcgccgccgccaccgcagccggccagagtcaggcctgctgcagccgccgcgacggcgctgcccgccaagaacgtgcggcgagacaaagttgctttcaaaggctgttccattggtttccctccatttcggtatcggggcaggaggccccgaacgtacgtgcgtgcttgcgcacgcgcacaacagcagtgcccattatccgggaaaacccccagaaaataaagaacttgtaagatcaatgttcttatatttgttcaaatacgagaataattcaccaggggaaatacgtggtatcatgcgccgcatgatacgaaagagcgataaaagtaacagttggctaacggcgttcctcagccgcgaaaatcgaccgtttcccgcactggttgtccgtctctcgcgtccagcgttgcccgcgcccgccaagttgctggcgccgcccgcttcgaacgaggccgtgcgcaagtccatgaagggtaacaagcgcagcaacacgaagcccgagcttctggtgcgcgagcgcctgcgcgcggctggcctgacggggtatcggctgcagtggaaggtgccggggcacccggacgtagcgtggccgggcaagagggtggcgctgttcgtcaacgggtgcttctggcacaggtgcccgcactgcaagcccagcatgccgaagagcaacgtggagtactgggtggtgaagttcgagcgtaacgtcgagcgcgacgagcgcagccgcgccgcgttggaggagctaggctggaccgtccacgtgatctgggaatgccagctcaagaagaagacgatcgacgacacgttcgccgcgctgctccccgctctcgccgaggagctaggaaaagaactcaagggcatctagcgagaaggctggcgcacggtggtctggcgctcgaacggtcctgctcgcgcaaacagctcgctgggccgttcggctcgtgcggaaccgcgcccagaccgccgcgcgcaaaccttccgccgcctaccgacgggggcgaccgcggcgtgccgcccatcgtattcgtcgcaccgcaacgcgatttcgggctggtatcatgaatgccgtgtattctgtcaggcgaagcaagctgagcaagagcagaaggtcggggccccgatgcgcctttgtcgggtgagcatccccttcgaaggagaggaatatgacgagagaattcaaatctatggacggcaacaacgccgccgcgtacgtctcctatgcgtttaccgaggtggcgggcatttacccgatcactccgtcgagccccatggccgacctggtggaccagtggtccgctgccggcaagaagaacatcttcggcaccacagtgaaggtgtgcgagatgcagtccgagggcggcgccgccggcgcggtgcacggctcgctggccgcaggcgcgctgaccaccacctacacggcttcccagggtctgctcctcatgatccccaacatgtacaagatggccgccgagcagctgccgtgcgtgttccacgtcagcgcgcgcacgctggccacccaggcgctttccatcttcggcgaccattccgacgtcatggcgtgccgccagacgggcttcgccatgctggccgagacgaacgtgcaggaggtcatggacctgtcggccgtggcgcacctgtccgccatcaagggccgcattcctttcatcaacttcttcgacggcttccgcacctcccacgaagtgcagaagatcgccgtgtgggactacgaggatctcgccgacatgtgcgacatggaggctgtgagcgaattccgcgagcatgcgctgaaccccgagcgtccggccatgcgcggcagccatgagaacggcgacatcttcttccagcatcgcgaggcgtgcaacggcgtgtacgatgcgctgcccgccatcgtcgaggactacatgcaccaggtgaacgccaagctgggtacgaactacgagctgttcaactactatggcgcgcccgacgccgaccgcgtgatcgtggccatgggctcgttctgcgacgtggtcgaggaggtcgtggactatctgaacgcccagggccagaaggtgggcctcgtgaaggtgcgcctgtatcgcccgttcgtgagcgagaagttcatggccgcgctgcccgcgacggtgcagaagatcgcggtcatggaccgcacgaaggagccgggcgcgctcggcgagcccttgtatatggacgtcatcaacgcgctcgcgcacgagggccgcgccgatctcacggtggtaggcggccgctacggcctggcgtcgaaggacacccctccgtcttcggtgttcgccatctaccaggagctcgagaaggacgcgccggcgcgcgagttcaccgtgggcatcgtcgacgacgtgacgaacctgtcgcttcccgaggatccgaacagcccgaacaccgcagccgagggcaccatcgagtgcaagttctggggcctcggcggcgacggcacggtgggcgcgaacaagaactccatcaagatcatcggcgaccacaccgacaagtacgtgcaggcatacttccagtacgactcgaagaagaccggcggcgtgaccatcagccacctgcgcttcggcgactcgcctatccgcagcacctactatgtgaacaaggccgacttcgtggcttgccacaacccctcctacgtcaccaagggcttccgcatggtgaacgacgtgaagccgggcggtgcgttcatgatcaactgccagtggacgcccgaggagcttgagcaccacctgaacgccgaggcgaagcgctacatcgccaacaacgacatcaagctgtacaccatcaacgccatcgacctcgccgctgagatcggcatgggcaagcgtacgaacaccatcctgcagtcggcgttcttcacgctggccaacgtgatcccgcaggacgaggcgctgcagtacatgaaggacgccgccacgaagtcctatatgaagaagggtcaggacgtcgtcgacatgaaccatcgcgccatcgacgcgggcgccacggcgttcgtgcaggtggaggtgcctgcaagctgggcgaacgctgtggacgagaacgaggctccgacgctcgagggtcgtgccgaagtggtgaagatggtgcgcgagatcatggagccggtcggccgtatggacggcgaccgtctgccggtgtcggcgttcgtcgaccacgccgacggccagttcgagcagggcgcggccgcctacgagaagcgcggcgtggctgtgagcgtgcccgcgtgggatgccgccacgtgcatccagtgcaaccagtgcgctttcgcgtgcccgcatgccaccatccgcccgttcgccctcaccgaggaagaggctgctgcggctcccgccgctaccgtcatggtgcctgcgaagggcaaggccgctgccggcctgcagtacacgctggccatctcgccgctcgactgcatgggctgcggcgtgtgcgtgaacgtgtgcccgtctgactcgctggcaatggtatccacggaaagccagctggcgcagcaggacgtgttcgactactgcgtggacaacgtgtccgacaagcccgcgctcgaggatgccacggtcaagggcagccagttcaagcagccgctgctggagttctccggcgcctgcgcc

SEQ ID NO: 9664 - DNA, 454 bp, Unknown
  gut microbiota DNA sequence
ctcgcagttctgggtgcccgaaggcgagaaggtgctgcccagcggcatctgcccgctgatcaaggcgtcgctcggcgcgcacttcggcaagacgtgtccgtacttcagcgtggccgacatgtatgtgggcgagaccacgtgcgacggcaagaagaaggcctacgagatcctgggggctgacaagaagacctacgtcatggacgtgccgcagatgaagcgcgagaaggacatcgcggcgtggaaagacgagatcgcgctgttcgccaaggaggtggaggccgagacgggcaacgaactgacggccgagaaccttgctcgtgccattcgcaccatcaacgagaagcgtcgcgcgctggcccgcgtgttcgaggcgcgcaaggcagacccggtgcccatcagcggcaaggacgccctgctcatgatgcagatcgcgttcttcgacgacccggtgcgc

SEQ ID NO: 9665 - DNA, 190 bp, Unknown
  gut microbiota DNA sequence
gggagcgatctcgcgatcgggatcgtacacgttgcccatgacgcgcgtacggcagcccatgtaggcgatctctgtctcgggcgtgcccttgtagtactgcgcgttgaacggcgcgtcaatgaagctgaagttcgggaacaggcgcttcgcggagcaatgcatggccagcttgaacaggtcgtagttcgga

SEQ ID NO: 9666 - DNA, 1296 bp, Unknown
  gut microbiota DNA sequence
ccaacaggttgaaaaatcgacaatggacgccaggctatcgcttgtcggccaggaagaacagcgccatggtgccaggtcccgaatgggcgccgatgacggggtcgacgtagttgatgacgacctccttcacgccgaagcgctccttcacctcttgggccacgtactcggcgtcctcgaggcagtcgccgtgcgtgatgaacaccatctgctggtcgatgggggcgatggccgtcttctccatgtggtccaccagggcgtgcaacgacttcttgcgtccgcgcaccttctccagggggatgaggcgcccctcgtcgtccacgtgcatgaccggcttgatgttgagcatggtgcccgcccacgccgcggtcttcgacacgcgcccgccgcggaacaggaacatgaggtcgtccacggtgaaccagtgcgccaggttcaacttgtgctgctctacccagtcgcgcacctcgtcgatggaggcgccgcctcgggcgcgctgcacggcgtgccacacgagcaggccttcgccgcccgaggcggccagcgtgtccacggagcgcagcttccgctcggggaactccgcggccagctgcttcaccaggagctcgacggcctcgtaggtacccgacagcccgctggagaagcccaggtacagcacgtcgcgtccctgttccagcagcccgcgcatgagcgcctcggagtcggccaggttcggcagcgacgtggtgatcaccttgccgtcgcgcatcatcgtgtagaactgcttgaggtcggtgtgctgccccttgagatagctttgatactgctcgccgtccaccatgaaggtgaggggcaggatatgcagaccgaattcgtcgatcatgtcctcgacgaggttgcagctggaatcggtgacgatctcgaagttcatcggcatacgacgcgtccttccttgaaactgcagcggtcggaaaaacccgagcttcccgctgtgaatatgcgatcgttaaaagtataccgtttagcgtcgcgctcctgtgtcgcaattttgaaaagtgcgggcaggctcgccggaaacggcgttcgttccactatactatagcggtttatggcgacagaagcgcacatgctttgaggaaaggtacggcacccgtggcgaacacgtacaaagaaacgatgaacctgccgaagaccgacttcgcgatgcgggctaacctgcccgagagcgagccgaagcgtttggccaaatgggaagaagagcatatctacgagcaggttctcgagaagaacaaggacggcaagcccttcatcctgcacgac

SEQ ID NO: 9667 - DNA, 220 bp, Unknown
  gut microbiota DNA sequence
gaacctgcccgagagcgagccgaagcgtctggccaagtgggaagaagagcatatctacgagcaggttctcgagaagaacaaggacggcaagcccttcatcctgcacgacggccccccgtacgccaacggccccatccatatcggccacgccttcaacaagatcctcaaggacttcgtgaacaagtcccatgcgcagcgcgggttcttcacgccctacgtg

SEQ ID NO: 9668 - DNA, 4388 bp, Unknown
  gut microbiota DNA sequence
tccgtacgccaacggccccatccatatcggccatgccttcaacaagatcctcaaggacttcgtgaacaagtcccatgcgcagcgcgggttcttcacgccctacgtgcccggctgggattgccacggccagcccatcgagcatatggtggagaagaccctcggccccgacaaaatggccaagatcgaccagcccacgctgcgccgcctctgccgcgaatgggccgagaaatacgtcgacgtgcagcgcgagggcttcaagcgcctcggcgtgaacgccgattgggagcatccgtacctcacgttcacgccgaactacgaggcgggcaacgtcgaggtgttcaagcggatgtacctcgacggctcggtgtaccgcggccgcaaacccatccactggtgcaagcgctgccacacggcgcttgccgaggccgagatcgagtactccgacgagacgtcgccgtccatcttcgtgaagttcaagatggatatcatgcccggcatgttcgagactgcaggcgctgcgggcgacgcctacgtgctcatctggaccaccacgccctggacgcttccggcgaacacggccgtgtcgctggcgcccgacgccgactacgtgatggtccaggcggacggctccaacatgatcatggcgcgcgagctggtggaacaggtggccgagatcgcgggctgggaatcctacgacctcgtgcgcggcgaggacggcgagcccgtcgcgctcaagggccgcgaattcaccggcctcacctacacgtgccccgtccgccaggacctcaagggcaccatcatctacggcgaccacgtcacgctggactccggcacgggcgcggtgcacacggctcccggccatggtcaggacgactacctcgtggcgctggagttcgacgtgccgctgctcatgccggtggacgacaacggcgtgctcaccgacgaggcgggccctttcgcgggcctcgacgttgacgaggctaacccggtcatcatcgaatggctgcgcgaacgcggcacgctggtggcccaaaaggagatcctgcacagctacccgcactgctggcgctgccacgagccggtcatcttccgcgccaccgaccagtggttcgtgtccatggacaagaacagcctgcgcgagaacgcgctcaaggccatcgagaacgacgtcgagtggattcccgcgtgggcttcgaaccgtatcggatccatggtggccgaccgtcccgactggtgcatctcgcgccagcgttcgtggggcgtgcccatccccgtgttcaaatgtgcgaagtgcggctccaccgtggcgaacgagcagacattcgacgcggtgatcgacctgttctaccgcgagggcgccgacgcgtggttcacgcgcgagccgtccgagtacctgccgcgcggcgtgaaatgcgagacgtgcggctgcaccgagctgacccccgagaaggacatcctcgacgtgtggtgggagagcggcgtgtcgcacaccagcgtgttgaagcatcgcgaggccgagggcctgcgcttcccggccgacatgtacctggaaggctccgaccagcaccgcggctggttccagtcgtcgctgctcactagcatgggcgcgtacggcgtgccgccgtacaaggccgtcatgcactgcggcttcaccgtggacggcgaaggccgcaagatgtcgaaatcgctgggcaacggcgtggatccggccgaggtcatggcgaagagcggcgccgacgtgctgcgcctgtgggtggccagcgtcgattactcgcaggacgtgagcatctccgacgagatcctccaacgcacctccgaggcgtaccgccgcatccgcaacacgttccgcttcctgctgggcagcctggacgacttcgacgatcagaaggacgccgtgtccgattggaacgcgctcgagcccctcgaccagtgggccatggtgcgcacgaagcacctgctggacgacgtgagcgccgcctacgacgcgtacaagttccactatgtgtaccgcgccgtgtacgactacattgtgaacgacctgtcggccgtgtacatggacgcgacgaaggaccgcctgtactccgaggcgcctgactcgccgcgccgccgcgccgtgcagacggtactgatgaacatcctcgaggtgctcgtgcgcgtgctggcgccggtgctctcgttcaccaccgacgaggtgtgggagcactacccccaggccatgcgcgagcgcgcaggccgcccgacgaacgtgcagctggccggttggcccaaggcgtccgacttcgcgcccgccatccccgcggacggggagcgcgtgtccgaggacttcggcgtgatcatgggcgtgcgcgaagtcgtgaccaaggcgctcgaggacgcgcgcggccagaaggtcgtgaacaagagccaggaggcggccgtcgtcgtgaccgcgccccgcgccgtgctcgacgcggtggagcgctatgacgcggcggtgttcgaggagctgttcatcgtggcgtccgtgtcgttcgccgaaggcgaggagctggcggcgacggtttcgaagaccgaggccgagaaatgcccgcgctgctggaaccaccgtgcgctcggcggcaacgcgaaccacggatccgtctgcgagcgctgcggcgatgcgctcgacgccatcggcttcgcggaaggggaataggttcttggatacggaatcgcccgacaagcagccctcctcgcgtcgtcccgaacgaccggagcgggtcgatggaatcgatgcggcctcgtccgaaagcgttccgaccctttcggacgagcgaggcgattcgaaggaagccgccttttcggaggaagaagcccggcaattgaaggccgatcgctcgcgtcacacgcttgtgttcggcatcgtcgtgcttgcatggctcgctctcgacaccctcacgaagaactacttcaacggctcgtattccatgggggaggtgatcacggggccgttgctcggcctcgtgcggttccacctcgttcacaacacgggtgcggcttggggcatgttcggcgactccacgttccttctgggcgttatgtcgctgatcgtatgcgtgctgctcacggtgtatctgttcttcctagcgtatcgtcccaacatcgtgcaggtggtgggcgcggcgctcgtggtggcgggcggcctcggcaacgcgttcgatcgcttcgcgttaggctacgttgtggacttcatcgagccggtgttcatcgacttccccgtgttcaacgtggctgatattggcgtgacatgcggattcgtgctattccttgtcggcgttatcgtcagctggcgccacgaggatcgcctatccgcagagcttgccgcgtccgacggcgaaggcgaaggaaccgacgcgcgatgagccgcatgttgagctacgtcgcagcacccgacgacgcgggtcagcgcctcgatgcgcttttggccgcgcgcggtctgtatcccagccgtagcgcggctgcgcgcgcggtggacgacggcctcgtgttcgtgaacggcgcggaggttgcgaagaagcatcccgtggcgccgggcgacacgatcgtgtaccaggttgaggagccggtagagcccggccctttgcgcggccaacccatcgatctggacatacgcttcgaggacgaagacctcatcgtgctgtcgaagcaggtggggctcgtgtgccatccgtcggtcgaccatgacgacggcacgctggtgaacgccctcatctaccactgcggcgccgagaacctgtgcaacgtgcagggcgaggacgaccgtctgggcatcgtgcaccgcctcgaccgcgacacgagcggcctcatgctggcggcgaagaacgacgagacgggctatgccctcatgtcggacatccgcgatcgcgcggtcgaccgacgttacctggcgctcgtgcacggcgtgatcgcccacgacaccggtatgatcgacgctcccatcgcgcgcgccgagaaggagcgcacgcgcatggccgtccgcgacacgccgtcggctcgcgaggccatcacgacgtttcgggtgctcgagcgcttcgagcacggggcgcgcgacgacggctacacgctcatcgactgcaagctgttcacagggcgcacccatcagatacgcgtgcatctggagtacgcgaagcaccctcttgtgggcgacccggcgtacacgtcgggcgcgccgagcgcgcctgcggccgacctcggcctcgaccgccagttcctgcactcgttccagctgtcgttccagcatcccgtcacgggggagggcctgcgcttcgcggacaacctgcccgtcgacctgcaggaagcgctcgacgacctcgcctcccgcagcacgggccgcacgacggcgggggaggaagtgcgagcgttgctggaag

SEQ ID NO: 9669 - DNA, 35009 bp, Unknown
  gut microbiota DNA sequence
cccctcgcggtcgagcgcgagcagggtgacggcgatgttcagcgccatgaacaggctgagcgccgcggtgaccaggcgtgcgagcatgctcctggcatccacgtgcgagaacacccgcttgatgaacggcaggatcgtgcgcacccacacgaggcccagaagcccccacatcacgccgaacgcgaagttcgtgcggccgttgatgctgccgaacgtgccggtatagtcccaggcgatggcgccccacagcacctccatgagccagctcgtcgcgtactccatcaccgagcccagcagcatggctatgaggaagatgatgaggttgtgcgagtggtagaagcggttgagcgacaccgtgagcaccaccgcacccacgccgtatatgggcgagaacgggccccacacgaggccggcgcggctttcgtagccgccgtacacgatggcgtggaacaccgtctccactacgaggccgaacacgctgcctgcgacgaacagccagaacagcgtgaagtagtcgatcttgaggtatccctggttcggacggacctgctcgcgcgcctctttgccgatctcgcggaggatgcccggatgcggttcggggctttcgcagggggaggagccggcttcgggttcccgatcggacgtttcggcctgtcgcgacgtcgattccacagccgattttttcggttctttctccattcacctgccctgtcgatagtcaatgggctaaactataacagattttccagggcggaattcaaccgtttcgtcatgtctactccgcgggaaggtgatgaacatcgtgccagaggggaagcgctcgggggtgctcctagtgaacaccggcacgcctgccgtgcccaagccccgcgccgtgcggaaatatctcgccaagttcttgatggacaagcgtatcgcgccgatgaaccgggcaggatggtggttcgtccttcatctgttcatcctcccgaagcggggacgcgcgtctgccgagaaataccagaagatctggaccgacgaaggatcgccgttcaccatcgcccatcagaagctggaggccggcctgggggccgcgttcgaggacgaggggctggacgttgcggtgcgctgcgccatgagctacagcgacccgtcggtgctcgattgcgtgcgcgagctcaagggcgcgggctgcacgcgtctcatcgtgcttccgctgtacccgcaaagcgcctactcgaccaccggctcggtgtccgacagcgtggagcgcgcgctcaagaaggcgcgttgggacgtgccgtgcgacttcgtcgacaactaccacgacgaccccacctacatccgcgccatcgctgcgtccatcgagcatgccggtttcaaggtggactctgacgataaagtgctgttctcgtaccattccatcccgctcgtggacatcgaggcgggggacacctacgagctgcagacgggcgccaccagcttgcaggtggccagcgagctgggcatcgaccgcaaccgctggaccatcggctaccagtgccgtttcgacaagggccgcgaatggctctccccgtacacgcgcgacgtgctgacgcgctgggcggaaaccggggtgggacgcgtgttcttcatctgcccgaacttcgccgtcgattgtttggagacgctctacgacatcgaccacgagctcaagccgttttatttcgaccagatcaagcaggcgggtcgcacgcccggtgaggaaagcttcacgtacgtgccctgcctcgaccgcagccgcgcgcaccttcgagtgctttccgacgtgctgcgcccgcatatagaggagggctctcatgactaatgtgaacgaaggcgcggcaaaccccgcgcagaagaccgtgcttttgggcgtgacggggtgcatcgccgcctacaaatcgtgcgagatcgtgcggggcctgcagaaagcgggcgtgcgcgtgaaggtggtcatgaccgagcatgccaccgagtttgtgggacccacgacgttccgtgcgcttacgcacgagacggtggccgtgggcctgttcgacgacccgtccgaccccatccaccacgtgtcgctcgcgcaggaggccgacgtgttcctcatcgcgccgtgcaccgcgaacgtcatcgcgaagatcgcgaacggcatcgccgacgatctcttgaccaccacggcgctggccaccaccgcgccgctcgtcatcgcgccggccatgaacgtgaacatgtacgagaacggcgccacgcgctacaacataggcaagctgcatatccgcggcgcgcgcttcatcgacgcaggcgacggctacctggcgtgcggcgacatcggcaagggccggttggccgaggtggacgacatcgtgtcggcaacgctggacgagctgggcgtgaagcgcgacctggccgggcgcagtgtcatgatcaccgcgggccccacggttgagcccatcgacccggttcgctacatctcgaaccactcctccggcaagaccggctacgccctcgcgcgcgcggcggccctgcgcggcgccgacgtgacgctaatctcgggccccgtgtcgctggcggcgccgcagggcgtgcacatggtgcacgtgaagacggcgcgcgacatgttcgcggcggccgaggacgctttcgaagacgccgacatcgccatcttcgcggcagcggtggcggacatgcgtccgcgcgaggcggccgggcataagctgaagaagggcatcgccgacgccgagctgggcaccatcgacctcgtcgagaacccggacatcctggccacgctgggcgagcgcaaggagcagcaggtggtggtgggcttcgccgccgagacgaacgacgtggtggcgaacgccgagaagaagctcgtatccaagcacgccgatctggtggtcgctaacgaagtgggaggcggccgcgcgttcggtgccgacgacaacgtggtatggttcgtggacgatcaggacgtcgaggagcttccccgcatgtccaagactcgcctcgccgacgagattctcaacaaggccatgcagttcctggcgtagcgaagtgcgatggacggggctgaacgccttcggctttccccgggcttgaagaagatataaatttcttcttgcaaagccggcaggttaccgttaagatagtcaacgctgtttgggaagctcgcaagagcaaccgggcgagcacaacgggttgtggcgcagtttggtagcgcacttgactgggggtcaaggggtcgcaggttcaaatcctgtcaacccgaccagcaacttagagcaggtcatcggagaaaccggtggcctgcttttttatgctcagcggcgtgaacgcatcccatcggaagcgttgacgcttccgatgggatgcgtggcgacttgtggtcatcgtgtgacgaacgctgagaaggccggatagcaatcggtgaacggtaggcgcgataatcctgcatgaaacgcaccttacgattctgttttctgcatggtgcgcgcagggggttccaaaattggcggcgagcggtctgatgcgtgcgttaccgttggttggaaatcttcgcgtaaacgttttgtgcatctgcacaaaacgttatactacagccctccgaatacggagcgctccttaaggagcgtacagcgaagcccccaaaaggaggatacgatcaatggctgataacgtagtattggctcgtaacacggacgaggcccctcagaacgaccgttttgcgcagaccgtggcgttctcgcactacaacaacatctcggctcagctccccatcgacccggagaccggcgccatcgtcgagggcggcatcttcgagcaggccgagcagtgcttcgagaacctcgaggccatcgtcgagagcatcgaccactcgctgaacgacgtcgcgaggatcaccgtcttcgtgcgcgacatccgcgacatggacgtggtcgacgaggtgtaccgcgccttcttcaccacgtatcttcctgcccgcacggttatggctgttgcggcgctgcccatggacgcgctcgtgcaggtggaggcgctcatcaccaacggtgagggcaccatcccgaacgagccccaggccggcgacctcgtcaagtacgtgaacaacacgcacaacgctccttacgacgccctgtccacgcagaccgtggcgttctcgcactacaacaacatctcggctcagctccccatcgaccccgtgtcgaaccagatcgtggtcggcggcgtcgccgagcagaccgctcagtgcctcaagaacatcaaggctgtcctcacgagcatcgatgtcccgttcgatgacatcgtgaaggtcaccgtcttcctgaagaacctctccgacatcgatgccgtgaacgaagtgtacacgcgcttcttccccgattcgggcatcgcccgcgccgtggcctacatgccggcccgcaccgtggtcgaggtcgccgagctgccgatgcacgcgctcgtgcagatcgaggccgtcgtgtcgcacggcgacggcaccccgccgcaggaagtggaggcccgtcacggcctgatcatcgaggccaacgacacggacgctgctccggtgagcccgctgtcctcgcagagcgtcgcgttctcgcactacaacaacatctcggcgcagctgggcgtcgacgccgcgtcgggcaagctcgtcgctggcggcgttgccgagcaggccgagcaggcatgcaagaacatcaaggccatcatcgagaacgtcggccacgtgatggaagacgccgtcaaggtgaacgtctacctgaagaacatcgacgacctcgctgccgtcgaggacgtgtgcgcccgctacttcaccggcacccctgcgttccgcgccgtcggcaccgctgcgctgcccatggacgcgctcgtgcagatcgacgccatcttcggcaacgccgagggcaccccgccgatcaagtagctcgtctgagcatcggatgaacgaaaaggctggagatcgatctccagccttttttacgtcgagaatgcatgcttccgtggcgcggccctcgtggccgcgatcttgcccttgcctggaagccatcatcgctccgaaaacacgcctcgtgcgctgaggcgtgttttcggagcgatgatgatgtccgtcggcgtgacgccgctcacggggcggcatccaaccgactacaggctgcatacggctttctggtcaggctgttctaagcgcaacgctcgtctatcctcgtcagcatcacctatgagcttcgaggaaaggaactgctatgagcatcatcgtatggatcatcatcggcggcttggccggttggatcgcgaacatgatcatgaagacggacggcagcctcgtcaagaacatcgtgacgggcatcgtcggtgcgctgatcggcggtttcgtcatgagcttcttcggcgccgcgggattcaccgggttcaacctctggtcgttcttggtggcgttgataggctcgatcattctcatcgccgtcatcaacctgctgaccggcaagcgcgcctagcgacgttgtgcgcacgagccgaaagcggggcggcagtcctctttcgggacgaagcggccgggatagaacgttcccggccgcttcgcgtttttcacggcatcgggatttccacgcctccgaccgtgacggacttcacctgggtgaggtcgaggatcttgtcgaacataaggtccgcgcggcgtttggtggctcctccatcgttcatggcgccgacagacggtacgtcgatagacgagccgtttcgcagattcaccgttatgggaacgtcgatgcctgcggagcctctgcgctttcccgtttcttcatctttcgtcatgagtggctcgtctgctgtgtattcgactacgatggcgatgggggagaggactacggagtcgattgcgacgtcgatgccgtcgagcttcgtccgttgcccggcgctcagttcaatcgatgcgtcctcgtagttgagcgggaagctcatgtcccaagatccttcgatgaccgtctggagggacgggagagtggttttgccgcctgccgtcatttctcccgtcgccaaatctcctagttcgacgtgcatgatcttgcctatgaacgagtcgcctcctatgaacgaagtcatcttcacgatgcattgcacggagttgtcggaaggatcggcgtcgtagaagcagtattccgggcctactttggtgtctcccactctgaacagctgtgcaccagtgaagaccgtcgtaaacgacttgtccaaaatcgtatcgacgccctcgatcggcatgccgtcggttcgggcgatactgaacaccgcaacgcagtgttcgttgtcgccgatcaccgcatctgctgtgatcgcaacaccgttcgaaacggcacttgcgccgattgggcggccgatcttgtcgatcacctccgtctgcgacggtgcgcccccaaacagatcctcggcgaagtcttccaagctcacgaacgctcctgcaagatacgccgtgcagcctactgccagggccagcacggctgcggctgcggctatcacaagggcgcgcgagcgccgtgtcggacggggaaggggctctgcggcggcgaccgcttcgatgcgctgcgccatgcgtcgcttggcctcgggcgagaaccgcagctcgtcgagggcttccttgtattcatcgatcatcgtccgctccttccaacagggcgcgcagcttcttgcgtccgcggctcaggcgggccgccacggcgtcctcggtgccgcccgtcatgtccgcgatctcgcgcgcggtgtagccctcgtagtagtgcaggtacagggcctcccgaaacggctgcgacagctccatcaccgcttcgagtacggcgctgtcgggaacctcgggcgcggccgcctccgcgacggcgtcgagcgccaccgacgtgcggcgtcgcgcgctgcgcaacacgtccttgcaggcgttcgccgtcgcgcgcacgatccaggcacgctcgtgctcggcgctctcgaaggcgcgatcggtctgcagcagcttgatcagcacgttctggcagacgtcttcggcgtcgtgcgtggatttgagatacgtgtagccaagtcgcaggatgaggtcggcgtacgtctgcacgagccgctgcgcctcggtatcgggttgtcgtttgcgcatagagtccgttcctgtcgttcttcgggcaacgccgtttcacctgcaatacgaacgagcagggcgaatcctggcagcgcgggcgaatcttctaggagaattcccaaaaatcctggataagctccttgcggttagcccgctcggccttctggaggatatggtgcatgtgcaccttgacggtgctcggcgcaagatgcatggatgtggcgatgttctggttgtccttgcccagcagcacgagtcgcagcacctcggcctcgcgcttcgacaactgtcgcgcggccgcgtaggctgcgagattctggtcgatgaacgtctcgagcgatgcgcctccctgcgtgggcggttcggtacgtcgtagcgacaggctgcgccacgcgctcgtgcaggcggcgaagccgcagcacagcacgagcgcgttctcggcgaagttgcgctcggggaagaagggcagcctctgacctgcgatcgcatgcgggtcgatgaccagcaggaacacgacgttctcaagcaggacgcaggtgacgagcgcccatagcgcgccgtacagagcacgatggcgccgcatgcgaagccgtaacacgtcgtcgcgcgtgccgatgtagcgagcggcgaggtagacgagcatcgcgtacagcatggcctcgcgcatgctgtagaacaggaacatctggccgttgccctcgggcgcgagcagaagcacggcgaagcttgccagcacgaacgccgcacccgggatccagcgtaccgccggcctatcctcctccaggtactcgcacagcacgagccagaacgatatgagcgcgccgccgccgacgaggacggaagcgacagggctgccgatgaagaagggcgaggcggacgcgtcggaggctcgctgcatgaggaaatcgtcctggaacacgagcgccacatcgaagaagtagaacaggaacccggcgaacgcgtagcggtaggtcttgttgcgcgtcaccaggtacgacgcgaggcacgtcgccgccgttaggatgacggccaaaagcacgatgagcgtgtagtagaaaagacccagtcccagatccatgcgcttcctcattcgcggtcgccggcctcgcgcccaagcgggcgcacatctcgaacagtatagacgattcgccgcaacgcgccagatcaaacggctctacacccgaaatacacccgctcctaccaccagattaggactgcccgcgcgctcgttcgcgcgacacgatgaagacaacgtccggaacctgccgaacgaaacgacgaaggtagatgaaaggggacaagcgcatgtcgacggaagccgtactgcccaccagcaccgcctcgcccaaggaaggcccgcctaagaagaagaggaagctcagcttccccaccgccttcaccatcctgttcgcgctcaccatcgtcgcggtggcggctacatggttcgtgccggcgggccagtacgcgaagctcgcgtacaacgccgacgcgggcacgcttcagatcacgagcccccagggcgcggtgagcgaagagcccgccacgcaggagacgctcgatgctatcggcgtgaacatcgggatcgaccagttcacctcgggcgcgctgtccaagcccatctcggttcccaacacgtacgagcgcctggagcagcagcccaaaggcatcgccgacatcacggtgagcatggtgtcgggcacggtggaggccgccgacatcatggtgttcatcctcgtgctgggcggcctcatcggcgtggtgaacgcaagcggcgcgttcgagtcgggcctcatggccctcacgaagaagacgaagggccatgagttcctactcgtgttcctcgtgagcgccctcatggtcctcggcggaaccacgtgcggtctcgaagaagaggccgtcgccttctatcccatcctcgtgcctatattcctggcgctcggctacgattccatcatctgcgtcggcgctattttcctggcaggttccatgggcacgacgttctccaccatcaatccgttctcggtggtcatcgcctcgaacgccgcgggcgtgaacttcacgcagggcatcgaatggcgtatcgcgggatgcgtcgtgggcgccatcgtggtcatcgcgtatttgtactggtacagccgcaagatcaaggcgaacccggcgttctcctacacctacgaggatcgcgagaagttcgccaaactgtacaacgtggaggcgggggagacgaaggaggcgcgcgcgaccggcttcacgcttaagaagaaggcaatcctcgtgctgttcgtggcggcgttccccatcatggtgtggggcgtcgtgagccagggctggtggttcccacagatggcagcctcgttcctggccatcgcgatcatcatcatgttcctgtcgggcatcgccgagaagaaggtggtggatgcgttcatccacggagcgtcaagcctggtgggcgtgtcgctcattatcgggctcgcgcgcggcatcaacctgatcatggagcaggggctcatctccgacacgctgctgttctggtcgtcggggctcgtgcaaggcatgaccggacctgtcttcatcctggtcatgatgctgatcttcttcctgctgggcttcgtggtgccgtcgtcgtcgggtttggccgtgctgtccatgcccatcatggcgccgctggccgacaccgtgggcatcccgcgctcggtggtggtgtgcgcctaccagtggggccaatacgccatgctgtacctcgcgcccaccggcctcgtgctggccacgctcacgatgctggacatgaagtactccaagtggctcaagttcgtgtggcctatggtgctgttcgtgctcatcttcggcggcatcctgctggtcgcccaagtcctcgtctacggcgccgcctgatctgctggttgttttcgacaggcggcttgcgtatactggcaaggatcgggatgacccgatccttgccaggcgtcgagcccctcgcaggctgctccgccgcaagcccgtctgccgggacaacccgggaaaccatcgagcatgcggcccatccgacggcccgcttcgcgcggcgccgagcggcgggccgcatgctcgcgcacgtatggagcgaagaatcatgcacggaaccgaagaggctgtggacggcgagggcgtcgtcgccgagatcgcgccgaagtcgagaagcgatcggaagatcgaccgtttgggcactgagagcaccttcaagctgcttctggagttctccatcccggcggtggcgggcatgctcgtgcagatgctgtacaacgtcatcgatgcggtatacgtgggacatgcggtaggcgccgacggcctggccgccaccacggtcgcgattcccatgatgacggccatggtggccgtggccatgctcgtgggcgtgggcggcaacgcgctggcggcgatcaagctgggcgagcgcaagaagggcgtggcggaacgcgtgatgggcaacagcttcgtgctgctgctgatcgccacggcggtgctgtggggcatcgccatcttcgcgctcgagcccatccttcgctactcgggcgccgacggctccgtgctgccgctcgcgctcgacttcatgacggtgatcgtggcaggctgcccgctgcagttcatcgcgttcggcatgaacaacttcatccgcacggcagggcaccccaaccgagcgctgggctccatgctcgtcggaacgggcgcgaacgtggtgctgggctacctgttcatcatcgtgctcgacggcggcatgcgcggcgccgggctggccaccgtgtgctcatgggcgctgtcggctctgttcgtgatgcagttcttcctcaagaagggctcacccatgcctttgcgccgtccgtcgctgtcgctcgacccgcgcatcgcgctgcgcgtctgcgccctcggaatcgctccgtgcgtcacgcaactgggcttcgccgtgtcgtctatgatagagaacaacctgttggtgctgtacggtgccgccgatgcgctcggcgtggacggagcgcttgcggtgatgcgcgtgctgtcggccgtaggcctgttcacgttcatgccggccatgggcatcgccatgggggcgcaacctatcgtgggctacaactacggcgctcgcgcttacggccgcatgaagctcgtgctcgtgcaggccatagtgctgggcatcgccatcacgacgcctttgtgggcaacggtcgtcctcgcacccgacctgtacgcgcacttgttcggcttgcccgagatatatatgaaggaaacggcttgggcgcttgtgctgtacctcatgttcattcccatcctgcctattcagaccatcggctcgaactacttcgacgccacaggccaggcggcgaaagcgaccgtgctcacgctcacgcgccagatcctgttccttattccgctgctcgtgttctgcccgctcgttctgccgcaggtgctgcccatcacggcgcttgagagcgtgtggctggcgccctcgatatccgatataacatccacgctcatcgtaagcggttttctcgccttcgaatggcggcgcctgcgcgctgcggaagcgggggagggctcgaatggcctccatcgagcctagcggctcgagccgttccctcgtgttttgtgtgcgtgcacaatgaaataacggtcgggtaacggagaagaagcggctcgtcaatgcgaaaccgtttgccttcaacgtctcgccgctgatcgaatccgtgttcgccgttggctcccttttaccgagcaatcgcctccggaggggccatgtcatccgaccgtttacttttctctggtagagtggcctggcgggcgatatcgctcgcttttattgttcaagtgcaatcggtaaaggtaaagggggaagctacgtggctatgctcgggtttttaatccttttcccgctggttgttgccggcgttctgcttgtcgtgcgcaacaaccgagcgagaaacgtgattgtgggagcctccgcgctcgtcatcgggttagcgtcggtgtggctcgtcgtgtcctatctgggagctccgtggataacgtatgatttctactccccggtggtcgactacgtctgcatggccgtcagcgtgctcatcgctgccgccatcttgtacttcggcatcaagtacaagaacctgtgggcttgcgtgctcgcagccgtccaggtggtcggctcgcttgtgttcgagttcggtttcgcccacgacgtcctcgtgaccgaagggctgtacctcgactcgctgtcgctgctcatggcgttcatcatcggcgtcatcggctccggcatctgcgtgtacgctctcggttacatggaagacttccaggcgcacgagccggaaggcgcgaaggaccgccggccgacgttcttcgccctcatgttcgtctttctggcggccatgttcctcatcgtgttctcgaacaacatgctgtggctgttcaccggctgggagatcaccacggtgtgctccttcctcctcatcggcttcacccgtaccgaggaggccatcaagaacgccttccgccagattatcatgaacctgctgggcggcatcgccttcctggcggccttgtacgtcatggccatccagttcaacacgctgtcgttcctcgagttcctgcagatcggcatcgccaaccccggcatggtcgtgctgccggtcacggcgctcgcgttcgccggcctcaccaaggctgcgcagatgccgttccacacgtggctcctcggcgccatggtggcgcccactcccacgtccgcgctgctgcactcttcgaccatggtgaaggcgggcgtcttcttgctcatcaagctggcgcccatcatgatggcgtgtcccgttccgtccgtcatggtcatcctcgttggcggcctcacgttcttgttctgctcgttcatggccatctcgcagtcgaacgccaagcgcgtgctggcgtactccaccatcgcgaacctcggcttgatcgtggcctgtgcgggcgttggcacgcccgaggcggtctgggccgcggccttcctcgtgctgttccacgctatcgcgaagtcgctgctgttcctgtgcgtcggcaccgccgagcaccatatcggcagccgcgacatcgaggacatggacctgttgttcgagcgcatgccgcgtctagcccgcttcatgatgctgggtatcctgtgcatgttcatcgccccgttcggcatgctgctggccaagtgggccacgctcgtctccttcgcggataccggtcaggtggcgctcatcgtgcttctggcgttcggctccgcggccacgttcatgttctgggcgaagtggctgggcaagctttccggcatcgccgctcgtcccgagaacgtcgaggccaaggtgcattccagcgagtgggtggccatcatggtcatggccgtgctcgtcatcctgtgctgcattggactgcccatcatctcgtgggctgtggtggaaccgtacatctacagcgtgttcggcaccgtgggccaggacatctcgtcgtccaacctgtggatcgcctccatcctgtcggcgttcatcgccgtggtcctgttcgccggactcggccgctcgaaggccaagaaggtcgacatctacctggcaggcgtgagccgcgacaacgccgagcgcacgttctccaactcgctgtcgggcgaatccaccgcatcggcgcgcaactggtacctcgagggcatcttcggcgagaagcgcttgtcgccgttcggcaccgcgtgctgcaccgtcatcatcgtgatcgcattcgcggcggcggccgtgggcgttccgggattgttctaggaaagggtgtgatctgacatgacaatgctcttcgctcttatcggcaccctcgtcttcgccatcgtcgcgccggttctgggatgcctactcgctggcctcgaccgcaagatctcggctcgtatgcagggtcgcgtgggacccccgctgttgcagccgtactacgatgtccgcaagctcatcgagaaggataacgtgtcggtgaactccaccgagggcacctacatcacgtgcgccctcgtgttcaccctcatcgccggcggcatcttcttctccggcggcaacctgctgatgagcgtgttcgtgatcacgctgtcgggcctgttcttcatcgtggccgcgtactccacgcgctcgccgtacgccgagatcggcgcgaaccgcgagacgctgcaggtcatggcgtacgagcccatggtgctgttcatggccgtggcgttctacatggcggccggaaccttcaactccgcaggcgtgttcttcctcgacgcgcccctagtgaccaatatctggctcgtattcctgggctttttgttcgtgctcaccatcaagctgcgcaagtcgccgttcgacctgtcgtactcgcatcatgcgcatcaggagatcgtcaagggcatcaccaccgagatgagcggcaagacgctggcgaaggtggagatcatgcactggtgcgagaacgtgctgttcctcggctggaccgcgctgttcttcctttggggcaacccgctgtccatcgtgctggcgctcgtggtagtggtgctcgtgtacttccttgagatctggatcgacaacaacttcgctcgcgtgaagtggcaggccctgctggcatcggcgtggggcgtggccctcgtcgcgggcggcgtgaacatcgcgttcttggcctacctgtaaaggagctgcacctatgacgtatgcaaccaaatcaccgtgggtcatccactacgacggttccagctgcaacggctgcgacatcgaagtgctggccgcgctgtgccccgggttcgatgtggagcgcttcggcatcatcaacacgggcaatcccaagcacgccgacatcttcctcgtcacgggcagcgtgaacgagcagaacatcggcgtggtccaggagatctacaaccagatggtcgagccgaaggtggtcatcgcgtgcggcatctgcgcatgctcggccggcatcttccacgactgctacaacgtgatcggcggcgtcgaccaggccatccccgtggacgtgtacgcgcctggctgcgccgtgcgtcccgaagccatcatcgatgcggtcgtgcagggactcggtatcctggaagaaaaatcgaaagccctgcaggcgcaaaagaaaggggcgtgagaaacgtgaccctgcaatcggaattcatcccgctcaccatcgagggcctgccggcgcttgcagcggaaaagaaggcggaaggcgcgcgcttcgtgcagatgctgtgcgtgaacaccgaggaaggcatcgatctcgtgtactcgttcatgaaggacggcgtgctgacgaaccatgagatcaaaggcgtgaagaagggcacgaccgtacccagcgtcaccgatcagttcctggcggcgttcgtgttcgagaacgaggcgcacgatctgttcggcgtggacatcgagggcatcgccatcgacttcggcggcaacttctacgcgctcgcgcagaaagagcccatgaccatcatctcgccggagcagaaggcggctcgcgagaaggcgaggaaggtggccgaggcgaaagccgccaaggagcgcgctgcgaaggccgcggaggcctcgtacgtggcgagccatcccgaggcgaagtccaagccgacaggcgacgtcatcaagccttcgggctccgatgatctggacgcgcgcctggccggcgtggatcccgagaaggttgcccgcgtcaaggcggccatcgccgcgaaggccaagaaggaggctgcggcgaagcaggcggccgtcgatgagaagatcgcgaacctcgaccctgagaaagcagccaaggtgaaggccgctttggaagccaaggccgcgcgcgaagcggcgaagacggaaacagaaaaggaaggtgagtagcatgggaaaggcgaccgtcatcccgttcggcccccaacatccggtgctgcccgagcctttgcacctcgatctcgtggtggaggacgagaccgtcatcgaggcggttccgcagatcggcttcatccaccgcggcctcgagaagctcgtggagacgcgcgattacaaccagttcatctacgtggccgagcgtatctgcggcatctgcgcgttcgggcattccatgggctacgccgagaccgtcgagaagctcatgggcgtcgagatccccgagcgcgccgagtacctgcgcgtcatctggcacgagctttcgcgtatccactcccacgtgctgtggatgggactcgcggccgacgcattcggtttcgagagcctgttcatgcactgctggcgcctgcgcgagcgcgtgctcgacatcttcgagaagaccacgggcggacgcgtcattttctcggtcgtcaaggtgggcggcgtggtccgcgacatcgatgacgcgcagttcgccgagatgaagcgcgtgctggagggcatcaaggacgaataccgccagctgtgcaacgcgttcctcgaagacagctcggtgaagaaccgcaccgttggcgtgggctatatcagccatgaggatgcgctggcccagagcatggtgggtccgttcgcgcgcgcctccaacgtgaactacgatgcgcgcatgctgggcaacggcggctacggcttcctgtccgacttccagcccatcctcgacggccaaggcgactgctacgctcgcgtgaaggtgcgcgcgctcgaggtgctgcagtccatcgatatcatcgaggagatgatcgccaagatccccgccggcgacatcgccgtcgacgtgaagggctcccctgcggccggtgccgaggccgccaacgtggtggagcagcctcgcggcgaatgctactactatgcgcgcggcaacgggtcgaagttcctcgaccgcatgcgcatgcgcacgccgacgtcgcagaacctggccggcatggccacggcgctcgccgggtgcgacctggccgacgtcaacatgatcgtgctcaccatcgacccctgcatcagctgcacggaaaggtaggaggaccatgggaagcttcaagctgggaaaaatgaccctcgggggcctgttcaagaagcccgagacgctcatgtaccccgtcgagacgaaaacccctcccgcgggtctcaagggccatgtggtgaacgacgttgaccgatgcatcctgtgcggcatctgccagaagcgctgcccctgcgccgcaatcgtagtggacaagccggcgcgcacctggaccatcgaccgcttccgctgcgtgcagtgcggcagctgcgtgcgcgaatgcccgaaggactgcctgaccatggagcccacgtacacgccgccggcgacgagcaagcacgtcgactccttcgaggttccggagaccaagaaaacggcgtaagacgagctccgtcggaactgcgaagacccgggaaccctgacggttcccgggtcttctttcgtttccggccccggggatacagttcctcatgcacgcttttgtcaaccaggtgcgggcatatggatccctttcgcttgacaaaagcgtgcatgaaccaaacgaacgcgccagaggggaactctctggccgtcgtcgcgcgaggtgcgcgggcgaatggaaatcccgttgaagacgtgaacaaggacggggttctggggaaacctgctagaatggtgcaaatcggaacacgttctaccgggcccgagcgcatggcccggtttttgcgtcgagagacggcgcggaagggaaggatgctcgtatgggacagaaggatgagggctgcgcagccgaccaggtgagcgaccgcatcttcaccgtgccgaacatcatctcgttcgtcaggctgtgcctcgtgcccgtcttccttgtgctgcttctcaacggtttcaacgtcgcggctacgctgctgtacgcgctggcagcgggcaccgactggatcgacgggcagatcgcccgccggacgaatgccgtgtcccgtctgggccagctgctcgatccggcggtcgaccgcatcctcatgatctcgggcgtgtgcggcctgttcctcgtgggacgtctgccgctgtggatcatcctcgtggtgctcgtgcgcgatctgctgctgctcatgggcggcgcggtgctgctcaagcgctttcgcgtgcgcgtggccgtcatctttccgggcaaggtggccacgacgctcttgttcgtcggcttcgccggcctgctgctgaactggccgctcgtaccgggactcggtctcgtggacgcggcttggttgccgggtttgaacgggctgccctgttcgtggggcatctggttcgtatatgccggacttgcgctggggctggtcactaccgcgtattacatcgctgcggcactgcggaagctgcgtgctgtcaaggatgcgcaggcggagagcacgcggtagcgcatggccgcccggacgcccagaaaagcgaacgcgagccgcaccggacgacccgatcctgctcgccgagcgccatctgcgcgcgagatgcgcgagcgcgccccccagcgtcccgccgcctccgcgccgcggcgcgctccgacgacgccgccccgccgcggcgggacgaacgcgggcaaggggtcgcggcagactcgttcttccgcgcaacggccgcgcggttcccgttcctacaacacgcccgccgtctggacgaaggaggcgccacgctcgaatctcgcaggaggagccgcgcgccgagcgctcggcgcagtcggcggcgtgctgctgtccttgctcgccctggtcggcaaggggcttgcgacgttgttccgcgcgctcgcggctctcgtggcgcgcagccgcatcgcgctcgccgtggtcttcgtgtgcgcggcgctgctcgtcttcggcgttgcggacttcgccgtaaacgcgaacaaagcttaccccggcgtgcgggtggggcagatcgacgccgccggaaagacggccgacgagctggccgccctcatcgacgaggtctacggcgcgcgcctggcccaaggcagcgtgaccatctacgcgaacgacgaagcggaggcgcgcatcgccgacgagacggccgccgcgcaggacgcggcgcttgccgagcagctggcgttggaggaggcgcgcgccaacaagcttgcttggacggccgacgcggcctcgctcgaggcgcgcgttccttccgatgagctggccgccgaggcgctcgccgtgggtcgcgaggacggcggcatcctggcgcgtctcgctgcgttggcgacgggccgcgagctgaagcctcgcgccgcgtatgcggagacggcggtggagtcgctggcttccgacatcgacgcggccatcggcgacccgcgcgtcgactacgggatcgtcgtggaggacggcacggcttcggtcaccgaaggccatgacggcttcatggtgaatcgcgacgagctcaggcggacgctcgacgagctgctgctcggtcaggaggacggtagcaggtcgttcgtcgcccgagccgagcatgcgcctttgcgcatcgacgagtccgccgcgcaggatgcatgcgacgctgtgaacgcggccattgccgacggggcgcggttcacgtacgaaggcgccgcttggagcgcgtcggcttcggacgtcggcagctgggtgtccacgcgcatcgacgggtcgtctctcgcggcgttcgtcgacgccgccaaggcgaagcctgcgctgctggcgcatgtcgccgaggtgggcaaaggggatcccgtgcacgtgtcgttcgaggtcgcagacgacgatgtgatcgtccgcaccgatggcgagggcgccattccgctagtcgcggaagctacggggctgttggatgccgcgctgttcggcgatgacggcaaagcgcgtaccggcgtgggagcgggcgcgccggtcgaagtggccatcggctccggtcccgcacctgaggcgatgccgttcgacgaggcgatggatctcggggtgatcggcgccatcgcctcctacaccaccgagtacgccacaggccccggcaccgaggcgcgcaaccacaacatcgcgctcgtgtcccagtacctcagcgactccgtggcgaagcccggcgacagctggtcgttcaacgggacggcgggggattgcagcaccgaggagcgcggcttcaagggcgcgggcgccatcgtggacggcgagtacgacgacgccatcggcgggggcatctgccaggtggccaccaccgtgttcaacgccgtgtacgatgcaggattccccgtgctcacgaggcacaaccactcgctttacatcgccagctaccccacggggcgcgatgcggcggtcagctggcccgatcttgacttcgtatggcaaaacgattccgctagcgatgttttggtgcgtctttcttgtgtggacgggtccgtaacggctacactatacggagtcgaccccggatacaaggtgtccacgacgacgggcgactggggcgaaggccggaagtacgagacgaggacgacgatcgacgatacgctcgcgccgaacgcgagctacgtcaagacgcgcggaaccgatgggcgcaccatcaccattatccgtacggtcaaggacgaatccggcgaggttctgcacgaagatccgttcagctccgtgtacgatccggtaacggaggtcgtcgtcgagggtcccaaagtcgcgggcgacggaaaaagcgacgctgcgacggagggttcttcatccaacgtcacgagcaattgagaggtgagcatccaaggtgtactatcagccagacatcgagaccatgcccgtagagcagctgcgcgacctgcagctggagcgcatgaagaagaccgtgcagcactcctatgacaacgtggcgttctaccagcgatcgttcaaggaggccggcgtcgagccgggcgacctcaagaccctcgaggacctgccgaagttcccgttcgtcgtgaaacaggacatgcgcgacgcctacccgttcgggctgttcgccgtgccgcagaaggacgtggcgcgcatccacgcgtcgtcgggcacgacgggccaggccaccgtagtggggcataccgcgaacgacctcaagaactggggcgactgcttcgcgcgcggcatccatatggtgaacggcaacgaggactccaccatccaggtgtcttacggctacggcctgttcacgggcggcttgggcgcgcactacggcggcgaggccgcgggctgcacggtcatccccacctcctcgggaaacacgaagcgccagatccagatgatgaaggacctgggcaccgatattctcgcttgcacgccctcctatgcgctgctcatcgccgacaccgccatcgagatgggatacgacccggcggtcgacttcaagatctcggccggcatcttcggcgctgagcccgcctccgaaagcatgcgcgaggacatccgcaagaagctgggcatccagtactgcgacgtgtacggtctgtccgaagtcatgggcccgggcgtggccatggagtgcgcggagtcgcacggcctgcatgtggcggaggatcatttctacgccgagatcgtggatcccgatacgctcaagcccctgcccgacggcgagtacggcgagctcgtgttcaccacgctcacgcgcgagtgctgcccgctcgtgcgctaccgcacccgcgacgtcacgcgcatcatccccgaggagtgcgcgtgcggacgcacccaccgcaagatcgaccgcatcgtggggcgcaccgacgacatgctcatcctgcgcggcgtgaacgtgttcccgtcccagatcgagcaggtcatcgtcagcttcccggagatcgcggcgcagtaccagatcatcctcacctcgaagggcccgctcgaccacgtcgagctggacgtggagacggtgcccgaattcccgttcgacgagatccgcaagctccaggacctcaaacgccgcttggccgccgagctcaagagcaacctgcagatcgccgtggacatcaagatcgtggagccgaagaccatcgagcgcagcgagggcaaggcgaagcgcatcatcgacctgagagaagggaagaaggcatgatttcgcagctgaccgttttcctcgagaacgagaagggccgcctcgcggccgcctgccgcgccgtgtccgacgcgggcatcaacatgcacgcgctgaacctggcggacacgtcggacttcggcgtggtgcgcatgctgaccgacacgcccgaggccgcagccgaagcgctgcgcgagcagggctaccgcgccaccgtcaccccggtgctggccgtgcgcgttcccaacgtgccgggcggcctggcgaagctcctcgagttcatggacgagcaggacgccaacgtcgagtacggctactgcttctcggtgaacgaggactacgccgtcgacgtgctcaaggccgacggttcggacgacctggagcagaagctgaccgatgccggtttcgagccggtgcgaccggaggacatctaccgcattgactaacttcttcgagcatatcgcatccgtcgggcgagcgcgccttctagcatgcgcgctcgcctgcgcgctggcgctttcgggcgccgcttggacggcacccgccttcgccgacgtgcgcaaagcagacgtcgtatacggccaaacggtcgatgcacgcggcctggccgtggcgcagtgccccagcatcgacgccgagtacgccatggtcatgggggccgacggcaccgtgtacttcgaacgcaacgcccaaagccccacgcagatcgcgtccatcacgaagatcatgaccggcgtggttgccctcgatgccgtggaggacgggctcctgtcgctcgattcgcccgtcacggtttccgccgccgccgccgcggtaggcgagtcgtcggcgggcttgcaagagggcgacgtcatgaatctcgatgcggcgctcaaggcgctgctcgtgccttcgggcaacgatgccgccgtggccatcgccgagacgatcggtgctctcatggagccgggcacgtccgatccggaagccgtgttcgtgaacgccatgaacgccaaggctcaggagctgggctgcaccgacacggtgtacgacaacccgcacgggcttgatttcgacgcctacgcgggcgatttgcacagcacggcggccgacgtggcgaaagtggtgcagtacgccatgaccaacgacacgtttcgcgcggctgtgggcggcgggagcaccaccatccaggtgacgcgcgccgacggcgcgaaggccgacatctaccttgagaccaccgacgggttcttcgacatctacgagtacgccataggcgtgaagaccggcgtcaccctgctcgccggcccgtcgttcgcgggcgccgccaacaaggacggccgcgagctgtacgccatcgtcatcaactcgtcctccgaggcgcagcgtttcaaagacgccgagagcctctgcgaatgggtgtaccagcacgagatatcctaccagcttgcgaacagccccgaaaccgccacgatgaacggcaccgaggtgccggtggtggctgaggtggcccattccggctggatcgacaagacggtgaaggcgacgctgcgcgaccctgcggcagccgtcaccatcttcgacttgaacggcaacgtgagccagtcgctcgagttcgacgagctggcgggcaacgtgaaggaaggcgacaaggtgggcacgatcaccttcaagcagcgcaacaccgtcatcgccacgatggacctcgtggcatgcgaggacgtcgacgcgcccgacttcttcgagggcgtgggcgtgtggtgggaccgcctgttccgcagcttctccggaggccaggaagtggcgcgttccatcacgctcaacgagacgccgctcgtcatcgacaagaccgcgtccgcagcgtagcgccggactgaagagaggatacgccatgagcatgtgccctgtttgcaacaaccccatcgattcgcaggctccggtctgcccgcattgcgggttcaagctgctcggatccacccagcgtttcgagccggtgtcgttcggcgacgatgcactgcccgtcgcggccgccccccaggccgctgccgccctccacgtggtgcgcggcccgcagaccggggtcacctaccaactgggcgatcaggcgctcaccatcgggcgcagcccgcagtgcgacctgttcctcaacgatatgaccgtgtcgcgcgagcacgcttcggtcgagcctgcggacggcggctacgtcatccgcgacgccaactcgttcaacggcgtatgggtgaacaacgaaagcgtggaaacgcgccggctcgtctcgggagacgtcatccagatcggcgccttctgcctggtctacaaggaggagtagacgcgatctcgcgtgtcgacaggcgcgcttcgcactgcacccaggatggcaacatgcgcaaaacgcgcgccgttcggctcggttttggacgtttgaccggggcgggcggtgcgcgttgccgtataattccccagtgggtttatcacacggaagggttcgctcatggaattgatgtcaggcaacgaggcaatagcccagggggcatgggaggccggcgcgcgcatcggcgtggcctatcccggcacgccgtcgacggagacgctcgaggcgttcgcgaagaaggacggcgtgtacgccgaatggtgcgtcaacgagaaggtggccgtcgaggtgggcatcggggcgtcggtcgccggcgcgcgcgtgctgtccacgatgaagcacgtcggcgtgaacgtggcggccgacccgttgttcactgcggcatacgcgggcgtgggcggcgggctcgtggtgctggctgccgatgatccgggcatgtactcgtcccaaaacgaacaggattcccactggtacgcacgcgcagcccacatccccatgctcgaccctgccgattccgccgaggctttgcgcttcacgcgcgaggcgtacgacgtgtccgagcgcttcgacgtgcccgtcttcatccgttccacagtgcgcgtgtcgcacacgaaaacgccggtggagcccggcgagcgcaccgagatcgcgctcaagccctacgaaagcgatccggcgaagtgggtcatgatgcccgcgttcgccaagccccgccgcaaggtgcagctggcgcgcatcgacgcgctgcgcgcctgggccgaggagtgcccctacaacgaggtcgtgcgcaaggggagcgccgtgggcgtggtgtgcgccggcgccgtctaccagcacgtcgtggaagcgctgcccgacgcgtccgtgttcaagctgggcctcacctggccgcttccgcagcaggcgctgcgcgacttcgccgagagcgtggacgcgctctacgtggtggaggaggcttccgagtacctggacgagggcgtgcgggcgctgggcatcgaggttgccgcgttcgagagcccgctgccgcgcgacggcgaactgacccccggcctcatcagagcggcgttcggcttcgaggagcctgctcacgagccgttgcccgccggccttccgggccgcccgccggcgttgtgcgccgggtgcccgcaccgtctcgtgttcaaggagctttcccgcatgaaggccgtcgtcaccggcgacatcggctgctacactttgggcgcgctgccgccgctgtccgccatggacaccaccatcgacatgggcgcgtcggtttccatgtcgcatggcttcgagctggcttgggcgggcaccgaccaccgtcccgtcgtgggcgtcatcggcgactcgacgttcgcgcactcgggcctgtcggcgctgatctccaccgtgtacaaccaaggacgcggaaccgtctgcgtgctggacaaccgcaccacggccatgacgggtcgccagggaaaccccttcaacggcgagacgctgcaaggccgcctctcgcgcgagctcgaccttgagagcgtcgtgcgcgccatcggcgtcgaggacgtgcgcaccgtcgacccgaacgacgccaaagccgttcgccgcgcgctcaaggaggccgtggcctcggaggagctttccgtgctcgtgttccgcagcccctgcgtgctgatcgaccggcatcgcgagcccgcctacgcggtgaccgacgcctgcacggcatgcggcgtgtgctcgactttaggctgtccggccatcgcgaaggatccggcgaacgaccacgcgctcatcgatgccgcccagtgcatcggatgcggccagtgcgcccagtactgcgcttggaacgccatcgcgcaacccgctggggagaaaggaggcgtcgcatgatgacctcgaacgatactgtcaccgtccttctgtgcggcgtgggcggccagggcaccatcctggcggccgacctcctggcccatgcggcgctggaatccggttacgacgcgaaggtgtccgagatccacggcatgtcgcagcgcggcggcgcggtgaccacggtcgtgcgcttcgggcgcgcgggcgtgcagtccatggtgtccgacccgggatgcgccgattgcgtcgtctccttcgagaccaccgaggcgttgcgcaaccttcccaacgtgcgcgagggcggctaccttctcgttgccgacgagtccatccagccgcttcccgtgctcatcgggcgcgcttccatgcccgagcatgcgcgcgagacgctggccgctgcgggcgccacgctcatcccggccggagacatcgccgtcggcgtgggcgcgccgaagtcggtgaacgtggtgctgctcggggcgttggcgacccgcctcgacttctcgcaaaaggcatgggagcgcgtcgtcgcgcgccgcgtgcctcccaagaccgtcgatgccaacttggcagcgtttcgcgcgggcctcgcgttcgctcgcgaggctgcgggcggggaaggggcttaaggcgtgagcgttcaacagatcagcgtattcttggaaagccgccccgggcacttgcgccgcgtgctcgatgcgttcgaggacgcgcatgtcagcgtgcgcggttacagcgcctccgacacgggggactacggcatcgtgcgcttcatcgtggatgcgcccgacaaggcgctcgccgtgctgcaggatatgggcgcggcggccacgcagaccgacgtcctgtgcgcgcgtctcgacgacgtgcctggcgagctggcgcgcgtcatgggcatcatggccgactgcggcatcaacgtgacgtacagctattcgctcatctccacctacatcgcgctgtccgtcaaggacatcgcgcgcgccgagaagctgttggcggctcagcccgtcgagctcatcgggcaggacgacctcgcccgccccgtcgcgccggaaagccggtgatccgcgtgaccgacatcaccgtgaaaggagcggctttggccgccgtcgcggcaggcgatttctcaagcctgcccatccacaatccggctgtcgaatgcgcctcgcgcgagcgcatccgcgccatccagctggagaagctcgtcgcgcaggttcgctggacgtacgagcgcgtgccctggtaccgtgcacgcatggacgattcgggcgtgaccccctccgacatcaagacgctcgaggacgtgcgcatgctgccgttcacggacaagtccgtgctgcgcgacactttcccgtacggcctgttcgccgtgccgctggacgaagtggtggaactgcactcgtcgtcaggcaccacgggaaagcccatcgtggtgggctataacgaaagcgatatggccatgtgggccgactgcatcatgcggctcgtgcagatggcgggcgtcgtgccgggcgatcgggcgcagatggccttcggttacggcatgttcaccggcggcttcggcctgcactacgggctgcagaagctgggctgcatgatgatccccgccggctccggcaacaccgagcgccacatcgccatgatcgaggactacggcaccaccgtgctggtggccacgccgtcctacgcgctacacgtgtgcgaggtgggggagaagatgggctacgattgggcgaagtccccgctgcgcgtgggcctgttcggcggcgagccgtgcccgccgggcctcaaggccgagatcgaggatcgcatgcacatcgtgtgcaccgacaactacggcctgaccgaagtcatggggccgggcgtgtcgggcgagtgcctggcctcgcgcgacatgcagcacctcgccgaggaccacttcctctgggaggtcgtcgaccccgagacgggcgatccggtccccgacggcgagatgggcgagctcgtgctcacgccgctgggcaagcaggccatccccgtgctgcgctaccgcacgcacgatctgacccgcgtggtcacggagccgtgcgcgtgcggccgcaccacggcccgcatgcagaaggtgcgcgcccgctcggacgacatgctcatcatccgcggcacgaacgtgttcccctcgcaggtggaggacgtgctggccggcatcgacggcgtcacgccgcattaccgcatcgtcgtggagagcgcaggcggcctcgaccgcatgaccgtgcacgtggagctcaagcccgaggcgttctcggactcgtacgaggacatggagaatttgcgccgctccatcgaagacaagctcaagggcgtgctgctggtgggtgtgaaggcgaagctcgtcgagcccggcggcatcgagcgcagcaccggcaaaaccaagcacgtcgaagatttgagaaagtagagggttccgcgtggaagccgcctcgtcgtccgctcccgtggtggggcggttcgctccttcgccgacggggcggatgcatgcggggaacgtgttcgcggcgttgacggcatggctcgtggccaagtcgcaaggtggccgcatcgtgctgcgcatcgaggacctcgatgccgagcgctcgaagcccgtctacatcgatgccgtgcagcgcgacttcgaagcgctggggctgacttgggacgaagggccgtacttccagcacgaccgcacggaggcctaccgggccgcgtacgatgagctgcgcgaacgcggccttgtgtacccctgcttctgcacgcgcgccgacctgcatgcggcatcggcgccgcatcgcggcgagaagccggtgtacccggggacctgccggcatctgagcgacggggagcgcgccgtccgcgcgcagcagcgcatgcccgcgcagcgtctcatcgtgcccgatcgggaggtcgccttcgtcgatcaggtgcagggatcctacgcgcagaacctcgccgccgactgcggagacttcctcgtgcagcgctcggacggcgcgttcgcctaccagctggccgtggtggtggacgacgcggctcagggcgtcacctcggtggtgcgcggcgtggacctcctgtgctccacgccccagcagctctacctgcaggagctgctcggtctgccgcatcccgcctacgcgcacatcccgctgctcgtggccgagcgcgaccggcgcctgtcgaagcgcgaccgcgacgccgccctcgatgcgctgctcgcgcgcttcaagacgcccgaagccgtcatcggccatatcgccggcatcaccggccttgcgcccacatgcgaccccgcaacgcccgaagagctgctggcgacgttcgatctcgccgcgctgccgacgaccttcgacgacctcgtgcaagtgcgctggaggtaagcctaccggagtcgccccgccgcagcgactccgctgccgtgggcgcaaaacggcacccatgacgttttcttgaggctatccactaggaaatcgtatatcgaaaaattcgccatcaggggctttggtcgacgtcgcacccgcacggcacgcgcaaattgccatgggtgccgttttgcgcccacaacggcgaatcgctcgccgaccccctgttttctcagctgaaattccctcactcacgcattttgcgtgagaattttcgccataattcctccacatttcatccagaatgcagatagtttcgccatcgttcgctgcctaaagttagcccaacggaggaatgcagcgaagggggaggcgcatgactgccatgcaagatgaaaccgtcgtcgacgcgaaagccgtcgaggatcggctggccgcaatcgaggacgcggtatgccgccatccgctcaaccgcgaggtgctctatcgcatgctcgcgtactgcgccgaggagcgcgcgttggacgaccttgagcgcgaagcagcatcctggcccgaattcgaaaccgctacccagaaccagtaccgcctggccgagcatctcgtgcgcgccggcgggctggataggatcgagcgagacgagcgcggcgccattgtcatggaacaggacaaggaggggctcgacgaggacgccgtcgacgacctcgtgcgttccgtagcgtttcgcaccaccgaagcgggagtgcgcttcgtcgagcagcatcgccctcgggcgcgcctcgtggagttgctgcagctcgcgccggaacgcgctgacgtgtatatcgagctgctggagttcgtccgagctcgtccgcgcgcctacaacgacatcgcggaactgctgcgtgggcgccccgcgctggaaaccgtcatcgacggcgagcggcggcgcatgcagcccagcgtgttcgtggacaagctggagcgctcgggcgctttggtctggaaagaaggttggtgtctgacggaggagggggacgcgtttctacgggatctgaaggcaagcgagtagaaccatcataaggagaaaggttggagaacatggctgaaaccacgttgacacgtcgaagcttcgtcaaggcgtccgctctggtgggcgcgacggcggcgttcggcgcttcgatggccggctgtatgcaggaggctccgcaggagcaggctccgtccggcggcggcgccgacgagggtctcgtgaggatgaagacgtcctgccacggctgcatccagatgtgcccggctatcgcgtatctgaaggacggcgtcgtcgtaaagctggaaggcgaccccgacgcgccggtaagtcgcggaagcctgtgcatcaagggcctcaaccagctgcacaccatgtacagcccccgccgcgtgctgcatccgcttcggcgtgccggcgagcgcggcgagaacaaatgggaggtcatcagctgggacgaggccgtcgaggaagcggccacgcatatctgcgacgccatcgacaaatacggcccctattccttcttcgccagcgtgggcggcggcggggcctactcgttcatggaggccatgaccctgcccatggcgttcgggtcgcccaccgtgttcgagcccggctgcgcccagtgctatctgccgcgctggagcatgtcgaaactgttctacggcggcaacgaccagtccatcgccgacaacgccgtgcaggagatattccgtcccgaccccgacaacaaggccgaggtcgtggtgctgtggggcgcccagccttccgtcagccagacggcggaatcgggtcgcggaatggccgagctgcgcgccaagggcgtgaagaccatcgtggtcgatcccaacttctcgcccgacgcggtgaaggccgacgtgtggctgccggtgcgcccggccaccgacacgggtctgctcctgtgctggttccgctacatcttcgagaacaagctctacgacgagcagttcacgaagtactggacgaacctgcccttccttatcgaccccgagacgaagctgccggtgaaggcgcaggagctgttccccgacttccagcagaccacgcccgagaacaccccggcctacgtctgctacgacctcaagacgaacgcagtggcgcccttcgagttctccgcgcccgccgacgccgcagtggaccccgagatcttctggacgggcgacttcgaagggaagacgtacaagaccgccggccagatctacaaggaagaagccgatccctggacgctcgagcacaccgccgagaactgctggctcgatgccggcaagatcgaaaaagccatcaagatctacgccgaggcctccgtggccggcatcgccaacggcgtggcgtcggatatgaccgagtccgcctcgcaggtgccgctgggctgcatgggcctggactccatcatgggctacgtcaacaagcccggctgcacgatgacgcagtacggcgccgccggcgcgccgccgacgaagcgcccggtcacgtacaacaacggcttcgacggcatgttctcggacatgtacggcatcggcgcggtcatcggcatgagcgatgccgagaacgaggcgcgcgccaagaagctgggggaggagaacccgcagcagaagctggcgaaccagctgctcgtcgatcgacttggcatgaaggaccacaagggcctgtacgcatggtgccacagccatatccccacggtgcgcgaggccatcgccaccggcgagccgtacaagccgcgcgtgtggttcgacatgtcgggcaacaagctggccatgctgggcaatgcgaagtcgtggtacgacgtgttccccgaggtcgactacatcatcggccagtacccgatgctcacctccttccacatcgaggccgccgacctcgtgttccccgtgcgcgagtggctggaagagcccatggtgaacatgacccagctcaacacccagtggctgcagaacgagtgcgtgcacatcggcgagacggtgtcgcactccatcccagccgcgcaggtggtggcgaaatgcgcggagaagatgggcggcgagctgcccggtctcaagcccggatacctgggcagcgccaccgaggaggaggtcaaggcctccgtcgccgagacgctgcacgcgcccagctgggacgagctggtgaaggacgccgacaagtacgtgccctacgtcacgccggccagcgagtacttccattacgaccaacatgaaaccgtggtggacgatggcctgcctgccggcttcggcaccgagtcccgcaagatcgaggtgtactgccagatcctgctcaagctggcgcgcacgggatatccgttctgctatccggagccgcaggagccctgcgaggactacagccccatctgctcgtacatcgagccggcggagagcccgctatccgacgaggagtaccccttcgtgctcacgtcgggccgcgtgccgtacttccaccatggcaccatgcgccacgccgcgctgtcgcgcgagctgttccccacggccgagatccgcatcaatccggcgagcgccaaggagctgggcatcgagcatatggattgggtgaaggtgaccagccgccgcggcgaggtgcacgcgcgcgcctacctcaccgagggcgtgcatccgaaaaccgtgtggatggagcgcttctggaacccggagtgctacgacgagtcccagacgaacccgacggccggctggcgcgagtgcaacgtgaacgtgctcacgaagaacgacgccccgttcaacgaagtgtacggctcctacacgaaccgcggtttcacggtgaagatcgagaagtcccagaaacctgcgaacgtatgggtggagcccgaggagttcgcgccgttcctgccgactgaggaaatgctgtccgaagctcagacgaaggatgtgttctgatgagaaactgcctggttatcgatctcgaccgctgcagcggatgcgacggctgcgttgcggcctgcaagcttgagaacaacgtcgatttgggcgtgtgctacaaccgcgtgcacgccgtgggacccacgggcaccttcccggacatcgagcagtactggattcccctgcaatgccagcagtgcgagaaccccggctgcatcgaagtgtgcccgacgggcgcatcgtaccgcgacgaagccacgggcgtggtgctggtcaatgccgaggagtgcatcgggtgcgaatcgtgcctgaagggctgcccgtacaatgtgcgcacgctcaatccgaacacgaatgtggtggagaagtgcacgttgtgcttccagcgacatgaggaggaggactgggtgccggcctgcgtgcacaactgctgctgcggcgcgcgctacttcggcgacctggacgatcccgacagctccgctgcgaaggctgttgcggcggctggcgcggagaactgccaccagcttgacgatccgcacgggctcaaaccggcgacgatctacatcttgtccgccgcaacggcggcatggcagggcgatcctgtgacgacggaccgcgtgtccgcatcgtaagcccgcgcgctgcaacccgtcccggcaggccgaacccctcccaaggcctgccgggacacggtagcgcgtccaagccaggggtcgagaagcaacgagaaaggggagtcacgatgatggagacgcagacctgcgcgggcctcgtgtcggcgctcgagggtcgcgcggcgttctacgacgtggtggcggcgctgtactacaaaccgctcgcccaagagcagatcgaccgcattgccgagggaggccttgcggcattcgccggcgcgggagagctcatggcggagggcctgcacgacatggagcgcgcgctgtcaaagcggcactccggcacgcgccaggagctggcagtggacttcacgggcgccttcgccgggacgtcgtcgtggaaaggccgctacgccacgccctacgagtcggtgttcacgagcgaggaaggcctgctgtttcaggactcctaccacgaggtgtaccgcctgtaccgccagaacagcgtgcggaaaagccccggctacgacttccccgacgaccacctgtcgtacctctgcgagttccaggctctcctggcgaggcgggccgtgcgctcgctcgaggcgaacgatgcggaatgcgcgctcgagcaagtgcgcctttcgcagcacgtgctgcacgaccatatcctgtcgtggttcgacgacttcgaggagctggcgctgcacttggtgaaaacgcgtttctaccgcggcgtgctgaagatgagcaagggcttcttcctgttcgacgccgaggtgctggccgatatggcggaggagttggagaggctatgacgttcgcgctggtgctcgcatgcacggttgccgcctgcttcgcgctgcgcaaccccctcaaagcctgcccga

SEQ ID NO: 9670 - DNA, 195 bp, Unknown
  gut microbiota DNA sequence
ggaagccggatgctgagacagcgggcgaagaggccaggcggaccctcgcgacgggacccgaaagagattgttttcgttgtttccaggcgggggagctctcgctcgacccctccggacacgtatgtgtctccctagaaaggaggtgatccagccgcaccttccggtacggctaccttgttacgacttcacccccct

SEQ ID NO: 9671 - DNA, 1625 bp, Unknown
  gut microbiota DNA sequence
tgcgccgtcaagttcgcctgaacgcggcgaggccccgatgccgttcagctccggggcctcgaatgcatgtcgcgtatctgctagtcgcgggtgagcttgcggtggatgcggtgcggacgcgcggcctcctcgcccaggcgctcgacgcggttcttctggtagtcgtcgaagttgccctcgaaccagtgccagttgcccgggttctcgtcggtgccctcccacgccaggatgtgcgtggcgatgcggtcgaggaaccagcggtcatggctggtcaccacgacgcagccgggaaatgccagcagcgcctcctccaggctttccagcgtctcgacgtcgaggtcgttcgtaggctcgtcgagcagcaggaggttgccgccctgcttgagcgtcagcgccaggttcaggcggttgcgctcgccgcccgacagcacgccggccggcttctgctggtcgggtcccttgaagccgaagctggccacgtaggcgcgactgggaatctcggtgtcgcccaccttcatgtagtccagaccgtcggagacgacctcccacagcttcttgttcgggtcgatgccctcgcggttctggtcgacgtaggagatgctcaccgactcgccgatctcaagctcgccgcccgacaggggctccaagcccacgatggccttgaacagcgtggacttgcccacgccgttcgggccgatcacgcccacgatgccgccctggggcagcgtgaacgacaaatcgtcgataagcacgcggtcgccgaacgccttcctgatgtgcttggcctcgatgaccttcgcgcccaggcgcggcggcacggggatggtgatgtccgacacgctggtcttctcgaacgagcgcgcctcggccgccatctgctcgtagcgctcgatgcgggctttgctcttggcctggcgcgctttggggctggatcgcacccactccagttccgagcgcaggcgcttcgccagcttctcctcgcgctggccctggccctccaggcgcgcggccttcgtctcgaggtaggtggagtagttgcccttgtacgggaagaggctgccgcggtccacctcgcagatccactcggccacgttgtccaggaagtagcggtcgtgcgtgacggccagcaccgcgccggggtaggtgcgcaggaactgctccagccacagcaccgactcggcgtccaggtggttggtgggctcgtcgagcagcagcaggtcgggtgcctccagcagcagcttgcacagcgccacgcgacggcgctcgccgccggacagcacgttcaccggcatgtcggggtcggggcactgcagcgcgtccatggcctgcgacagctggctgtcgaggtcccacccgttcgccgcgtcgatggcgtcttgcagctcgcccatctcggccatgagcgcgtcgaagtcggcgtcgggctcggccatctcctcgccgatcttgttgaagcggtcgatcttggccttcacctcgccgatcttgttgaagcggtcgatcttggccttcacctcgccgaacgccatctcgatgttctcgatgacggtcttgtcgtcgtccagaggcggctcctgctgcaggatgcccaccgtgtagccgggcgtgaggcgcgcgtcgccgtt

SEQ ID NO: 9672 - DNA, 196 bp, Unknown
  gut microbiota DNA sequence
cgcctccagcagcagcttgcacagcgccacgcgacggcgctcgccgccggatagcacgttcaccggcatgtcggggtcggggcactgcagcgcgtccatggcctgcgacagctggctgtcgagatcccacccgttcgccgcgtcgatggcgtcttgcagctcgcccatctcggccatgagcgcgtcgaagtcggcg

SEQ ID NO: 9673 - DNA, 295 bp, Unknown
  gut microbiota DNA sequence
cggggcagcatatataggtatacggttccggcggcctaccggctatcggaacgggtcgacgctgcggcttccgtggcgcccggtctcgccatttgttcgctttcccttgcgcgcgaagcacgcgcggccgcgaagcggagcgatctcgggcgctgcggaaaccctcgtcggctttgcaggacgggcggtgtttcacgtgaaacattcgttcgcatcgactcatgagaagggcaaggagctttatggataccacggtcatgctggggcacggcagcggcgggacgatgatgaagcg

SEQ ID NO: 9674 - DNA, 2496 bp, Unknown
  gut microbiota DNA sequence
gcatactcgtcggcgaacgtatcgagaccctccagcacgctgcgggcggcctcgtagccgatggcgcaatccgacgtgtcgcggatcatctcggccagcgcgcgcaggccctccagtacgccctcgtcggcgtcgcagtccaccacgcgtttgagcatcgccgccagctgcgggatgccgtcgcgacacggaacgcactttccgcaggtctgcgcgccgcttgcctgcagcatggtcagctgcacggccagcgggcacatgcccggcggcgtcgcctcgacacggcgcgcgaaggtgtccaggtgcgcggcaatccgcgcatcgtcgcgcgaccgcggcgcaatcgatagcttggccactggctctccatccattatcggctcgaaaccgacgagcgtctccaacgtgtttcccgtgcgtcattctaacgcaaacgacgcgccttgcggcggccgcgcgcgcaaggcgcggagaaggcacacgggcagcgagcggcgcagacgggtcatgcggaccgaacgatcggcagctgtcccacagaaaggacaggcttgaaccgccgaacgtgtaccatacgcaacaagagagcaaaggagagtcccatgcatgcaagacaagccgaccaaacgtcccttttcgcccccgtcgacgcggccgcggcgttcgcgaacctgtaccagcgatggttcgacgacccgcgcggcctcgcacgagccaaccgaaggcaggcgcgctgcgccgtcggatcgtacgtggcagacgtgctcgccctgttcgacgaacgcgcccgcgcctacctgcccggcgcgcctaccgtcctgcggttcgaaggctgcgacctcgccgtgttcgtgatgcgggggccgcacatcgcgctgcacgtcggcagcttggaaaccgacgcgcccgtagcgggactgcgctggaagagcctgcgcccctgctcgtacgccatcggacggcaggtgagcgatcttgtgttctgcaccgacgagaacgggttgctcgtggaactggagatcgtcctcgacgacggaggccgactggtcgtcggcggcggccgacccgcctgcgagcacgacgaagaggcgatgccgcaggcggtgtgaggcgcgcggacagccgaggcgctggaacggcggcgtcctactcgtacgcggcgacgatgtcctcaaggtaggcgcggtactcctgcgccagcgcggtcggcttctcgatgcgaacgcggccgccgaactgagccagccacccgaacagcacggggctcttcatcaccgtcgcgtacacgcgcgcccgcctctcccccgtcggcaccgactccacgtccttgccgaaccggtcgatgaccgcgcccatgacctcctcgtccaccagcagcgtggccgccaccggctcgccgctgtacatgccgaacgcgcggctttccagctcgcgcgcgtcgaacgtggcgatgcgctcgtttttgagcgcgggctcgtccagcacctcgatgcggtccatgcggtccacgcggtagttcgcgaaatcgtcatgcttctcgttgaacacgaccaggtagtagtagccttccgcgtacacgagctgcacgggcgtctcgatgtagcgctcgccgttatgctgcagcgccttgcgtttcgccgcatcgtacttgaagtagacgaacgagatccggcgcttgagcgcgatggcctcctggatgcggtcgacgctgccgaacaccgactcgttctgcatcttgatgcggccttccacgtgcacgcgcttgtccagcagcgcgcgctgccgccgcgaggccagctgcttcacgccctccaccagcgcgtcgcttttacgctgcgtgaggaagcgggagctctgcaccgcgtccaccagcagctgcagctcggcgaacgcgaacgcgcggtgctccacggcgtactccaccggcgcgcgctggtaggtgcgcacgtccacgccgaactcgcgcagcgcctcgatgtcgcggtagatggacttgcgctcggccgagatgcccagcgcttccagcttcccgatgatctgcgccatcgtgaggccgcgttcggcatcggtctcctcctcgagcatccgcatgaggtacagcagcttgagcttctgacgattgatggccatggctcctccttggcgacgacggtgcagcttgcctgccacgctctcagtatagccgccctatcctcttttcggtacagacaatcgatgaacgaccttgacgggttcgccgggatgcagtaggttctcactcgaacatgtcgacggaaggaagcgtatgcagcgcgttatcaacgatcggaaagtggccatcgtagggtgcggattcgtgggttcggcaaccgcgttcgcgttgatgcagagcgagctgttcaccgagatggtgctcatcgacgtcgaccgcgaccgcgccgagggcgaagcgctcgacatcgcgcacggcatgcccttcgccggccccatgaacatctacgcgggcgactacgacga

SEQ ID NO: 9675 - DNA, 134 bp, Unknown
  gut microbiota DNA sequence
ccctccttggcgacgacggtgcagcttgcctgccacgctctcagtatagccgccctatccttttttcggtacagacaatcgatgaacgaccttgacgggttcgccgggatgcagtaggttctcactcgaacatg

SEQ ID NO: 9676 - DNA, 284 bp, Unknown
  gut microbiota DNA sequence
tgcggcggacgcggctatcgtcatcgtcacggccggcgcgaaccagcagcccggcgagacgcggctcgacctcgtgcacaagaacgtgcgcatcttcaagtccatcatccccgagctcgcacagcgcgattaccagggcattttgctggtggtgtcgaacccggtggacatcctcacgcacgtggcgctgaagctgtcgggcatgcccgagtaccgcgtcatcggatcgggcacggtgctggacaccgcgcgcttcaagtacatcctgggcgagcacctcggcg

SEQ ID NO: 9677 - DNA, 9943 bp, Unknown
  gut microbiota DNA sequence
cgcggccgatgcggccatcatcatcgtcacggccggcgcgaaccagcaacccggcgaaacgcgcctggacctcgtgcataagaacgtgagcatcttcaagtccatcatccccgaaatcgcccatcgcgactaccagggcatcttgctggtggtgtcgaacccggtggacatcctcacgcacgtggcgctgaagctgtcgggcatgcccgagaaccgcgtcatcggatcgggcacggtgctggacaccgcgcgcttcaagtacatcctgggcgagcacctcggcgtggacccgcgcaacgtgcacgcgcgcatcatcggcgagcacggcgacagcgagatcgcggcatggagcacggcgaacatctcgggcatcccggtgaacgacttctgcgagctgcgcggccatttcgaacacgacgagtcgatgcagcgcatcgccgaggacgtgaagaacagcgcctacgagatcatcgcgaagaagaaggccacctactacggcatcgccatgtcggtgaaacgcatctgcgaggccatcgtgcgcgacgagaagcccatcctgcccgtgtcgaacttccagaacggcgtgcacggcctgcacgacgtggtgctgtcgatgccggctgtggtcggcaagaacggcatcgagtaccaggtgccggccccgctgtccgacgacgaactggcgcgcctgcacgagtcggcgagcacgctccgggaagtgatcgacgggttggatttggagtagacggcgctcaatcgcgccacttcgtgcggagctcccagaaggccacggcgctggccgccgccacgttgagggagtccacgtcgtggtccatggggatcttcaccgtgtagtcgcagttcgcgatcgtcgagggcgcgaggccgtcgccttcggtgcctagcaccagcgccagcttgtcgcagccgcgcaggcgctcgtcgtgcaggaagatcgcctcgtccgacagcgcgagcgcggccgtcgagaagcccagcgagcgcagaagcggcacgccctcggccgcccaggcgcgctcgcttccgatgcgcgtccacggcacctggaacaccgtccccatcgacacgcgcgcggcgcgacggtacagcgggtcgtggcacgacggcgtaaccagcaccgcgtcgatgcccagcgccgccgccgagcggaacacggcgccgatgttcgtgtagttcgtcacgtcctccaacacagccactcggcgcgcgctcgccagcagatcctccacgcggggcaagggcgggcgctcgaacgcggccagcgcgccgcgcgtcacctcgtagccggtcagggcgcggaactgctcgcgcgtggccacgagcacgggaaagtcgggatcgccgtccaacagcgaatcgacgagtggcatcgtctgatcgagccacttctcctccatgaacagcgagcgcatccgcaccccggcggccagcgcgcgctcgatcaccttgcgcgactcaccgatgaacaggccgtgcgtgctgtcggggcaatcgcgcaactgcgcgtcggtcatgcccgagtacgcggcgagccgcgggtcgtcgaggtcttcgaggtggatgatcggcatgtcgttttcctttcagtcgccgaccatcgtaccaccgctcgccacgatgctctatactcgactgatccgatcaagcacgtcgcgcgaaggggatccttatggccgctaccgtcaaaacgcttctcgaacaccacggcgagctctactggggcacgcgcaaggccaatcccggctactgctacgggctggcgctcgacgtgggcgcagacgggctggcagccgagctcgtatacgtgatgagcgatcttgacgagaacgacgaaccgctcgtgactcccgagacgctcgtgtcgtgcttcaccgtgaacgacctcgaggacaacggcatcatcctcagcaactacctggacgacgaggatgcgcccgaggccgtgggctggtactgcatcgagaagtcgttcttcgggcgcgacaacgtggaggcgctgctggataacaacgctcgcctcgacggccatctcgacatcgtgctgcagatcctgctgatctcgccggaagaggtggcgcagggcatgccttcgctcgacgagctgtcgttcttcgacctcctggaggagctcgaaggcgtcgcggagcgcatcgacaacggcgacgtgcagccgccgctgcccttttcgttccgcctcgtgggcgacgcgctgttcggctgggagcacgccgacgaagaggatttccgctaagggtcgacgcaccgcgggcgtgcacgtctttaaagtgctatgtgcggcaaaatccaggttttggcacaccgcgcgttcggttcgagccttcggaagggcatcgcgcttgcgcgcgtcgacaaaaccccaggtggggttttgagttgtcgagccgcacgccagtccgtcgtgccaaaacctggattttgccgcacatcggcttctgaattagtgcgcatggcaacaccgaaagctcaaaccccctgccctgagagaaacctctcccacttgtcgaattcggataaagcctgcatgcggcctcgctcgtagttgcgggcgagcttctccgcgtcgcgctcggtgttcttcacgccctgatcgttcgcgtagaacacgtaggcgcggccctcggcctcgagtcggtcgagccggtcgagttcggcgtcgtagcgccggttccaggtgtccagcgcctcccgcatgcgcggacgccgccagaagaacgcgtcgtagaagcggttgggcttgagcggtctgcggaagccgcgcggacgcgtgcagacgacgaagaacctgctcagcccatcgtccatcgcgcgcggcaccatgatgccgccgcctcgtccgatgccgccgtcgtacagcgcacgcccgtcgacgaccgtcggcggcagcacgatgggatagctcgtcgaggcgcggacgcgctccatgagcgtctgctcggtaggaaaatcgccgcgcgtgaaacagaccgtctcgcccgtgtcgcggtcgatggcctgcaaggtggcgcgcgctgggttcgcttggaaggcgtcgaagtcgaagggcagcgcgcagcttgagaggacgcgcgcatcgccgtgcagcgccgcgccgacgccgtcggcgtccacgaacagcatcacccaccagcgaaacaagaggtcgtcgagacatgcggtgaacgaggcttcgttgcggcgcgcgtcacgcgagacgtagtcgatcgcattcgtcgcccccgccgacaatccgtacacgtcgtcgaagaacagcccttgctccagcatgacgctgatcgcgcccgccgaatacgagttgcgcatcccgccgccctcgaacacgagagccacgtcgtgcaccgtgctggtcatcatgtcccgccgcctccttcgccaccgacgcgaacctgcatattcgcccacgatacgcggagaagcgaacggacgacgagaacgagcgcaaccgtcatcgggcactcggagatccgtcaatcttgcgtggagaaaccatgaacgagtctcgccaacgcacagaatcaaccggtgctgcttaagctgtaggcattttcatcgacaggaggatgtatgtcttacgacggtcgaacattcatatcgaaggaaaactcgtcgaacggagaagtggacgggcgcacgaagtttcactaccgtcaaaacggaagcaccgtctgggcgcactacgaaggcggggatatcgtgcgcggtagccttttaggaacggccgacgagcaaggtaatctgcacttctgttatcaccatctcaacgtcgcaggtcaagtacgcgcaggagaatgctggagccgtccgacgaaacgcgccgacggaaagctgagaatgaacgagacgtggcgctggttcaatggcgatcgttcggaaggttcgtcgatagtcgaagaggagtagatagctggacgaatgcagcgcaaagcgcatgcacgcggcggacggcgcttctaccaggagtgggaaggcaccacggggcgaggaaggcccactgtcgctgcactacggctgccgccacggccaccagaacttcggcggcgagtggaagatgctcccctgcccgacaagcagtggttcgtgtacgattccgaaggcaagcgcttcggcgcctacatgggcaagcacttggccaacaacacgttgcagaaccagaccgagaaaaccgagatcgaccccgccatcgacgcggtggccgacggctacgcgctcacggccgacaccatcgaggagcttgccgcgctcatggaggtaccctcgggcgagttcggatccatctgggccgcgaagtaccagggcagcggtaacatcaccgaatgcatggtgttcggccgcatcgccgcccgcgagctcatcgcaaaggaatagaacgcctttcccttccttccctccctccctccgcatgcgcgggcctcttcggaggcccgggcgcgttctttttctgtgctctggctcaggaattcattcgtacgcatgaattccttgcaatatgctagaattcatgcgtacgaatgaaaaactagcaacagggcaagtattccctcgtacgcatgaatcgaggttttatggcaacatacgcaacagcgcaagagctggggcgcatcgttcgggaggagcggaagcgcaagggatacacccaatcgaagctcgcgcgcttctccggcgtcggaatcaatttcgtgtcgaacctggaaaatggcaaggaaacctccgagctggggaagaccctgcgcgtcctccaaacgctcggcatggatctgagcgccgattcgagggatgcctgatggatgcgctctcggtattcagaatggacggttccgaaccgcgcctactcggacgcatcaacctcgatcccgtcacgttctcctacgatcccggctacctcgccgaccccgacgcgcgagcggtctcctgctcgctccctctgcgaaacgaggcctatagcgaatcgacgctcgctccctacttcgacggcctcttgcccgaaggtgcggcacggcgggcgatcgcggcgcagctcggcatcgagcccgacaactacctgctgctgttgctccgatgcgggctggaaaccataggggacgtcgcgatcacgaacggggaggcaccgaatccgcgaggttcgtaccgccgtttgagcggcttcgatcttcgcgccctgttctcggccatggaagagcttgccgaatcgaattccgaagcgcggctttcccttgccggcacgcaagggaaagcggggctcgcgcatatgccgggcgcgcccatggatgaaggctggctccaacctttggacggtgccgcttcgacccatatcctcaaaacgggatcgcttcccgacatcccgctgctcgagtacctgtgcatgaaagcggcggccgcatgcgggatcgccgtcgcaccagtgcatctgctcgacttcgggaggccggtactatgcgtcgaacgctacgaccgacggcaacttcgagaccgaggagagccagtcgtttcaaggcttcatcaggaagacctctcacaagcgttcggagtaccgcccgaagcgaaataccgcgagctcgagccctccaccgccgcagcggtcggctcgttcatccggatgcgatcctctcgccccatcgaggatctggaagcgtttgcgcggatcacgtgcttcaactacctcgtaggcaactgcgacaatcacttgaagaacctgtcgatcctgtacacgagcacctggaagagcttccggcttgcgcctgcgtacgacctcgtttcgacaactcggttcgaacggttctcgcgatcgatggggatgaggatcggatcggcatcggtcatcgacgatgtctcgcctagcagcattttggaattcggctccgcgatcggcgtggatcgcaaggatatcgcgcgcatctgcgccgaactcgcgagcagtgtacccagcgccatcgaaatcgcaggtgaaaccgctcctgcattcgaagccttgccgtacgcagcctgggacatgcgcgaagacatgggcgagcggatgcgcgtgcttgaagaagtcgccggctgacgaagagcgcgtcaggcggaggcgaaaagctgccggctggtccgcgcgatacgggcggcaaggtcgtcgcggggcgtgcgacgtaggtcggcgagggcttcgagcatggcggcgagccgagcggcttcggcgggcgcatcgtagcgctcgcccgcctgggacggggcgtcggtttccagcagcaggcgctctgccgggacggcctgggcgtaggcacggccgcgcttcgacgccaacatgcgcgggttgatcgagaagaagcagccggcgcggacggcgcgctgcagctcatcggacgcgcccgagaaccaatggaagatgcagacgtttcccaccagcgcgcccgcgcgctccagcacgtcgagcgcctcgcccgcagccttcacggcgtggatcgacagcaccttgccgccgcctgcgcacgtccgcgccacgcgctcgaacgccgcgacctgcgcatcgcgcgtcgcggcgcgatcgcggccgaagtcgaggccgacttccccgatgaagcgctcgtccttcgccaacctctcgaacagcgccacgtcctgcgggtccaagcaaccgtcggcgatccaccacgggtgcaggcccagccccacgcgcacgttgccgaacggctccagcagctcgcgcgcccgctcgtagccctccggcgtcaccgtcgtcgagaacgcgcccatgccgagctcggccagcacctgggcagccgcccgcgtgtcgggatcgaagtccaggtggcagtgcaggtcgaacagcgcactggctgacgccgctcgagatctttcgactccgcgttgcgcgctgcgcccaggatgacaagacgggcgctgcacaggctcggaaggttcggtcgggtacgccgcgggctcggggcgatctgccggaggatgcgcgtgtccgaggcgaggcgcttccgacgtcatgcgtgctcctcccccgcatgcgcgccaacgcctgcgagcgcgcacagcacctcgccggctatcatctggcccatgatgggcggcacgaacgaggcggtgcccaggttcgaccgctcgcggcgctccgcaccctcgcgcacgggcaccggcacgggctgctcgcacgagtacagcacgcgcaggcggcggatgccgcgtttgcgcgcctccttgcgcatgattcggcacagcgggcagttcaccgtgtcgaacacgtcggcgaaccggaaagcttcgggccgcagcttgttggccgctcccatgctgctgacgaggcgcacgccgtgcgcatcggcgtactgcgcgacggccagctttgccgagatcgtgtcgatggcgtccaccacgtagtccaccctgtcggcgtaggcgtccaggaattcgggcacgtcctcggccagcacgaaccggtcgagcgcctccacctgcgcctcggggttgatgtcggcgatcatcgcgcgcgccacgtccaccttcttacggccgatggtgctgcgaaacgcgatggcctggcggttgatgttgctggcctgcaccacgtcgtggtccaccacgatgagccgccccacgccgccgcgcgccagcgcctcgacgcagttcgagcccacgccgcccacgcccagcaccatgacggtggaatccgcgaggcgcgccaggccgtcgcgtcccatgatcagttccagtttcgaggtggcggtgtcgccggttgccgtcatgcgcgtcctttctatcggcgaccatggtagcacggccgccggatcggccgcgcgagaagcccgctgcattgtcgcccgaagcggtcggtttccgagtccgaactgtccgtttcgaacgcgacggcggtcgcggcgacatggcgcctgcgatgcgcgtcgacgcatcatcatcgctccgaaaacacgcctcacgcgctgtggcgtgtttttagggcgaagatgcgcggcagcacggaacgcctatcgcgcccgcccgattcccagacgcgcgaggtcggccgcgaagcgctcggccggcaggccgataccctcgaagccggccgccttgcacgccatacgctcgttggcgaggcggcacagctcgtgcgggaacggctcgccctcgtcggacggaaggggaagcgccagcggcagcagcttatccaccagcacgttcatgaacgccacggggcgccggccgtgcgtgcgcgtcacgaccggaatcccgccgaagaacaggtacgcgtcgatcgaaccctcggcgaagccgcatgccgccagcgacgcgcgcagcgccgacaccgccgagcgctcccagtcgcgccactccccgggctgcatgcacgcgaacgcggcgaagcggttgctcgcgttcgccagcagcagcatatcgcaacctcccagggctatgcggtgcgcctcccagcagaacagcaggtcgtccacctcgccgtacggcgggcgcggcaggcccacatggcgctgcatgggtatggtgatgccgaattccacgcgctaccccgcatcctgcgagaaccgagcgtgcgggcgcagtgcgtccttagcgaagcggacgcgcaagcagcctccctcatcgagcgcggcatcgaagctgtaggcggttgaagtcatgccgctcagtataccccgcgtcgcgacgtcaggacgcgacggaagccgcaggcggattcgccgccagctgcgccgctccggcagagccggccgtccccgaacccgcggtcgagccggccgcaccgctggagcccgtcggcgcgcccgtgctgccggagccgctgccggaactgccgctcgatccgtcgcccgaatccgacaggttgccgctcccgccgcccgaaccgctgccgccgtccgacgagccgttcgatccggaagagccgctcgagtccgtcgaccccgagccggatcccgagttcgacgatccccggtcgcccgacgacgacccggaattcgacccggaatcggttcccgagccggagcccgaccccgacgatcccttgccgtccgactggctctcgccttgatccttcgcgccgtccttggacgcgtcgctttcctcgggcgaggaagatcccgtcgaagcgtccttgccgttggaagccgccggggcgtcgtcgaccggctggctgcgcgacggcaggataggctcggttttcgcgcccacgccctggccggccgacacgaagtcgatgacgaaggcggataccgccaccgcaagcagcgccgacacgatggatacgatcaccacgccgcgcttgaacttcttcttgcgctggcgctcggcgcgcgcccgctgcaccaccgtgccgccggcgagcgaggcgtccgcatgcggcgtccggccgcgcggggcttccttcggaagcgccgtcgtctcggcagcatcgagcttcgcggtcgccgcagcgtgcgagcccgcgaccgaccccgcgccgactgcggcacccgcgcctccgcctgcactcgcgccgtccttcgatcccgccgaacccttcgagcccatcgccagcgtctcgcccggatggatctccttgagcttgtcggctgagcgctgcaaaaacttcttgtacagctgcgatgccacggccgacaccaccgagcccacgcccacgccgatcgccgaaccgtatatgccgatttgcgaggctagcagcatggacgtaaccgcagcaagcgcacccgcaacgacctgggctatcgaaaggtcgtcgaaaagcccgcccaactttccctttctgctgttcgcctcctgcgccatcgcctatcctcctcgcgtcgttctcgcgccggccctgcgccggccctccttcctgaacatacccgaggattatgaagctcgtgcgcactccatccaaccgttaccggcaagccacagaacgtccaaccatcccgcgccgaactcc

SEQ ID NO: 9678 - DNA, 1220 bp, Unknown
  gut microbiota DNA sequence
ccgccgaatgcgctcgcacatcgtcatgggtgccgtttcgcgcccagatcgtcggaagccacccgacgaaatccacccgccctcggaccgccagcgcccgcctacaccactacgagcaggccgagcagcacgacagcgatgccgctcatgaggttgacggcatcgttcgtgacccaggcgtagccggacacgagcgcggcctgggccccgcacggcggcgtttccacaagccctccctcagcgtcgttcggacagcggtacttcgcttgcatgaccacgcccagcacgctgtccacgagcgagcccacgacgccgcacgcgatgttgaagaagaacgcgtcgggcccggtgggaatcgcgtagccgaacgcatggaacagcagcatggccagaaacgccgaggttacggctcccaccacggtggccgcgagacccaacgggctcacgccgcccgaaagcccgcgctgcatgggctcgcgcgtgaggatgttcaccggcggtcggcggctgtacacgcccacctccgacgcccacgtgtcggccgtgctggccgccagagcgccggacgccagaagcagcagccacggctcccccgtcgccgtgtacgccagcgcgcacgcgaggaacggcacgctgttcgccagcacctgccgcaacgtacgcgggccgctgtgcttacgcgaagcggtcgccccgccgttccgcttgaccgccgaacgcgccatcagcttcgacgcgacgttcgagctgccgaagaaccacatgagcagcagccacagcggccacccgccgatagcgaacgcgagcgtgcccaccgccacggcgccgaggccgccggccacggtgagcagccgcagccgaaacgacgcgagcgccaccgcgcccgacagcagcaatcccgcgagcgcgggcgtgtaggcggctgcgggcaggaacagcaccgcgtacagcgccgacacgcccagcggcacgaacaggttgtcgagcccctccaccgagaacgcctcgatggcagcggcgaccgcggccagcagggccgcggccagaagcgacgccgcgagcgagcccagcggggcgaacgcgccgcccggcgcgcccaggatgccgcccgcaccgaaaggcggcggcgccatcagcacgacggcgcaggaagcgaagctcaccgccagcatggtcgcgcttcccaccagcgtcttcccgcagcatcccaccagcacgcg

SEQ ID NO: 9679 - DNA, 586 bp, Unknown
  gut microbiota DNA sequence
accgcgtagtacaccgtgcccggcgtgtcctcgccgccgtcgcgtcccatgaacgacagcttctgccgacggtacgcgaacgcgttcacaaggatgaacgcagcgggaagcgccgccgcccacagaggcgaatcgaagaaccgggccgcgatgagccaccagccgcccaacgcgatatgcacgaacttgcgggttgcctccgacgacgcgccacgccgcgcggccaggctggacgctcccagcaccgccagtacgtacgcgagcgagacgcccaagccgatcaggttctccatcacgtcgcccatcatcgctttccttcctcgagcgccgccagcgcttcgtccaccaactcgcgcgccgttgcctttgacacgacggcgcgatgctcgaagcaacggtagccgtcggcgcgcacctcgtccaagatgccgcggtacaggtacagcgacgacagcgtgggaagccggctgtcgtcgtccagctcgatcacgtcgcgctccatggggcggtacaactcctccgagcggtgcgccaccgtctcccaagcgttgcggaacgcctcgtccaccgcgtgcgcgcgcaggcg

SEQ ID NO: 9680 - DNA, 1599 bp, Unknown
  gut microbiota DNA sequence
acgtgggcagacggctgtcgtcgtcgagctcgaacacgtcgcgttccatggggcggtacagctcctccgagcggtgcgccaccgtctcccaagcgttgcggaacgcctcgtccaccgcgtgcgcgcgcaggcgctccggcgcgtacgacgccgcctccagcacctccgcgggcaggtagacgcgcccgttctccaagtcctcgcccacgtcgcgcaggatgttggtcagctgcatggccacgcccagcgccaccgcgctgtcgcgcaaaccgtcgtccaccggagaagcggcgtgcaggatgggcagcagcatgagccccaccgacccggccacgtagtagccgtattcctccaggtcgcccatcgtttccggctgacggaacgacaggtcgcgacgctgtccttccagcatgtcgaagaagggctgcgcgtccaggtcgaacgacgagcataccgcgtcgagcgcgcgccacaacggagcgtcgaccacggtgcctgcgaagaaccgcgcaaggtcgtcctgcacctgctcgagcttcgccgcgctggcgtcgcggtcgacgcagtcgtcggccaagcggcagaacgcgtacagcgcgtacacgctctggcgcttgcaagcgggcagcagcgagaacgctcggtagaaactatacgagtttcgcctgatcacgtcctcgcaccacgcgaaatcgtccgcgcgctcgtcaagcaagctacaggcggtcatcgcgcatcagctcctctgccgccagcttcgcgctgagcagcacaatgggcacgcccgcgcccggatggacgctgctgccgcagaagtacaggcggttgcagtcggtcgccttgttgtgagggcgccagtagttgctctgcccgagcgtcggccgcaagccgaacgtcgcgccgtcgtaggcgttgaaccgctcggcgaaatcgagcggcgtgtaggcgcgctcgaacacgatatggtcgcgcacgtcctcgtacaccgtctcgcgctccatgaggtcgagcacccggtcgcggtactcggccacttccgcgtccgtccagcggggcgatgcgggcgacagcggcggcaccggcaccagcacgtacagcgtcgaacagccctcgggcgcaagcgagcggtccagcgacgaaggcgcgtagcagtaaaacgacgggtcgtcgggaaagcgcgcgtcgtcgaaaatgtcgtcgatgttgcgctcgaaatcggaggcaaagcggatggaatgcaccgcatcggagggatagcgtttgtccaagcccaggtacaggatgaagcacgagcaggagtactccatgtcctcgaccttatgcggcgtgtacttgccgcgcgcgtcggcctcgtcgacgagctgggtgatggcgtaggggaagtcggcgtcgcacaccacgtagtcggcatagtgcaccgtccctcccgcctcgacgccgcaggcgcagccgttctccaccacgatgcgctccaccggcgtggacgtgcgcagctcgccgccttgctcgaggaacagccggcccatagcctgcgccatcgcgtacatgccgcccttcatgaaccacacgccgtacagcagctcgatcatagggatgatc

SEQ ID NO: 9681 - DNA, 1416 bp, Unknown
  gut microbiota DNA sequence
tcctccctgctcgagaaacagtcggcccatggcctgcgccatcgcgtacatgccgcccttcatgaaccacacgccgtacagcagctcgatcatagggatgatcatgtacagcgaggggccttcgaacggcgagatgccgatatagagcgtttggaacgcgagcgccttgcgcagccggtcgtccttcacatgatgcgcgaccgacgagtacgcgtcgccgagcgtgtgcaagcgcagaccggctaccaagcttttcgggttgtagaaatcgatcggtttgcgaaacgagcgttgcaggaagttgtccttcgcgatgaggtagcgcttgtacagcagcgccaggtactcgaagtaaccctgcgcgtctttctccccgacggcctccacggcggcggtcatagaggcgagatcgttcgataagcgcagacggtcgccggggccgaaggagatgtccatgagcggttcgaccttctccatggggatgtagtcgtcggcattgcggccgcacgtttcgaacacctcgcggtacagctcgggcatcatgacgatggtgggacccacgtcgaacgtgaacccttcctcgcggatctggttcatcttgccgcccacaagcggctccttctcgaagagcgtcacctcgtatccggcatgctgcaagcgcgcagccgccgccaaaccggcaacgccggcaccgatcacgataacccgtttcatgcaactccttcggtggaacccgatacgctgtccggtcattgtatggctcgcgtatcggccttccgaagcggaaaagtcatcgtgatctaacccgttagagcctcgtcatacccgcgttagattgcaggaagggacggcaagccgggttccccggccagatcggcaagcgtgacgccgtcgacgtagcgctcgatgacctcgtcgaggccggcccagaaacgcacggtagtgcattcgcccgctcgcgggcaggccatcccctcttgcaaatcaaggcacgccaccggagccgtggagccttccaccgcgcgcagcacgtcgcccgccctgatagcggccggctcctgtgccagcgcgtagccgccgcccttgccgcgcacgctgcgaagcaaccctgcctgcacgagcggacgagccagctgctcgaggtacttgagcgagatgtcctcgcgctccgacacctcgcgcagggcaaccttaccctccgctcccgcttgcgccacgcacaccatgagccgcagcgcataacggcccttcgtcgatacgagcatctcgatcacccttcctttccgtttcgcgccgcacacgatggcgatctcgcgcggcagtcccgcgtccctccatgcgaacgtatcgcgtgaagcagtcgttcgcaccggaaggccgccgaccgctttccgtaaattctagcaaacttgtatg

SEQ ID NO: 9682 - DNA, 4898 bp, Unknown
  gut microbiota DNA sequence
gtccgtttttctcgggcaggcttcgcccgccctccagaaacggattgatacaccaactttcgggacgctaccagcagatccaacgcccacaacgctatcatggcgagcagtgctgacgaggatccagcgagcccatgccgcatcgactcggcagcaatcggccaatttgccgctactccaaaaccccactggactcttcgaggagaacctacgcgtttttaactgccggccactttccgccactgcgggcgatcaacgcttcctcctcctcgatcatagcgtcgatctcctccctcgtcattcctgcgaaccgttcagctggcgattggtcgtacggaggaatgttgtcggatccgtcaatgtcgatatagatgcttgcagatttctccatgataccccgccctttcagtccgccctctcatcgtcgcctcggacgacacgattcagtcatagtctttatccacatcgacgcgcatggatagttgtacattccgagcaggaggccccggctcgcagctgcggcaagcctgtcgccgttgtacgtgcttgaccaccagcccattcgtcaccgtgttccaaactttagagcacgtggcagcttccaagcagctacggcagtcttgatggatctcggcaatttgatttcattcttaagttcttcaggagcgctatcgaacgcatcgcaatgagcatcgaagcacttctccatcgggtggtcgcttccatactttttgatggtcgatccgataaagggcgtggatgggtacatgaatacgcttttcacaaggtcgcgtcacttggcaatgagcctcttacatcctgcccgaagtctggaccgcagcgcgcgtccaggctcctgctgcttagaagcatcgcccaggtcggcttgcgcttggctttgcggcaaaggcagaaccgacccgccgggactacaccgcatcagcaagcaaaaggtccccgtcttagctgttatccgacaccgacctgcacaggttgtcaaggcgcgatgcgcttcgcttgcattcgttgacgcttgaaatagtgaccatgcgcttgccagtcggatatgccgcgacgagctgccctgaatccagaagctgatcaacacggcctggggacacgcctagctcttccgccgcctccgcgagcgtcatgcacaagctctcgcgaatgaaaccgtcgcccacctccacgcacagcaccaactgcggggcctcgccgaaggtcgcctccggcagcggctcgtcgttgtcaagcatgtccgcgatgaggagctgcaaacaaccggcggcgttctcgcacgcctccttgacgctcgtcccgcctgcgaccatgcactcgaaggaggggacggccacggtgtagccgccctcgctctcgcgaattatagatccttcgtaagtgtagaacatgcaacctccttgaacgccgccttctacagcacgctgataacgtcaatcgacggcgcttttctctgagaccattccagtaacgttgatgccacccatagccgccgcggagcgcgactgccatgcgcctcctgcacaccgcctcgttcgttgtgcaggttaccgagacgataccacgatcgatgaccttgggcagcaggagcatggcgttagtgaagtttgtctaattaccagtcagtttatcactgctccaaagccttgatgtcgcaatactcgaccacagccgtttgctcttgcgattcgctcatgttctcgcctccttgcacgttcgattgtgcagggagcgtcacatatgatgggcggcgcagaacgccgattaaaaaaggaggcgacgttgaacgaaacgatcggatgcccgcgctgtacctattgcgcggcctacctgccagctgggtccacaagcgcggaaagtctttattgcacgtacctgagaatgcatgtcgaaaaagacgatggatgcaggttcggagccgcgggaaccccgatgcgtggctcgaacgccccgcaggtagacaccggaatcgatgcgacggcaaggggatactatagctggtgtgcggagctgatgcgatgacgaccttcggaatggacgagctacttctgtcggcgaccatcgccaggaacggcatcgcgggttagatcaggaaaacgcccaccatgaggggggggggcggatgatcggatactcgaggcaatagaagagcctctacacagcgaggcccctccaaatcatagaactaccagcgggagcattctccgtacttggacgatatcagcagcgcgagaagctcgacgaacgtcatggcgcacaggacgagcagtatcaagaatgcgaagaactcgtagccgttgatcgggatgagcacgccgaagaacagcatccagagccacgcgaagaacagcaggacatgggcaacgcccaaccacttcttcccggcgtagaagtcgtgccctccccacactccgaggaacaaccacagcagcagcgcgaacagcttgcgcttccccgcaggctcgaccgtggcggtcgcggtcatgccgactccgtacaagccgttcgggaacggcacgcccgccacctggtacgcgtattggcacgctcccacccactgagggttctgcgccctatcgaacaacccgtacgtcccatcggcgtttagcccgacgtactgatccgacgtcatagccgcttgagcgtcgttgatgttggcgtactgcatggctccccctcgacaatcatgatgttggcaatgaatattacaacagcaggtcaccagtcacaaccgccttggcctccttgaccgcccgctcgtagacgccctcccgccaacggtcgcggtgcagcacttcgccgtgctcggccactagatcgcgaagccgcgcctgcttcgaccggacggccttccgcgcttccaagtcgtcgatccccgccgcccgcaacaccgtttgactaccagccagtttgtcactgctccaaaaccatgaacgcgaaaacgaggccgtgtcccgattcgatggtcggggcgtgcctcgtcttcatcccgtactgtaccatacccgaccgatgcgtggtgttcgccgtcgggaagacacggctcccccacgtgggttcgcctttgaagcggcaaagatttccttcgccgtccagcaccgcccatcccaccgacccggttccgatatcaagaccgatttggtacgactcgacattgcgcaaattcataggttccccttacctgcctttcggggcgccgcggaggcggcaactttgactctatatgcgaaggacccctgataggggtccttcgttgttccaggatgaatcttcgatcgctttcttacgccttttccactttcacggcgcacaccttgtactcgggggccttcgacacgcggtcgagggcggcgatggtgagccagttgctgttgccgtcttggaaatggaacggcatccacgtatgtcccggcgacgtcttctcggacacatgcgcgacggactcgatggagccgcggcgcgacgagacgcgcacgatgtccccgtcggcgatgccgagagcctcggcatcgcacgtgttcagctcgatgaacgagcggttcgctatctcgttcacgccgtcggtgcgagcggtcatggcgcaggcgttgtactggtacaggatgcggcccgtcatcatgaccagcggatactccgcatcgggcagctcggcggacggctggtagtcgggtgtggagaacgcgcccagcccctgggcgaactcgcccatgtgcaggatgggcgtgccgggatgctcggcgcttgggcacggccactgcaagccgcggccggccgtctcgtcgccgtcgaggcgcgcatggctcatgccgccgtacgtgggcgtgaccgagacgatctcgtccatgacctcggccgcgctcagacgaggctgcgcatagcccatgcggttcatgacctcggtgaagatgtcggtgtcgagccacgcgcccacaggcccgtccacggccttgcgcacgcgctggacgcgccgctcggtgttcgtgaacgtgccctccttctcggcgtagctgcgcccgggcaggatgacgtcggcgtacttggccgtttcggtcatgaacaggtcgtccaccacgaagaactcgagcgcctcgagcgagcggatcacgtgatgcgtatcggggtcggtgcgcacgggatcctcgccgaacaggaacagccccttgatgccgccctcgatcatggccgggaagcactcggtggccttgatgccgcgcgcacgcggaagcgcggcgccccacgccttctcgaagcggcgcaccacctcgggatcagccaccttctggtagccgggcaggtcgtcgggaccggcgcccatgtcgcaggcgccctgcacgttgttctggccgcgcagcgggttcacgccgccgcccggcttgcccaggttgccggagatcatcgcgatgttcgacagcgccatgacgccgtcggttcccgtggagtgctccgtcacgccgaggcagtacatgatggccgccgcgtcggctgccgcgtacatcttcgccgcggccacgaggtcgcgacggtcgatgccgcagatgtcctccaccagctcgggcgtgtagtcgcgcaccgtcgcggccaatatctcgaagccctcggtgcgctcgcgcacgaagtcctcgtcgtacagctcgtgctgaatcaggtagttcacaatgccgttcgcgaacgcgacgttcgttcccggcctcagcttcaaatgaatgtcggcatgcgcggccagcccgatgtcgcgcgggtcgaccgcgatgagccggcagccgcgttcgaccgccgcgcggatctgcatgcctatgacggggtgggcctcctcggggttcgaccccacgagcatgatgacctccgccttgcgcgtgacgtcttcgatggagttcgtc

SEQ ID NO: 9683 - DNA, 283 bp, Unknown
  gut microbiota DNA sequence
aacgcccgcgacgcggaggccgcgcgcgggcatctgaacattataggctcgaactcgacgggggcaagggcgggccgacgttctccatagcgcgatatcggcctgcggcgcggcatcgacgcgctacttgacgccctggggaacgcgagcatcgtcggcattcgttcccgcgcctgcaacgtcaaggatctcgatggtcgtgggcttgaaatcggtgcccgatcccgtgccgcgcatgacgatgacgtcgtcggcggaaagggtgcggccctcgagttcggcg

SEQ ID NO: 9684 - DNA, 505 bp, Unknown
  gut microbiota DNA sequence
ggccacctgacgagcggcatcacccaggagctgatcgccatcgtcgtgctggcggccgtcgccgtggcctacctggtcatgctgcgcaagtccgacgacggcgcgagcgtgccgaagtggctggcgtggctgtcggtcgcgctgtcggtcgcgctggtggccgtgatggcgcactcgtacacgatggccgcgaggccggcgtgggatagcgtgctgtggatcctctacgtcctgggcaacgcctgcgtgctgggaccggcgacgttcgcgttcctcatggccgcagcgccgcccgcaggtcagcccgccgggcgcgcggccgacgccggggctcccgcaggcctcgctgccctcgtaggcgccgccgcgaacgccctggccgccctcgccttcgcgatcttcctccagctctccgccggctccttcgccgacgtcggctactacttcgacccgacgcatccgaccgaggccatggccgacgccgcggcgacggtcggcgcgcaag

SEQ ID NO: 9685 - DNA, 1081 bp, Unknown
  gut microbiota DNA sequence
atgccgctgggcggcacgtccgacgagaagcaggtgccgcactgggccggcaacctcatctggggcttcttggctttcgtgttcaagatctgcttccgctaccgggtcgaccaccgcgagagtttgcgcggtttcaaggacaagaccggggtggtggtcgtcggcaaccatacgtcgttcctcgacgtggcgtttatgtacctggccggacggccctcgcagtgggtgcgcttcctcgggcgcgagaacctgttcggcaacgcgcacggcctggtgggccaggtgctgtcgcgcgtgggcgcgtttcccatcaagcgcgacgcggccgaccgcaccgccatcaagcgcgccacgcgcatgctaaagagcaacgagatcgtgggcatcatgcccgagggaacccgtcgcggcaaaagcgatcgcacgcctgaactgcactcgggagccgcgttcatcgcgaagatggggcacgcgcccatccttcccatgaccgtgcgcaacgccgagcacgtgaagcacaagggcgagcgcttccgtttcccgaagatcaccatcgagtacggcgaccccgtcctcgtcgaggacttcgacttcctgccgaaggaagaccgcttggacggctgctcgtggtacgccatgcgcgagtgcttcgcgctgtcgctgaacgtgccgcgcgagcaggtggacatgccggcgctgttccccggcggcaaggacttcacggccgtgttcgccgagcaccccgtcccgcatcatacgacggccgaggtcgtcgccggcatcgaggccaaggcggctgcgaaggcggcgaaggcggcgaaggttcaggagatcgcatgagggtggtgaaggcccgctacgccggggcgtgctacggcgtgcagcgcgcgctcgacatggcagtcgaggccagcgccagcggcgagggcgcatccacgttgggcccgctcatccacaacccgcaggtggtggccgagctggcggcgcgcggcatccgcgcggtcgacggccccgagaacgtcgagcgcggctcggtgatcatccgcagtcacggcgtgacccccgcggtgcgccgcgcggt

SEQ ID NO: 9686 - DNA, 2315 bp, Unknown
  gut microbiota DNA sequence
gcgcgcgaagcggggggcgaggtgttcgtggtcgccgccccgggcgacctgtctgcgagcatcgaggcgccggtgggcatcgtcgtgcagacgacgcaaacccgcgaggcgctggacgcggtggtcgaggcgctcgccgcgcgcggcatccggcccgaggtgaagaacaccatctgcttcgctacgcgccagcgccaggaatcggccgcggcgctcgctgacgaggtggacgccatcgtggtcatcggcggccgcaactcgtcgaacaccacgcgcctggccgacatctgcgccgccgcgtgcccgcgcacccaccacgtggaggcgcccgaggagctggatccctcctggttcgtcggctgcgagagcgtcggcgtcaccgccggagcctccactcccgaagaccagatagccgccatcgtggagcgtctggaggcgctgtgagcgcggatgccggagcgcgtccgatgccgccggtgtacccgtcgggcgatatcgatcgcgaggcggcggccaggcagcgcggcggctgcggcgcgctgcgcgaggcgccgcgggctctcgtgatcgccgtcgcgcccgacagcccggccgacgatgcggggttcgagcctggatgctacgtgaccacggtggacggcaggcccgtgcgcgacctcatcgactggcgctggcttgcggccgacgacgtcatggagctgggctacgtcgatctcgacggcgacgagggcgtcgtggaactggagcgcgaggagggcgaggactggggcttcgagttcgaaggcgtcgtgttcgacggcgtgaggcaatgccgcaacgcctgcacgttctgcttcatgcgccagctgcccgacgatatgcgctcctcgctcaccttacgcgacgacgattttcgcctgagctttctcgcgggcaccttcgtcacgttcaccaacctgaagcccgaagacgaacggcgcatcgtcgagcagcgcatatcgcctctgcgcctgtcgctgcacgtggcggatccggaggtgcgccgacgcatgatcggcaagcacgcgcagcacggcatcgacgtgctggagcggctgctggaagcgggcatcgagttccacgcccagatcgtgctcgtgcccgaccagaacgacggcgccgtgctggaagacacgcttgcctgggcgtacgcgcgccccggcattctcgacgtgtgcatcgtgccgctgggattcacgaagcaccagagcgtcttcgaccgcagcttcaacgaccccgtgtcgtcgcgcgcggtgatggacctcgtcattgcgttccaacggcgcgctctggccgagcgcggcagcatgtgggccttcccggccgacgagttctaccataacgcctacggacccgagctgatgcggaacctgccgccgtcggagcactacggcgacttcggcatgttcgaggacggcgtgggcatcatccgctcgttcgttgacgactggaaaagggcagagcgcgcggggctcgtcgagcgttgcgccgcggctctgcgcgccgccgacgcgcgcgtccactacgtggccggctgcgcgacgcgccacttcctgggcccgctcatcgatgcgagcccgctcaaggggctgctgatcccgctgttcgtgaagaacgagttcttcggcggcaacgtggacgtgacgggacttctgtgcggctgcgacatggccgatgccgtgcgtgccgagcgcgagcgcggcttgcagctggcgctcatcccgcgcgtcgtgttcaacgacgacgcggtaacgctcgatgacatgagtttggaggatatggaaaagcgggcgggcgcgcgcatgtccgtggtatcctgtaacgcatcggattatctcctcgagatcatccacctggtcggacgaaccgatccgacctcctgaccgcaccaaccgaagcaatctgcgaggtagcaatatgcctttacccatcgtcgcggtggtcggacggccgaacgtcggcaagtccaccttcgtcaaccgcatagcccaggccgacgaggccatcgtccacgagatgcgcggcgtcacgcgcgaccgctcctatcatgaggccgactggaacggcgtcgatttcaagctcatcgataccggcggcatcgagatgggcgatgacgacgccttccaaggctccatacgcaatcaagcgctggccggcgcgaacgaggcggacgtcatcctgttcctcgtggacggcaagaccggggtcaacgccgacgacgaggccgttgcgcgcatcctgcgcaagacgtccaagcccgtgttcctcgtggtgaacaagctggacaccccgaaccg

SEQ ID NO: 9687 - DNA, 1121 bp, Unknown
  gut microbiota DNA sequence
aacgagctgaagaaggtggacctgcccgccgacgccgacgaggaagacggcatcaacgtggccatcatcggccgcccgaacgccggcaagtcgtcgctcacgaacaagctcaccgccaacgaccgctccatcgtctccgacgtggcgggcaccacgcgcgacgccatcgacacccatatcgtccacgacggccagcgctacaccatcgtggataccgcgggcctgcgccgcaagagccagatcgacgaggacgtggagtactacggcttcgtgcgcgccatgcgagccatcgaccgcgccaacgttgcgctgctggtcatagactccacgctgggcctcaccgatcaggatcaacgcgtcgccggtttcgcggccgagcgcggctgcgccatggtcatcgtgctgaacaaatgggatctcatcgaggggcctgaggcgaaggccgagatccgcgagcgcatcgccgaccgtctcacgttcgtaggctatgctccggtcatcgccatctcggcgctcacgggcaagaaggtcgatcgcatctgggacgccgtgaacgcggcctatgagaactacagtcagaccatccccacgaaccgcctgaacacgtggctcgcaggcatccgagagttcggccacacggtgagcaagggcaaggcggtgctgcgcatgaagtacgtcacgcagacggctacgtgtccgccgcaattcacgttcttcgcgaaccgccccgacctcgtggacgacaacttcgagcgctacctcgagaaccgcttgcgcgagaacttcgagctcgtgggtacgcccatcaggatcaagttcaagaagaaggattaggggtcatgggggatttgctggttgcggccggcctgttcgtcgccgcgtttctgttgggatccattcccttcgggctgatcatctcgaaggtgttctaccataccgacctgcgcgagcacggcagcggcaacatcggcaccaccaacgctatccgcacgatgggcaaggtgggcggctacgccgtgttcgtgctggacttcggcaagggcctgctgtcgggcgtattggcttgggcgttcagcatgcagttcctgccgggcggcggccttgagcccggcgcgctcgtc

SEQ ID NO: 9688 - DNA, 1773 bp, Unknown
  gut microbiota DNA sequence
taaggtgggcggctacgccgtgttcgtgctggacttcggcaagggcctgctatcgggcgtattggcttgggcgttcagcatgcagttcctgccgggcggcggccttgagcccggcgcgctcgtcacgtacgacaccatgctggccgtggcgttcctcggctgtgtgtggggccatatcttctgcccgtggcttggcttcaagggcggcaaggggatcgcggtggccgtgggctgcctgttcgtgacgttcggctggatcggcgcctgcctcgagctgctcatcttcatcgtgctcgtcgtggcgacgaagcgcgtgtccgtcggctccatcgcggcggctgcggcctgcccgttcttcgcgttatacttcttctggggcgattggctggcctggctgttctgcaccgttgccggcctgaccgtggtctgggcgcaccgcgagaacatcaagcgtctgcgagccggcaccgaaagcaggatcggcgacaagggcaagaagaaggaagcgtagggaactcacatgaagatcgcggttatcggggcggggtcgtgggggacggcactcgcgcagctgctggcatgcaacggcaacgaggtggggctgtgggcccgcaagcccgaggtggtggaggccgtcaacgcctcgcatgcgaacccgcgctacctgagcgaggtggagctttccccgcgcatcgtggccacgacctcctacgaggaggccttggcgggcgcgcaggccgccgtcatcgtgacgccgtcgagcgtcatgcgcgacgtggccggcgtgctggccgaggcggtggacgacgatttcccggtgatcatctgctcgaagggcgtcgaggagggaagcggcctgctgcccgtggaggtgttcgaggccgagatgggcaacgcgagccgcctggccgtgctgtcggggccgaatttcgccgcggaggttatccggggcatcccgtcgggcaccgtcatcgccagctccaacgaggagactgcggcgttcttccagcagctgttcgcgtccgagacgttccgcacctacgtcagcgacgacgtgtgcggcgtggagctgtgcgcggcgttcaagaacgtaatagccatcgccgtgggcgtgtcctacggcctggggtacggcgacaacacggctgccatgctcatgacgcgcggcttggccgagatgagccgcctcgtcgtgcgctgcggcgggcaggccatcacctgcatggggctggccggcacgggcgacctcgtggccacgtgcacctccgagcattcgcgcaaccgtcgtttcggcaagcttctggccgaaggcggcacgctcgaggagttcgccgcgcagacgcacatggtcgccgaaggggcgctcgcgtgcaagacgctcaagaccctggcggactgctacgacgtggagcttcccatcaccgacgtcgtgcgcagcatcgcctgggagggcgccgaccctcacgatgtggccaagaccctcaccagccgtccgctcaccaccgagttctacgggctctagcgcgtcaatccacaccgaggcaacaaggcgttgaccgggggttcaccgaacgcgcgagcgtattgtcgcacggccacagcgcgggtactctagtccttgccaaccgaaagggcggctttgacaatctatccgagtgcccgtcgtctcgtctctcgtgtgaaccccccccctctctctcactctctcaaaccttcgacgggccgtgagcatgcgcaccttcccccttctcctctgtgcgcactgcatagcct

SEQ ID NO: 9689 - DNA, 663 bp, Unknown
  gut microbiota DNA sequence
gcagcgcgggtactctagtccttgccaaccgaaagagcggctttgacaatctatccgagtgcccgtcgtctcgtctctcgtgtgaaccccccctctctcactctctctcaaaccttcgacgggccgtgagcatgcgcaccttcccccttctcctctgtgcgcactgcatagcctccctcgggtccccccaacccaagggaggcttttttacgcccgctcttcggcttccaagtacttcgacgcgtccacgccgagcttcgccagcttcacggcgccgacccatggggcgcccgcggaagcgacgaggcccggcttgtaggcgagcatcgtcacggtagcatcggcggcgaacgtcggccgcgccgcggctccggtttgcgccgagaggccgctggggacgtctgccgccacggcgaacggggcgtccttggccttcgcaggcagcgagcgccgcggccgttcgtgctcgcctcgctcgtgcgtgcgcttgcgatgccgcccgcggcccttgccgcgcttcccctcgaagcgccggcggttggcggcccgtatccagccggcgtacggctcgcgtacctcgccgccggagaaaccggtgcccagcagcgcgtccaccacggcctcggcttcgtcgacggcatcggccagcacgtcggcgtcggg

SEQ ID NO: 9690 - DNA, 513 bp, Unknown
  gut microbiota DNA sequence
agcacgcgggccgccacccacccgtcgccgccgttgttgcccgatcccgaaagcaccacgaccggcgccgggtcgggcacccaggcgcgcacctcgtcggctacggcccgccccgcccggtccatgagctcggcaaggggcgtgccgtcctcggccacggcacgctcgagcgcggccacctcgtcgacgtcgagcacgccgcggcgctcgcgcgccagctccacgccggcctccgtcatgacgcgcgttcccgacagcacgccgttcagcatgacgaacgaccgcttcctcgcgccggcttgcacggcgcgcacggccagcgacacggcccaggccgtcatgaaggccgtccacgctcctacgacggccgcccggtgttcggcggcgaacgccgcgagagcgttcatctcgccgacctgtgccgcgtcgaggtccagcacgccgaacagcagcgcgaacggcgcccagccgaacaacgccaacagcccgtaacgtgcgaggtactggtaccag

SEQ ID NO: 9691 - DNA, 750 bp, Unknown
  gut microbiota DNA sequence
gccgcccgacacctcggcgatgagcgcggcggccatgtcggcgttgagggccaccgggttgtcgtccaccccgcgctcgtagcgcatggacgactcgctgatcaggcccaggttgcggctcgtgcggctggtgtgcgcgcgatcgaacgcggcggcctccagcagcaccgtggtggtagcctcggtgacctcggtctcgaggccgcccatgacgccggccaacgccacggcgcgctcgggcgtggcgatgacggtcatgtcgggcacgagctggcggtcttcgccgtcgagcgtggtgaaccgctcgccctcggccgccgggcgcaccacgatgtgcgccttgccgtccgcgcctgccagcttgtcgaagtcgaacgcgtgcagcggctggcccagcaggaacaggatgtagttcgtcacgtccacgatgttgttgatggagcgggcgcccgcggcggccacgcgctcggccagccagtcggggctcgggcccacctgcacgtccttgatgacgcgcgccgtgtagcggcagcagcgggacgcgtcggcgatttccacgctcacctggtcggacgcaggggtcgcgtcggcatcctccacgaggtcgatctgcgggcgcttcacgtcggtgcggtacatcgcgcccacctcgcgcgccatgcccgccatgctgaggcagtcggggcggttcggcgtgacctcgaggtcgagcaccgtgtcggacagcttgaggtagtcggcgatgggcat

SEQ ID NO: 9692 - DNA, 4390 bp, Unknown
  gut microbiota DNA sequence
gatcccctgcgcgatgttcggcgcgccgcacacgatctgcaccggctcgcccgcgcccacgtccacggtgaccacgtgcatgtggtcgctgtcgggatgctgctcgcacgtctccacgtagcccacgaccacgccgtcgaacgcgtcgcccgtcttctcgaccgcctccacgcccgtgcccgtcaaatcaagccggtcgcagaacgccttcacgtccgaaggcacgtccacatactcagacaaccatttcaaagaaaccttcatcagctcttcctctttccaccaagcccccgtctgactgaataccgcaactcggatccgagctagccagcagacgcagcgcaacaacgtcaacagtgcgaagggacgcttggcgaggtccaccaagcgagtttcgcagcgcagcgaggactgtctgagcgactgggcctcgccaagcgtcccgccagaaaccctagaactgccgcaagaagcgcatgtcgccttcgaccagcatgcgcaggtcgggcacgttgtacttcaggcaggcgatgcgctccacccccatgccgaacgcgaagccggaatacttctccggatcgatgcccgacatggaaagcacgttcgggtccaccatgccgcagccgaggatctccagccagccggtgcccttgcagaagcggcagccctcgccgtggcagatgccgcagctcacgtccacctcggccgacggctccgtgaacgggaagtagtgggcgcggaaccgcgtcttgcgctcctcgccgaacatctgcttgcacaggtagtcgagcgtgcccttgaggtcgccgaacgtgatgccctcgtccaccacgaggccctcgatctgcgtgaactggggcaggtgggacgggtcggccacgtcgcggcggtacaccttgccgggcgcgatcacgtagatgggcagctcgttgtcctccatcgcgtgcacctgcacgccggaggtctgggtgcgcagcagtacgtcggactcgccgcgcacggccgcctgcgcgccggaaaggtcgcgcacatagaacgtgtcggccaggctgcggctggggtggtcggccggggcgttcaacgcctcgaagttgtagtagtcggtctccacctcggggcccgtggccaccgtgtagcccaggccgaggaagatctcggaaatctcgtcggtgatgcggttgatgaggtggcgcgtgcccacctgctgcgagcgacccggcagcgtcacgtccacggcggccgcgtcgatggcggcggccagctcggatgcggccagctcctccttgcgcgcggccagcgcgccttcgacggcggcgcgcacctcgttcgccgtcttgcccacggcggcgcgctcctccttcgcgatctgccccatctggcgcaggtacccggtcagcgtgcccgccttgcccagcacgccgatgcgcacctgctcgagcgccgcggtgtcggccgcctgcgcgatctgcgcgatggtctgctcgcgcagcgcctccagttcctccacgattgccattctgccgtccctttccgtctctcgccccgcgccgcccgcccggcggcgcatatgaaaaagagccttctctcgtccttgctcctgagggcatgcgcccaaagtccaaggacgagagaaggctctcgcggtaccacctcggttgacggccgcgcctgcgcgcgccgcccgctcgttcgctctgtgacgggagctcccggcgcatcctacttagcgtctcgcggggcggcgaccagggtcgcgcctctgcgtccgcgttcaaacgcgctgctcggaagggaatcgtcgcgcttgctgcccgggagctttcagccggtggcacccgtctctgccggcagccgcgttgcgcggcgctgtcttcgtcatcgcatgtaacgatgcagtttagcacatgagcgcacgccgtgcgggaaatttcacaaggacgcgtcgcggcgttctacaggaagcggtagttgaccgtgcgcagaccccagtcgaggcacgacgagaagccgaaggccttccatacgccgggctgcaggtcgagagatcggctgcccccgcccatgccaccgcaatcgtttacggtggccagcacggtttgcccgttgtaggagatctcgacggtgcggccgaaatacgagcggaagttcggccatgacatcgggatggccacgcccatggagttgtcgtcgcacaccgacccgttcgccgtggtgccggggttcggcgtgtacggatcggtggaaccgccgtacgcggacgcgatgccggtcgaccagctgatgccgggatcaggagcgggacttggcgccggatcgggatcgggcgagggctcgggagccggcgccggagggttcggatcggggttcggctggaccggggtgttggaatcgaccgcgtcctcgcggccgatggtatccgcattctcgtcgatgaccggcccggtggcgccatcggcagccgccagctcctcggccttctgcctgagcgcttccaaacgcgcggcctggtcgctttgggcgttcgacagcttggagctcgcctgggacagcacggtttcggcttccgcgcgcttcgcttccagctcttcgagcttcttctcctgctcgtctttctggaagttcaggtcgtcgatgagcttctcgtacttcgccgagcgctctttttgtgcctccacctcgtcggcgtggaactgcatgatcgaatcgagataggtgagattgcgtataaggtcgctgaagcttcgcgcctccagcaccatggtcacgagcgactgcgacgctcccccgttgaggtactcgtgcaccgccgtcttgccgagagccgcgcggccttcgatgaccgcctgctgggcatccatggcctgggccgatatctcgtcgacgcgcgcttgcagctcctcgacgtcctgcttgagggcgtcgtagtcgcccgcgatgctttccatatgcgcctcggcgtcgtcgagcgtggcctgcgcatcgtcgacggccctctgcgcctcttccgcttcgtctgcccaggcgcgcgagaagaccccgccgccgaaaacggttccgcccgaacacagagcaagcgccagaactcccgcgagcatcgcgttcggtacgctccagcgtgcggatctcatgctacgcctccttcgaacagcaggcgatcgtgcgccgcccccaacgcggacgcaagatcgacgatcaggtgctcgttgtcggtgaagtattcgtcatcgtaatcagcatcggacatgatggcgattacgtaaacatcagtatcggtgaccacgaggccagcatcgttgagcgcgcccatgtcgtaccagggcgtatcgatctcgtagccgggcttcgacaaaacacgacggccctcgcccagtgccgtgcgcagaaacgacagttcagtctgctgcagcacgtcggcgagccacggcgcgttgccctggccctcggccacgtatgcgccgacgttcagccacatcttcgccaagtcgcgcggcgtgtaatagggataccattcgccctgccaagcggcggcgtccacgtcggccgcagcgcaccaagcctggaaatcgttctgatcgaagcgttcgcgcaacagcccgtaaccggtgttgtcggaatgcacgatggtgttggccatgacggtttgcaggtcgtagcgatctatgtcgtccgacgacatgattccggtaccgtcgaggatgacgtcttcgaccacctcttcatcaagagaggctcggccgccgtccaccatatcctgcgacgcgaaagccacgaacggtgccttgaccgtgctggcagagaagaaccattgatcggcgttgtaccccacaccctcgtgcgtggtcaggtcgtacatgacaaagcccacctcgtaacccgcatcgtggtatgccgcgatggcgccttccacatcggagatctcgtcggaggacagggtgcgcgcgatgccggtcaccgaattgaacaggttcacgtcttcggtgcccgatgcggcgtcgagcgctgtgcgcgcatcttcggcgacggcgcgcgggtcgacgacatccccggattgcgcttgcgaggccgcagcctgtcccgtctgcgcagtcgcttcggggagcgcggcaaccacctcgtcggccacggcgacgggatcctcgggtcgcacggcgctcgcagccatcgcgcacgcgccgatggccaacaccgccacggcacccacgatcacgcccgccacgagggccggccgatgcttcaaccgatgcttgatcgttttgagaatccttgccacaacagcctttccgacgatttcgcctcgccgcttcgcgcttccgggtcgttccgtctgtgcagtattccctaacgaacaggagtatacaagtacgcaacggccaaacaacataggagcgcc

SEQ ID NO: 9693 - DNA, 1272 bp, Unknown
  gut microbiota DNA sequence
gacgagggccggtcgatgcttcaaccgatgtttgatcgttttgagaatccttgccacaacagcctttccggcgatttcgcctcgccgcttcgcgcttccgggtctttccgtctgtgcagtattccctaacgaacaggagtatacaagtacgcaacggccaaacaacataggagcgccacggggtcgtgctagtcggaagaggcgcacgaaagagctattcgcccaagcgcatgtcaagctgcctgcggcggctttgcgcggatttgaaagcaacccaaaacccgagcaggaaaagcggtatccccgccacgagcgcgaacacgctgccgaacgccactgctggccacatgatctcccccgcgcccagcacttgaaattccgccaacacgcgcagacccgtcgtcaacacgtccacggcgacggcgaaggcgatcgaagcgatcgcatagtagccgatggggaactgctcggcttcggcgaaccggttgtcgtccccgaaccccttgcgaacgagaagcaccatgccgacgatcatcgtcagcgcgaaccatccgtacaggaacaagtccgccgacgtgaattccatacgccccgcgccgttcgccagcacgtcgcgcatgcacatcgcctgtttgagcgaccaatcgtagtacaaatacacgagcacgccgaacgagagcatgacgaagccgagcttgtacacgcggttgctttccgcctctacgcgctcgtcgaccgacccgcggtgctccctccatcgctcaatgatcttcatgtcgcactcccttcttcccaaaaaaggtcgtcgagggtgcatcccagcgttttacagatggcgatgcacagtttgagcgtgggattgtagccgccggcttcgatgaggccgatggtctggcgggtggcaccaaccgccgcggccaggtcggcctgagacagatcggcggccacgcgggcggccttcatgcgcaggttcttccccgtttcggcgggggcggtcgacgacgcgcccgcgaccggcgcaacgccggccctacgtccgatgccgccggaagccgcccacgatacagcgctcatcctgatcgtttccctttcgcgaatccactcgttcttttccataactatacgatctatctaacataatgtcaaatatatattgcatttcgcgaaagaggggtagcaaggagatccaccgggaacccaatcatggccgttcgacagcacggatgaaacctctatgctgcaaaatcgagtttttggcagtcgacccccccc

SEQ ID NO: 9694 - DNA, 416 bp, Unknown
  gut microbiota DNA sequence
gcgaaagggctattcgcccaaacgcatgtcaagctgcttgcgtagtacataagtacatatacagcacaagcccgatcgaaagcatgatgaacccgaccttgtagatgcgattcgtttcggcctcgacgcgctcgtccttcgggccgcggtacgcctcccaatgttgaaatatgctgcaaaatcgagtttttggcagttgaccccccttgcaacgatggtttcgtcaccgcgagaaaaacgtgatctggggttttgtccgaacctttttcgatggagagcgcccagcgtgccaaaacctcgattctgcagcatatagatgacccaaatcgtgccagcggggccagcaggcgaacagggcgcagccatccttctccgaagcacgctcgacgcaggttcgatcggaagcctcgaacgcg

SEQ ID NO: 9695 - DNA, 233 bp, Unknown
  gut microbiota DNA sequence
ttgcagcatatagatgagcgaaatcgtgccagcggggccaacaggcgaacagggcgcagccatccttctccgaagcacgctcgacgcaggttcgatcggaagcctcgaacgcgccaaacgtgggcgcggacgccggctgcatgctcgtggtagtatgggggcgcggttctgcccagaccgtgcgcaccgccttcccttccggcacgaaaggatcgaaccgatggacttctccc

SEQ ID NO: 9696 - DNA, 1572 bp, Unknown
  gut microbiota DNA sequence
agggcgcggacgccggttgcatgctcgtggtagtatggggacgcggttctgcccagaccgtgcgcaccgccttcccttccggcacgaaaggatcgaaccgatggacttctccccttgtgcgaccagcgcgaacgtacggatcgcggcgcgcggcgacgcggaagccatgcgcgcggtgtacgcgccgtacgtcgagacgcctgtcaccttcgacaccgtcgcgccctcgcgcgccgaattcgccgcgcgcatggccgacgcgatggccgcctatccgtgcctcgtcctcgagcaggacgggcgcgtcgtcgggttcgcgtacgcacacgcccaagccagccgggcggcctatcggtggaatgcggagctctcggtgtacctcgaacaaggcgcgaccgggggcggccgggggcgcacgctgtacgacgcgctgctgaaactgctgcgcgcgcagggtgtgaaaagcgcatacggcctggtaaccgtgccgaacgaggcaagcgagcgtctgcacgccggctgcgggttccagcgttgctgggtgcaatcgcacgccggctggaaggcgggttcgtggcacgacgtgacctggtacgtgaaagagctcgcccccttcgacgacgacccggcggatcccgttcctttcagcgaactggctcgcacgcgccccgacttcgtgcagcaggtgcttgacgaagcgaacgccgcgctggaagccaacgtcccgaccgactgcgcataaggacgaagccatgcagcctcaacgtctgttcgaaatcgtctacctgctgatggatcgcggcaccgccaccacgggcgagctggcgcgcaagctggaggtgtccgagcgcaccgtgcgccgcgacatcgacgcgctgtcggccgcgggcgtgccggtgtacatgacgcgcggcaaaggcggcggcgtgcacctcatggacggctacgtgctggaccgctcggtgctgagcgagcgagagcaggacgacatcatggccgcgctctccgcgctcaaccgcaccagggccagcgacgatgcgagcgacgagacggccgtgcgcctcggccgcctattccagcgcgagaacgtgaactggctggacatggatttctcgttctggggcgcgccgccgaactaccgcgccgcgttcgacaccatccgcgacgccgccatcgggcggcacccgctgtcgttcgcctacttcgacgccgagggcaaccgcaccgagcgcaccgtggaacccgcccagcttatgttcaaggaatcgtcgtggtacctgcgcgcatggtgccgcgagcgggatgcatggcgcatgttcaagctgttccgcatcgactgggaaacgctggatgtgctgccggaaacgttcgaagcgcgcgagctgcctgcacttgatgaaggcaggcacatgaaaggcgacaatgtgctggtgatgcgcttcgccgcgcaggccgagtcgcgcgtccgcgaggagttcgcgcccgagacgatagcgcgcaaggccgacggcagctggctcgtgacccttacctgcgacatcaccgaacgcacgcgctactatctgctgtcgt

SEQ ID NO: 9697 - DNA, 226 bp, Unknown
  gut microbiota DNA sequence
ttggatgtgctgccggaaacgttcgaagcgcgcgagctgcctgcacttgatgaaggcgggcacatgaaaggcgacgacgtgctggtgatgcgcttcgccgcgcaggccgagtcgcgcgtccgcgaggagttcgcgcccgagacgatcgtgcgcgaggccgacggcagctggctcgtgacccttacctgcgacatcaccgaacgcacgcgctactatctgctgtcgt

SEQ ID NO: 9698 - DNA, 177 bp, Unknown
  gut microbiota DNA sequence
gatgctcgcgggagttctggcgcttgctctgtgttcgggcggaaccgttttcggcggcggggtcttctcgcgtgcctgggcagacgaagcggaagaggcgcaaaaggccgtcgacgatgcgcaggccacgctcgacgacgccgaggcgcatatggaaagcatcgcgggcgactacga

SEQ ID NO: 9699 - DNA, 198 bp, Unknown
  gut microbiota DNA sequence
cgtcgtggtgcccggccgcctggtgaacatcgtcgcgaagtagaggacgggcggcgcgcctgcgggtgcgcgggttgtgacataggaatgcgagggcggctcgggtattcgggccgccctcgctgtattcggaacgcgggctggctgattttggcacaaattcacgggtaggggaatgataggggccgaatcggccag

SEQ ID NO: 9700 - DNA, 176 bp, Unknown
  gut microbiota DNA sequence
tcggccgattcgcgagcgagatagtccatgagggactcctttcttgagaaggcggcagcacgtacgaatgttgcacgtgaaacattcgtcggcggctgcgcgccggaagtcggttgcgttaggaaaggtcgccgacggtgggggcgggagcgggctccgcgggcgccggggcgatt

SEQ ID NO: 9701 - DNA, 412 bp, Unknown
  gut microbiota DNA sequence
gggcgtgttcgagtggtgcaccgaagaggagtaccgcacgtactacggctataaggcggttgacgaggccaccggcaaagccaagggcttcgggacgccttccaagaagtgcgaggtgtactgcgagtccaataccatcctgggccgcacgggcttcccctggtcgcagtgcttcgaggagaagaacctggtgctggagccggcgtcgaaggactacgagccgctgtgctactacaaggagccggccgaaagcccgctcacggacaccgagtacccgctggtgctgaccgagggccgtctgcccatgtaccaccacggcacgctacgcaacatcccgtatctgcgcgagatctaccccgtgcccgagatgtggatccatcccgacgacgcggcgacctacggcgtggaggac

SEQ ID NO: 9702 - DNA, 238 bp, Unknown
  gut microbiota DNA sequence
ttcggagttctccggggtcttggacgagcagtcggccagcttgcccggcagcgcgaacgagtccagcacgcccttgcggcgcgtcatctcgcgcgccttgcgggcggcttcgcgagccttgagcgcctgggtggccttgccgatgatgcgcttggccggggtcggattctcctcgaggtactcggccaggccctgggtcacggcgttctgcaccagcggacggatctcggtgttgccc

SEQ ID NO: 9703 - DNA, 202 bp, Unknown
  gut microbiota DNA sequence
tagcctccctcgggtccccccaacccaagggaggcttttttacgcccgctcttcggcttccaagtacttcgatgcgtccacgccgagcttcgccagcttcacggcgccgacccatggggcgcccgcggaggcgacgaggcccggcttgtaggcgagcatcgtcacggtagcatcggcggcgaacgtcggccgcgccgcggct

SEQ ID NO: 9704 - DNA, 604 bp, Unknown
  gut microbiota DNA sequence
gggcgtgaacagcctgctctgcgagcgcagcctgggcaacccccgcccgaagccctcccagatggcggtcgggatcaagcaggtgttcgagctgccggcctcccagatcgaggaccgcttcctcgtgcccgagggcgagggcgcggcgatgctgttcgtcggcgactgcacgcacggcaacgtcggcggaggcttcctgtacacgaacagggactccatctcgctcggcctcgtggcaaccgtctccacggccatggacgcctcgaacccctacccggtgtaccagatgctcgaggatttcaagaaccacccggccgtggcgcccgtcatccgcggcgcgaagctcgtcgagcactccggccacatggtgcccgagggcggctacggcatggtcccgaagtacgtgttcgacggctgcctggtggccggcgagtcggcgggcctgtgcatgaacatgggctaccaggtgcgaggcatggacttcgccgtggcctccggccagatggcgggccaggcggccgtgcgcgcgctcgacgcgggcgacacgtcggcagcgggcctgtcctcctacaaggaggcgatggagggctccttcgtcatccag

SEQ ID NO: 9705 - DNA, 460 bp, Unknown
  gut microbiota DNA sequence
tgtcgacgttccccgacatgtacgcctccgtcatgggctcctccatgatgcgcatcgcccaggagaagggcatcctcgagttcaaggcgcacgatctgcgcgactggacccacgaccgccaccgcaccaccgacgacgacccgtacgggggcggcgacggcctggtgatgaagtgcgagcccatcttcgaggcctacgacgacatcgcgggcgcgggcccgcgcccgaccaccgtgttcctgtcgccgtgcggcgagccgttcacggacgccgtggcgtgcgagctgtcgcgcgaggagcgcctgctgttcgtgtgcggccactacgaaggcatcgacgagcgcgcctacgcgctggccgaccgtgtgatctcgttgggcgactacgttctgaccagcggggagctggcctccatggtggtcatcgacgccgccgtgcgcaagctgcccggcgtgctggg

SEQ ID NO: 9706 - DNA, 460 bp, Unknown; identical to SEQ ID NO: 9705
  gut microbiota DNA sequence

SEQ ID NO: 9707 - DNA, 1035 bp, Unknown
  gut microbiota DNA sequence
gcagcccctcccccgatcacgtgcgcaaccgcggagtgcccgctctccagcgcctcgatgcgctcggcaagagcctccagcgtcaagtcggaatcgggccgcaccatgcgcgtgagcgcgatctcgaacgacagacgcgggttcgtcgacgtcttcaactcggccgacaggtcgcccagcacgcccagcaggcgcgccaggcggtcagggccgaacagcggcagctcgctcgcaagctcgcgccgcacggtttcgctcacctcaagcgccacgtcggcgcccgccagcgacagcacgtacatgttgcgcatatgctcggccaaatcgcgcacgaactgcgccagatccgcacccgtttccacgtactccgccgtccagcggaagcacgaggccacgtcgcgcgtaccgattgcgcgcacgatctcggccaggtcgttcgtgtcgatggagcccaatagcctctcggccacctccatcgtcaccttgccctcgccgaacgcgatcagctgctcgagcgacgtcagcgcgttgcgcatgccgccttcggcgcgatgggcgatcagatcgagcgcctcgccctcgaactccacgtcctcggacacgcaaatggcacccaggcgcgacacgatggactcggccgagatgcggcggaagtcgaaccgctggcaacgcgaatggatggtctcgggcaccttctgcggatcggtggtggccaggatgaacaccacgtggctcggcggctcctcgagcgtcttcaacagcgcgttgaacgccgccgtcgacagcatgtgaacctcgtcgatgatatagatcttatagcgcccgcgcgtaggagcgaactggacgcgaccgatgatctcctcgcgcacgttctccacgcccgtacgcgacgcggcgtccagctcgtagacgtccggatgttcgccgttcgcaatcatcacgcagtcatcgcacgtgccgtcaggctcgggggtagggccgcattcgcacagcaaggctttcgccagcagacgagccgtggtggtcttgccggtg

SEQ ID NO: 9708 - DNA, 7259 bp, Unknown
  gut microbiota DNA sequence
ctcgccgttcgcaatcatcacgcagtcatcgcacgtgccgtcgggctcgggggtagggccgcattcgcacagcaaggctttcgccagcagacgagccgtggtggtcttgccggtgccgcgcggacccgtgaacaggtaggcgtggctcaccttgtcctgttcgatcgcgtttttgatcgtgcgctctatatgctcctgaccgacaacgtcttcgaagatctgcggccggtatttacggtaaagtgcctctgccatcgcgtacgccctcttccctgctactccgtttcggactccgccttcgcatgagcgccgtgcggcatctcctgaaccgccttcgcgacaggggccgcatgcttgccggagagcccttcttcgactgccgcatgagcgccgcgcagctcgagctcctcgaccaattcggcatcgatctcggcttgggcctgcgtgcgtccgtcagccgtcttcttcttgcgcgagctcatagcggccttgacggcgccgatgatagccggagccaccgacacggcgacaatgcccagcacgatgacctcgaagtgatcctgcacgagcggaataccgccgaagaagtatcccaccaaaacgaacaggctgacccaggctatgccgccgatgcagttgaacagcgtgaacttgccgaaattcatatggccggtacccgcaatgaacggggcgaacgtgcggaagaacggcatgaagcgcgtgatgacgatggtgagcccgccgtatttggcaaagaaatggtcgagcttgctcatgcgttcaggcgtgagcgctttcactttgccggaatcgatgatgcgcgcgccgaagaaccgcgcgatccagtaattcgacgtgttgcccaagatagcggcaacgtagaacacgatgagcgtagcccagacgttcaaccctccaccgtcggcagagaacacgcccgccgcgaacaacagcgaatcgcccggcaaaaacgggaagaacacaagacccgtctccacgaacacgatgagaaacagcggcgagtacacccacagcggccccagcgcgatgatccagcccgcgatagccccccgcggatccgagagcaggttgacgaagaaattgatgatgtccatgtcgtcctcgcggtcgcagcccgatacaaaaaagtatctcgaataggcaggggcgctcgccagcggtcccttatggctgcttcctcccggacctgaccaggttcggaacatggcgccgccccggcccattcgagatactcaaaacaacaaccgctccagtataaaggaagcgcaaaatccggtcgaaccccaaccctctgaagcaaccaaaagcacacagtctcgaccatcgcgttcgccgtcgagaccgcaggaatcctttgccttgcggcgccgcgccatcgcaagccgtcgtctttccagcaaagttgatcgaacccgatcctctgcagaacacccagatagatccattcgtttccaacttggcgatcgcccttcttcatttcgttaccggaatctacgtaagatgattattcggcatacgtggaacaatcaatgcataagaggaggaagcgatgaaggcaaccgatcagatcaagcacgcggccttcgagaagacgctcgattatctcttggaagaccccgagcgcaacgccaccaagatcatggatatgctggacaaggtagcacctgccgacttgttccccagtcagaggaccgccttccgcaacgctatcgaccagcagagcaattggtaccagctcatcacgcgcttgctcgagctgaatcccgtgatgcgcaacgacttcatcaagacgttcctcgttgacggcaacctcatggcatggccaaagcaggagaccatgcgcgagaagcaccgctgcaacgtgccctgggccatcctcatggatcctacgagcgcctgcaacttgcactgcaccggttgttgggccgccgagtacggtcaccaggaaaacctctcctacgacgaactggactccattatccgccaaggcaccgagctcggcacctacgtgtacatctacaccggcggcgagccgctcgtgcgcaagcgggatctcatcgcgctctgcgaagcgcattccgactgctcgttcctctcgttcaccaacgcgacgctcatagacgaagagttttgccaagatttgctgcgcgtgaagaacttcatccccgccatcagcgtggaaggcttcgaggaagcaaccgatggacgccgcggcgagggcacgtaccaaaaggtcgtccgggcaatgcgcctgctcaaacagcacgggctccccttcggcgtctcgtgctgctacacgtcagccaacgccgattccatcgcctccgaggagttcttcgactggatgatcggccagggcgtcctattcgcctggatattcacctacatgcccgtaggcgtggacgcgcccgtcgaactcatggtgcaagccgaccagcgcgaacgcctctaccgcttcgtccgcgagatgcgcagcaagaaaccgctgttcaccctcgacttccaaaacgatggcgagttcgtgggcggatgcatcgccggcggacgacgctatctgcatatcaacgccgccggcgacgtggagccgtgcgtgttcgcgcactacgccaacgcgaacatacgcgagacgacgttgctcgatgccctgaaatctccgatcttcatgcagtactacgagcggcagccgttcaacgacaacttgctgcgtccctgccccatcttggagaaccgggacgtgctggcggacatggtggaaaccgccggcgcccactccaccgacctgcaggcgaaggaaagcgcgcgcgacctgtgcgccaagtgcacgcgttccatcgaggaatgggaacctgtggccgagcgcatctggaccgaccccgccgatccgctgttcgataaacgtcacgatcccggccaaggcatggccgaaaccgataagaacaagttcgatcgcctgaaccggcagcgcaagcctttggaagacaaggcccagaccggcgaaccagcggcgtagtccggcgcagacgacaacgcattcggatagaacaggggcccgttgagatcaacgggcccctcgatgcgttctttcgctcgcttccctacagcgtgcgcagattgacttccttgagctggcggcccgtcacggcgctcggggcgccggtcatcggatcgctcgcggagctcgtcttcgggaaggcgatgacgtcgcggatggacgccttgccgcccagcagcatgaccagacggtcgaggcccagcgcgatgccgccatgcggcggggcgcccagctcaagcgcgtggatgaggtggccgaacttctcctcgatctcctcgtccgtcaagccgcacgtgcgcagcacggcgcgctgctcgtcggcgttgtggatacggatggtgccgccgcccacctcgaagccgtccatgaccaggtcgtagctgtagctgccgcatgccagcgggtcgctctcgatcttgtccacgtcctcgtccagcacgtgggtgaacggatgatgctcggcggcgtacttcttctcgtcctcgtcgtacttgaacatggggaagttcaccacccacagcagctgatggccctcgcgcggcacgttcagcgcatcggccatgtgcaggcgcagagcgctcagcacggcgctcgccacctcgtaggtgtcggcggcgaacagcagaaggtcgcccggctccacgtccatggcctccttcagcgcggcgaactcctcgtcgctgaagaacttgatgatggggctcttctccttgccgtcggtcgtgaacgcgatccaggccatgcccttcgcgccgttctcggctgcgatgtcggccagcttctccacgtcgccgcggctccagtcgcccgcgcccttcgcgttgatggccttcaccacgccgccggactgcgccacgctcgagaacaccttgaagcccgtgttcttcacgatgtcggtgatgtccaccagctccatgccgaagcgcgtgtcggggcggtcgttgccgaagcggtccatggactcgcggtattgcatgcgctgaagcgggaaggcgtgctccacgcccacggccgccaacgtctcggccatgacgtcctccatgaggttcatcacgtcctcgccctgcacgaagcccatctcgatgtccacctgcgtgaactcgggctgacggtcggcgcgcaggtcctcgtcgcggaagcagcgggcgatctggtaatagcgctcgatgccgcccaccatcagcatctgcttgaactgctgggggctctgaggcagcgcgtagaaacggcccgggttcgggcggctcggcacgatgtagtcgcgtgcgccctcgggcgtggagttcgccaggatgggcgtctccacctccaggaagccgcgctcgttcagcgcgccgcgcatggcctgggccaccttgtggcgcaagtgcagggcctgatacatctcgggacggcggatgtccaggtagcgccacttcatgcgcgtggtctcgtccgtctcgatgccgtcctcgatggagaacggcggcgtcacgctcgtgttcaggacctcgacggacttcgccagcacttcgatctcgcccgtggccatgttggggttcacggcctccgccccgcgctcgcgcacggtgccggcgatcttcagcacgtactcgcggcccaggtgctcggccttcgcgaagtcgtcggcgctcacgcagtcgggatcgacgaccacctgcgtgtagcccgcgcggtcgcgcaggtcgacgaagatgagcccgccgtggtcgcggttgtgccacgcccagccgcacagcacgacctcgcggccgacgtcgcctttgcgcagctcgccgcacgtggcggtgtgcatgcagtattcgttcatgaagtccgtcataacgttggttccttgctcctcagcactgctatctgcattcgccgcccctccgtgacgcggcaaacgttactcaaacttagccattgtacagtatcgaaggcgcgcgggtcgaaacaggtatccggtttcatgcaaaatgcgcgcgaacgacccgctagaagttcgtatcggtcagcacacagtccaccccgttgtccaagcacagctgctgcagcttgcgatccagcgtgaacaacgtggccgcattgcgccgcgcgagcacgaagtacagcatgtcgtaaacgggatggcgcaagcgcatcgcttctttcgtggcctcgcagcactgggttttatcaagatcacagaactcgtctacgagagcgatcgctttctcgatgttggcgcataccgttttctcatcaagaagacccgctttatggtatttccaaaaagcattcgacacctcaatgagaaagagctgagagctgattacctcttctccttcaagcatcaattgcctcagagctcgaccggcttcggtctcccttaccatgtcaaccgccgcagaacaatcaaggactatcatgcttcgaccgccttctgcttctcggcagcaatcatcgcgtcgataatcgcatcccgctcctcgcgaccctggcgtatgagttccaccgtgtccggaaaatcatccggaacgtcaaatttcggcagcttgtcgatctccgcgaacagctccttgcgcttctcgatgcgcacggctcgcttcgcctcggtgtcgaagtcgaagtaacgcgggcgccgctccaggcggtgcaggtcatgcccgtcccaataatgctgcgcgtcggcggcctccagcatctgctccaccgccacgatggtctgctgcgcgatgctgcgatgctggctggccgcatacgccttcaactgctcgtacaaatcgtcgggaaaatctcgcacctgcaacgccggcatgagggctcctttcatgaaactgcgatatgcatgtagtatacatgaccgagcactcaaacgccaccggcgccccacgcgacaccgattaatgccgtaaataggggcagccgccttttaagacgtttgcctatcccgcccctcgcgaacacgccgcccgccccggcggcgcgggcgcgcctcatatcaatcccgacccgaacagcacgaggtcgagcagctcctgcttcgagtggatgttcagcttctcgtacacgtgcttgatatgggtgcgcgtcgtgttgtgcgagatcgtcaactcctcggcgatgtacttcgcgctgcgccccatggcgatgagcccgagtatctcggcctcccgcggcgtcaagccgttctccagcgcgagcttgcggcagtacgccagcatctcggacggcatcgcctcgtcttccgtctccgcctcggcgcgcgcccgcggctcctcggcccgcctctcctcctcgcgcggctgcttcctcttcggcaccccgcgcagcagctgccttcccacgctgaagaagtacagcgccgtcagcgccccggccaccgcaagcgcgcacgatgagaagctcagcgtggacacgcgcgcgatcagctggccgatgcacatggcctcgaacatcagccccacggccaacccgcggatggcgtacaccgaatcgcggatgtcgtaagcgaagatggcgatgagcagcacccacacgttgctctcccacagcgcgtccggcgcgttcgacgggatggccgccccgcccatcaccagcccgatggagaacaggggcagatagcacacgcaaaacgaaagcaccgcggtgccgcgcggcgacagcgcgccccgttgctgcgagaaccggctcatcagccagcagcagaacgccatgaggatgaccgccagcacctcgaacagcaccatgtagttaagccccgacgacaacacgtcgttctcgcgccccgccaagtacacggtcacgctgcagccgatggcgaacgccgctgcaaccgccaccagcacttgcagcgcctgcgtcccctcgcccagcgcgggcgcatcgccctcgtcggcgggcttggcggcgcggatgatgcacgcgatggtcaccagcggcagcgcgagcaggaacccctgcgcgatcgtgtccgagaacgagctgacgcagcggaacagaaaatagcacacgacggccaccacgagcgccggatcgaggtagaacgaggcgctctcgggccgcgaagcgtggatggtcgacgtccagatgacgatgatccacccgcaggcaagccccagcaaggcgcccgacacgtagaacagccccacgtccaccaccggcagcatcgacacgagcgcgagcgtggctcccaacgccgccgtcacgctgaccgccggtatcc

SEQ ID NO: 9709 - DNA, 755 bp, Unknown
  gut microbiota DNA sequence
cgcaagccccagcaaggcgcccgacgcatagaacagccccacgcccaccaccggcagcatcgacacgagcgcgagcgtggctcccaacgccgccgtcacgctgaccgccggtatccccaaagccgattccgcgaaccggcgcgcccgcagcagcggcctcgacagcagatgcgccgcgatgaccgatgcgatgaccacgaggaagaacacggacagctccgtcgacgtgcgatcaaccccgatcgagtacatcgcccggatgaccatatgcgacgtgaagaagtacagcaccccgattcctgcgtccagcaccgtcgggcggacgaacagcgtggagcctccttcggtatcggccctccccttttccatgattccccttccatggacgcgatgccatggtgccagtataaatgacagcgccgccaaggaataacgcatttcgagtgagatgcgcgcccgcatgccttcgaacccgccaatgccacgttttgagtgacgcgcgccggcccgatcgggcatacgctacatcccgtcgagcgtcgcgcaagacgaagcgaaagacgtcgccgcagcgctcggcaggggatcatccgaacgaaggagggaacatgggaacagcaaggtcgatggatcgtcgcagcttcctgaagggcgccacggtggccggagccgccgcggccgcagcgggcacgctcggcttggccggatgcgcgccgcaggataaggaaaccgtcgccgccgcatcgggcgacctc

SEQ ID NO: 9710 - DNA, 1846 bp, Unknown
  gut microbiota DNA sequence
gtgcgacgtgaagaagtacagcaccccgattcctgcgtccagcaccgtcgggcggacgaacagcgcggagcctccttcggtatcggctctccccttttccatgactccccttccatggacgcgatgccatggtgccagtataaatgacggcgccgccaaggaataacgcatttcgagtgagatgcgcgccgcttgccttcgaagccgccaatgccacgttttgagtgacgcgcgccggcccgattgatcatacgctacatcccgtcgagcgtcgcgcaagacaaagcaaaagacatcgccgcagcgctcggcaggggatcatccgaacaaaggagggaacatgggaacagcaaggtcgatggatcgtcgcagcttcctgaagggcgccacagtggccggagccgccgcggccgcggcgggcacgctcggcttggccggatgcgcgccgcaggataaggaaaccgtcgccgccgcatcgggcgacctcgtgctcgacgccgagaaattcacgaacgcgaagtggaacttcgagattccgcccgagcccgtggacgagagcaagatcggaaacaccgtggaatgcgagatcctcgtcatcggcgccggcgtgggcggcctcgtcaccgccacgtccgccgtcgaggaaggcgccgacgtcgtggtaatcgcctcgagcgacggccccgtgtcgcgcggcggctccaacgcggcgttcaacacgcgcctcacccacgagctgggcctcgacttcacccgcgaggagatcgaacccatcttccaggagatcttcgcgtcgaacagcttccgcctcgaccaggagaagtggtggctcgtctacaacgagtccggcaaagccatgaactggctcatggacaagatggagccctacggcatctccgccgtcatcgagaacaaccagcgcgacggcggcaccgactggtgggacggcggcccgctcaaaacgctgaacgtatcccactccttcgtcgccgagggtgcccaagcggccggcgcgtcgcagcagatcgtcgtcgaagcgctgaccgaggaaatccagaagggcggcggccaggtcttcttcagcaccaccgccgtgcagctcgaccgcgagggcgacaacaccggccgcgtcaccggctgcgtggccaagcacgacggcgagtacacccgctacaaggccacgaagggcgtcgtgctggccacgggcgacttctcgcaggacaaggacatggtggcgaagtactgccccatggcgctgcccttcggctacggcggcgtctacgacggcagcggcctcaagctggcgctgtggatcggcgcgtcctggcagaagtacacgccgaacgcccccatgctggccacgatgggcgacgaagtgctgccctgccgctggtgggcggaaggcgcgctcaccacgttccccggcctgctggtgaacaagaagggcgtgcgctactccaacgaaaactgcacgtacggctacatgccctatccgcagcgcgtgcagcccgacggatgcgcgttcctcatctgggacgagaactgggtgcaggactccgccccctggcagagcgaccgcgtgggcggcgagccgcgcgacacgcaggaggtctacgacgccatccaggcgctgttcgaccccaacaccgactggaccaccaccgacgagtacgccggcttcgacgccacgatggccgagaacgccgtgaaggccgacacgctcgaagagctggccgacggtctgggtctgccgcgcgaggagttcctcgcccaggtcgaacggtacaactcgtactgcgagacgggcctcgacgacgagttccacaaggacaagcgcttcctgctg

SEQ ID NO: 9711 - DNA, 5844 bp, Unknown
  gut microbiota DNA sequence
ttggaccaccaccgacgagtacgccggcttcgacgccacaatggccgagaacgccgtcaaggccgacacgctcgaagagctggccgacggtctgggcctgccgcgcgaggagttcctcgcccaagtcgaacggtacaactcgtactgcgagacgggcctcgacgacgagttccacaaggacaagcgcttcctgctgccagtgaagcagcccccgttctacggcatcaaaaacgagccttacacgctatgcatcacaggaggcctcaacaccgacatccagatgcacgtgtgcgatagccaaaacgaccccatccccggcctgtacggcgtgggcaccgtcgtgggagacatgtacggcgacgtgtacgactacaaggtgcccggcatcaacctgggcggggcctgcaccaccttcggctacctgctcggcaagaacctgagcgccgggaaatggtaagcctctaacaagatcctccctctcccaagcgaaggcggcctctcggccgccttcgtcgtcttgctcgctatcgcccctcccgcacgctgacggctatcgggcttccagcttgcccagcatagcctcgagggaatccgcctctccgccgaacggctcgccgccgaaatgcgccagcagcttcttcagcgcggcgagatccgccgcgctctcctggtgcgtccgcatgttgcgcaccttcacctggccggcggccagctcgtcgggacccagcaccgccacgacgacggcgcccagcttgtcggccagcttgaactggctcttcaagctgcgatgctgatgatccatctcgccgatgagccccgcgtcacggcaagcctgaacgagcgagaacgcctccgcgcgcaccgagtcgtccacgcaggccacgaagaagtcgcagcgccgagccgcggggaactcgtagcccgccgcctgcagcgccaacgcgcaccgctcgtagcccagcgcgaagccgaagccgggcgtggggcgcccgcccacctcctcggccagcttgtcgtagcgccctccgccaccgatggcgttctggctgcccataccctcggtcacctgcacttcgaacaccgtgcgcgtgtagtagtccaagccgcgcaccagcttcggatcctcctcgaaggaaaggcccgcgccgccgaggtacgccttcacggtgtcgtagtgctcgcggcagtcgtcgcataggtgctcggtgatcttcggcgcatcggccatcacggcggcgcagtcggggttcttgcaatcgaacgcgcgcagcgggttgatctccgcgcggcgcttgcactcgtcgcacagctcgtccgcatgcgcgtccatgtacgccttcacggcatcgcggtacgccgggcgacactgctcgcagcccatagagttcaccagaaggcgcgtggcgtccacgggaatgccgatggcggcaaagaagcgcatgagcatgatgatgccctcggcgtccacgctgggatcttcggcgcccaggcactcgacgcctacctggttgaactgacgctggcgacccttctgcggacgctcggcgcggaacatcgggcctgcgtacatgagcttcgccggagccgcgccctgcggcaccagatcgtgctgcaccaccgcgcgcaccacacccgccgtgccttcgggacgcagcgacaggcggctcttgcccttgatggtgccgccgcccagaagcttgttcaggttctcgcccgagatcgccgtgaacatctccttcgacacgacatcggtagcctcgccgatgccgcgcacgaacagctcggtctgctcgaagacgggcgtctcgatagtcacatagccgtagcgaccgaacatgtcggcggccgtcgccttgaagtgcgcccagaatttcgcctcgtcgggcaggaggtccttcgttccttcgggagcttgcaaagccatggcgtatccttcgtctctcgcattctgaatcggtctattgtagcgcaaacacccgcgaagccgccatcactcgcccaacgaacggagcacgttcaccagcgcgtcgtccggacggtagcgcaggcgcagggccagcaggttgcgtgcgacggggaacatcccgacatcgacggcagcggacgcgccggagcccaacgcttcgagcacctcggcggtaggcgccaccggcaccgcatgcttcgccagttcttcgtcgacgacttccctcggcggcagcgccacgcccgtctcctccaccagctcctggagttcggccgtggcctgcatcgccatcgacgacgaggtcatgagcgatttaaggtagcatgccgcgcccgcctgcggccgtcccgccttccacagcacgtacgcaagctggtagtacgccatggcgatgtcgctgggctgcacggcgatcagcagtccctcctccagcaccgcggcggcgttctccatgtcgcccaccaacatgtaagcgcgacccagctgacggtagccggctgccgtcgcaggccccagctcgatggcgcgctggccgaaccgcaacgcctcttcggtacgctcgaacgagtgctccaaaagctgcgtgatctccagatggcacaggtagtaggaatcggggaccacctccacccgcttgcccgcatccgccgaagcgcgcgacggagcgcccgcacccgcccgcgcacggttgtacagcacgcgcgacgcgtacgagtcgaacgaacggtacacggtggtcgcgccgtccacgaacccgtcaagggccgccgcttcccctacggcatcgatgagcacctgcaccgccgtctcctggtcgccgctcgtagacaacgaccgagcacgtccgagcgccgcaaggcaccgatcctctccgaggaagcgcgccaccactgcgttctgatcgcccaagccgatctcgccttcggcaagcgccgccatgagccgcgtgcacgacgctaccgtacggtcgtcgtcctggactgccgcctcctcctgcgccgcgcgaacgagccggatggcgtccgccgtgctcgaagcgcgcacgatctcgtcggcaaggccttcggccatgcggcgacgcgcagcatgaaaggtgatgcgcatgtccttgcatcgctcggcgcccagctggacgcgcatgtcgtccgccaacgccccgtcgaccacttccggcatctgcagacgcagctcgtgcgacggaagggcgtcgacgtacgcgaacgcttcggccgcctccacatcgaagatcgccccgctcgccgcatacggcggcaacgggtcgccggcgcgcgcatcctcgaagcgtccgaacgcctcgtacgtttcccgagcgaacgtcgtctgcacgaacgcccgcgcagacgactcgcgcggaaactctcccttactttcgtcgctcgagctcggcgccgcgttctcgcacggccgcgccacgatgtcgacgcgtcggattccagacgaagcgtcgaatgcagcagcagccagcaccagccccagatgcagcgcgtagcgatgcgcctgcgcgtcccgatcgcgctcgctcgcctgcacccagccgctttcctcccgccacgcccacgacggcatgagcgacgcgcccggaaccttcagatcgaacgccgccgcccccgcctccacgtcgaagcgcatcgacgcgtccaaacgcaccggaagccgcaaccgctcgagcatcgcccctatcgcgcaccgcacgctccattcgcccgcccgctctgccgcaggcgcatccgcaggcccgtccatcactggacgctgcgcagccaccgtttccagcagataggcgtcccaccgagcgcaatccgcctccgttgccatcgaggcgcgatcgccgaacgcctcgcttaccagcagaaaccgattgagcgcagcctcgatcgcccacaccgtctcgatcgtgataggagcttccccgtcttccacgcccagataataggtgttggcgtagcgcacggtgcgaaccaagcgcagcgcctcgtccttgacccctgccagtttgtccagccccgcctcggtcagccagtgcgccaagcagctgacgagcgcaggaggcttgcacaccggatcgtcctcggcacagcgcgcgtcctccacgatggatcgcatcgccgtcaagggcttgtcacccttcagccgctcgaacacgccgccgatgccgcgctcgggtaccgacggcgctccgagcgaaggacgcagcacgaacgccaaatacgcccgagccatcgcgtcttcgtacgtcaagttcatgtcgtacgggccgaagtcgtaccaagaatcgaacagcgcatagcggccgcttgcgcagcggtactgggcaacatcttttttcgacccgtcgctttcatggacgtacacgcaccccagctcttctccggcagcctgctggggaaccctcgcgaacgtcagatcgggagtcctcgccggaggcacggcagacgcttcgctcgtcgaaaacacgcgcccgaacggatcgatataagccaagatcgcgatatcgctttttccgaagaactcgacaacatagagtccgcccgtggcgggcgtcggcagccccttgctcacccaaccgtacgaccgaacaggctcctcctgcgtgatagcgatcggaggcaccgccccttccagcacgcagcgcttcgacgtcagaaggtccgctgccccgagacgatatctgccttcttcatcgagttgccgcaccgcttcgtcctttcattcgcttccttgcagcatagcatgacctttcaaacgcgcaaagaagaacaccctcgaagcccaagcttcgagggtgttcgaacgacctcgtcaaacagatgatcagtggtgatggttgcacgcgttgtccgcgctcatcaccggcacgctgcccgcagccaccagcttcgccgcatcacccacgatcggcgtctggttttcgaagtacaccgtgatgcccgcctggttgaagcccgtgagcgggcgcatgcccatgcccgccgccacgatagcgtccactccggctttggccaacaagccgaccggacgcatgcacccgccttcctcgtgcggagggttggccacctcgctcgtacccgtgatctcgccatcggcgatctccaccacagtgaagcagtcgcagtggccgaaatgccccgcgcgctcggattccaaccccgcttcgcccatcgtcggcaccgcaagcttcatcgtctcgcccatctcgcccttctttcattcatgtccggataatacttcaaacgtcgtttcgtttcagctccgccaagccgccttccagcaactcgaccagcaaatcatcgaggcgccgtcgcgcccgaagcgcatcgagccactgttcggccagttcgactccctgctgcgtcagctcgtactcgcgacggcgcggcccaacgtcctcgtcgcaccatcgagatgccaccgcaccttcgtcctcgagccgtctgagcgaccggtacaagccgcctacgtcgacatccacctcgccattcgtacgctcgaggatcgccttgcgcatgtcgtagccatatccgcccgcatacagcaatgctgcaagggcggcaggctcgaccaacgccccgccgccgcctccgcggcgtcgacaacacggctgacgcgccgcaccctctccgccgcaatcgtctctcggcataggccccacttccttccgcaagctcgcctctatatgctaataacatctatactccttaagcatgcatgttgtcaacatatatagcaagcgagttgtcccaacggcgcttcggcgcatgcggaacgcaaggaaaagggaagcagtagacaatgggagaaagaagagggcgaataaggccggagacggattactcgaaggcttcgcgatccagctcccg

SEQ ID NO: 9712 - DNA, 303 bp, Unknown
  gut microbiota DNA sequence
acggcaaagctggccctcgtcctctgcatcgcgctcgacaagaagttcgaggatctgttctacttcgagtgaagtgtgcgcaagggcgcatcaagggtcgacggacgcgcctggctcacttccagatcttgcgggcttcggggtcttcggccagcagcaggtcgcgcaaggcttgcaggtcgtcggccgagacgtcttcggggttctcgtactccagcgtgtccgccacgcgaaagtcgaagccgttctcgccgtgctcgctccacagctgctgcagcggacggttcgggtgcccgcctccgt

SEQ ID NO: 9713 - DNA, 664 bp, Unknown
  gut microbiota DNA sequence
cttctgctgcggctggacggacggaagtccagtccagccttgcatcagggcaatctggggcaccagccgcgccctcgctgaccttgcctgacccgcgcgaatgtgcaaactacctcgacatcgacatcgccgaggatcgcctggccggctggtcgttcgccgaagggaaggaggcctcccatgcctaagcgcgaagacatccaaaccatcctcgtcatcggaagcggccccatcgtcatcgggcaggcgtgcgagttcgactactcgggcgcgcaggcctgcaaggtgttgaaggccgacggctatcgcgtggtgctcgtgaacagcaaccccgcgaccatcatgaccgacccgggcctggccgaccgcacctacgtcgaacccatcaccgtggagttcgtcgagcaggtcattgcgaaggagcgccccgacgccctcttgcccacgctgggcggccagaccgggctcaacacggccgtcgagctcgcgcgcgccggcatcctggccaagtacggcgtggagatgattggctgcgacctcgaggccatcgagcgcggcgaggaccgcaagcagttcaacgagtgcatggcggagcttggcatcgagacgtcgcgctccggctacgcctattccatcgccgacgccgaggacatcgtggccgagc

SEQ ID NO: 9714 - DNA, 1162 bp, Unknown
  gut microbiota DNA sequence
cggctgcgacctcgaggccatcgagcgcggcgaggaccgcaagcagttcaacgagtgcatggcgaagcttggcatcgagacgtcgcgctccggctacgcctattccatcgccgacgccgaggacatcgtggccgagctcggctaccccgtggtgctgcgcccctcgttcacgctgggcggcgcgggcggcggcatcgcgcacgacgcggccgagctgcacgagatcgtgggccagggcctggagctgtcgccggccggcgaggtgctggtggaggagagcatcgagggctggaaagagtacgagatggaggtcatgcgcgaccgcgccggcaacggcatcatcgtgtgctccatcgagaacttcgacgccatgggcgtgcacacgggcgactccatcacggtggcgcccgcgcagacgctgacggacgtggagtaccagcgcatgcgcgcggcgtcgctggccatcctcgagaagatcggcgtggagaccggcggctccaacgtgcagttcgccgtcaacccggaaaacggccgcatgatcgtcatagagatgaacccccgcgtgtcgcgctcctcggcgctcgcgtcgaaggccacgggcttccccatcgcgaaggcggccgcgaagctggccgtgggctacacgctcgacgagatcgtgaacgacatcacgaaggccacgcccgcctgcttcgagccgtccatcgactactgcgtggtgaaggtgccgcgcttcgcgttcgagaagttccagggcaccgacgacacgctgtccacgcgcatgaaggccgtcggcgaggtcatggccatcggccgaacgttcgaggaatcgctcggcaaggccatgcgctcgctggagaacgggcgcgcgggcctgggagccgacggcaaaggcggcgaggccgacgcgtccgacgaggcgctggaagacctcgtggcgcgtcccacggccgagcgcatcttctacctggccgaggcgctgcgccgcggctggacggtcgagcgcgcgagcgcggcgagccgcgtggaccccttcttcgtcgcgcgcatggccgacatcgtgcgcgtgcaggagaacctgcgcggcatggcgctggacgagctcgatgccgacgcgttccgcctgctcaagcgcatggggctggccgacgcgcagatcgcg

SEQ ID NO: 9715 - DNA, 562 bp, Unknown
  gut microbiota DNA sequence
gaggatctggtcgggcttcacggcgcgcttgatgttctcggcctcgtccatcatctcgtcgtccacgtgcaggcggcccgccgtgtccacgatcaccacgtcgcgcaggttgtcgatggcgtcctggatgccctcctgcgcgatcttcaccggatcctgcccgtcgccgcggtacacgcgcacgccgatctcggcgccgagcgtctccagctggtcggccgcggcggggcggtacacgtcgcaggccacgagcaggggcgaatggttctcctgcttcaggcggtaggccagcttcgcggcggccgtcgtcttgccggagccctgcaggcccaccagcatgatgacgttggggatgcggctgctcaagacgagcttgctgtcggtgcggcccaacagctcggtcaactcgtcgagcacgatcttgatgacgttctgcgccggcgtcagcgagtcgagcacctcggcgtcgaggcagcgctccttcgtgcgcgcgacgaacgacttcaccaccttgaagttgacgtccgcttccagaagcgccatgcggatctcgcgcatggcg

SEQ ID NO: 9716 - DNA, 187 bp, Unknown
  gut microbiota DNA sequence
cttgcgcgtgcagttctcgaacgaccttctggccgcaggaggcgtgaagaccgtggcgtacaacgacgagactatcgacgcgtaccgcgacatgatgtcgagcgtgaacatgattgtcgtggtgctggtcaccgcggcggcggcgctcgcgttcatcgtgctgtacaacctcacgaacatcaacatc

SEQ ID NO: 9717 - DNA, 145 bp, Unknown
  gut microbiota DNA sequence
tcgtccgctgttcatcgttgccgaggacgtcgagggcgaagcgctggccaccatcctgctgaacaagctgcgcggcacgttcaactgcgtcgccatcaaggctcccggcttcggcgatcgccgcaagcgcatcctcgaggacatc

SEQ ID NO: 9718 - DNA, 299 bp, Unknown
  gut microbiota DNA sequence
cggccaacgcgccgatgctggccatgaagcccgcgtagtagtccgacacctggggaaacgcgagcaccggcaagcggtcgggatacccgttcatttccatgaagcacccgtaggcctggccgatgccgtcgaacgaggcgcgcgacacgtacgccgggtcgcccgtctggccgaagcccgagatgtgcgcgatggtcagcttcgggttgacctcccacagcgcctcgtcggtcatgccccacttcgccatctggccgccgcggaagccgtccacgaggatgtccgcctgcttcagcagc

SEQ ID NO: 9719 - DNA, 189 bp, Unknown
  gut microbiota DNA sequence
catccggtgtacttggaaacctccgcgagccaatcgtagaggatgccggagcgcacgccgtcggcatcggtctcgctgatgccttcgacctcggggaacgccacgcgcaccacgcggacgtcctcggatgcatcccgcgaaccgccgacatcggccgccgcgggaacgacgaagacggttgttgccatc

SEQ ID NO: 9720 - DNA, 213 bp, Unknown
  gut microbiota DNA sequence
ggggccgcgaacgtctacctgcgcagcgagctgggcgacgtcgactggaccgagctcgaggaggaatcgggcacgcttctggccgaggtgctcaccgacgaagagatcgacgtgctgggaccgcgcatcgaggcgatggatcccatctcctccacgagctggccgctcgagcgtgcggcggccgacgaggatttcatctacttcatctcggcc

SEQ ID NO: 9721 - DNA, 236 bp, Unknown
  gut microbiota DNA sequence
cgaatcctcctgggggcaccagcctcgcaccgtcccgggcaacgcgcccggggctttcgcatgcgcacttcgccgcgtaccgccgttgccgtggaaaaaccgtcgtctacgcgtcgtccgcgccgcttatgcgcacggaaggctatactggtcgcgtaccttttcataccggggagcttgcagccgcatcgcggccggacaggctgagaggaagcgccgattcacgcttcgacccg

SEQ ID NO: 9722 - DNA, 271 bp, Unknown
  gut microbiota DNA sequence
ctcgccgatggcgcggcccacgcccagcacgatgccggccatgatgccggagacggcggcgggaacgataactcggaacaccgagcgctcgtgatcggcacccagcgccagcgcaccctcgtagtacttcttgggcacggcatcgagtgcgctctgcgcaacggtgatgatggtgggcaggatcatgatgcccagcagcacggcagcggccagaagcgacaggccgcggcccggcatattgtcgcgaataaacggcacgatcatcaccagg

SEQ ID NO: 9723 - DNA, 251 bp, Unknown
  gut microbiota DNA sequence
gcggcgaaggagcccggcgacaccactggcgccatcgccaatgagaaggaagtgacgggcgtggcctaaccgacatccgccactcgaaggggcgccgcaggggcgccccttcgcatcttcgaacgaaggcccccttccccaggacggggcttccccgcgcacggcgccgcccgaacgggctccggggaatcgacgggccttcgtggtagaatcgtcttcgtcttccatcgtttccgaccgaaagcggcatt

SEQ ID NO: 9724 - DNA, 228 bp, Unknown
  gut microbiota DNA sequence
cccgccaaacgaccgaataggatttctcgatccgtttcgcacgccccaggttgacgaagacgacaagacggtcacgcgcgtcccgaagaggcaagcgaggcagcatgattactccccaggatgaaaaaagggcttctccgattcacggagaagccgccgaaaaagacgccccgcaggttgaagcgccgctcgcagagccggtgcccccagcggaagaaccgcctcggg

SEQ ID NO: 9725 - DNA, 200 bp, Unknown
  gut microbiota DNA sequence
acccagccgttcggaaccttgaggacggtgccttcgccgatgctgctgccgtcgcccatctggttgccgttgttgttattgttgttgtcgttgccgttgttgtcggcgttgtcgccgttgttcccgccgccattgtcgttgttctcggtggcagggttggcgttgtcgcctccgttgtcgttgttgcccgcgttgtcgct

SEQ ID NO: 9726 - DNA, 204 bp, Unknown
  gut microbiota DNA sequence
ctgctggcgcaagcgcgcgagttcggcgtgcgccacctcgcggtgggcgacgagcgcctggctgagcagccggttgccgacgagctgcgaaacgccatcctgagcggatcgcacggaggcacgcagcagccggcgagcgcgccgtcgtcgctggccgaggccgtggcgcgtcacaacgcgggcggcgaagggtcgctcgggttc

SEQ ID NO: 9727 - DNA, 301 bp, Unknown
  gut microbiota DNA sequence
cagagcgtggcaaccttcaccgagaatcgcatcacggcggacgcgttcacggccgctgcgtcggatgccagcgcatacgcggccgactacgacttcctggccgatgcgggcacgaacagtctggaaggcttcctgttcccgaaaacgtacgagatcggcgacgatgccgcggccgagtcggtagtgcgcatgatgctcgaccagttcaagaccgagacgtcggggctcaattggtcctacccgcaaagccagggcctcaccatctacgatgccgtgaagctggcttccatcgttgagcgcg

SEQ ID NO: 9728 - DNA, 217 bp, Unknown
  gut microbiota DNA sequence
cgcgcgcgctcgatcctccagaaagtgcgcgcgggcggcaacgaatggttcggcatcgactacaacatgaacctgtaccgcggctgctgccacggctgcatctactgcgacagcagaagcgaatgctaccgcatcgacgacttcgaccaggtgagcgtcaagttcgacgcattggccatcctgcggcgcgaactgcgcagccgccgcgtgcgaggca

SEQ ID NO: 9729 - DNA, 137 bp, Unknown
  gut microbiota DNA sequence
gacgcgcggtgcgttggagctgatcgaggaattcggcttcggcgtgtcggtggacacgaagagcgcgcttatcacgcgcgacatcgacgtgctgagcgccatcggagcggcgggcggggccatcgcgaagatcaccg

SEQ ID NO: 9730 - DNA, 278 bp, Unknown
  gut microbiota DNA sequence
cggaacctcctctcccggccaatcagacgcgaggatgcggcacaaaggcagcgcctcgacgagcacgagcgtttcagggtaggagcacgacatttgatttccgaatgcaggcatagtacgacacctcgtttaccgtgttccagggcgtgggaggatgctcgatcctgcaagcgtggtacggatcgcgtggaacaccgcggtcatctatgggctgcccgtccttcgggaggcgtcgggttcagcgcttgcactggttctttcgttcgagaacagtatag

SEQ ID NO: 9731 - DNA, 220 bp, Unknown
  gut microbiota DNA sequence
acgacataccgcctccgagctggacacgctcgtcaacggcaagctgggcaacctcacgttcttcgccgagatttacgagagcgagaccgaccccgctgccctggctccgaagttcgtcgtcagctccagcgctctgaccgagaacgtgcgcgagctggccgagctgccccgcgagatcatgctggagaccgacttctccgacacgggcaagatcaaggac

SEQ ID NO: 9732 - DNA, 14247 bp, Unknown
  gut microbiota DNA sequence
ctacgagagcgagaccgaccccgctgccctggctccgaagttcgtcgtcagctcgagcgctctgaccgagaacgtccgcgagctggccgagctgccccgcgagatcatgctggagaccgacttctccgacacgggcaagatcaaggacgtgctgcagcagcgccgcatcggcatggagcagggcttcgcgaacgcggggcatgctagcgctatggcgcacttggcttcgtactacctgccggccggcgtggtgcgcgagcagctgggcggcgtcgggttctaccgcttcctcaagcagctgctggcctcgttcgacgagcgcgccgaagaggtgtccgcacgcctggccgacctcgccgtgcgtctgttcgccgacgacgctctgacgctgagcttcaccggcacggacgacgactacgaacgcttcctggccgcaggcgccgcgctcggccgcacgcgccccgaagacggcgtgcgcttgatcgcgcccgaccccgtggcgctcaacgaggcgttcatcgtgcccaccgacgtgtgctatgcggcccagggcttcgaccgccgcgccttcgacgcgggctacacgggcgcctggcaggtggccgcgcgggcgctttcctacgactacctgtggaacgaggtgcgcgtgaagggcggcgcgtacggggcgggcttccagacggcgcgcaccggcaatctgcgcttctactcgtatcgcgacccgcacctcgacgacacgctggcccacttcgccagggcttccgagtggttggccaagttcgaccccgccgccgaggcgatggaaggctacgtggtgagcaccgtggccgggttcgacaccccgctcaaggcgcgcgccctcgtgcggcgccaggacggcgacttcttcggcggacgcacgcccgagagccgtgccgccacgcgcgcccagatgatcgacgcggacgccgctgcgctgcgcgcgctggccgggcccatcgccgaagccgtcgcgatgaacgccgtgtgcgtgttcggcagcaaggacatcatcgaggcgtccgatgccggccttgcggttatcgacctgctgaacgagtaggcccgcgacgtaaacagagcgcttcgaccgcggccccgacgcagacgccggggccgcctcgcgcccagcccctttcgcacgcaaccgcgacagcgcgtcacggcgatcacggaccgaggccggaatggcaacaatgcatcgaattcggaatacgcgcgggggtcgaaagcgcgaatagcggccctgctatggtgtcgcgcattttgcgaccaggcattccgtcgaaaggaacccctcgggctctccgcaacgcagccctgagagttccgaattcgatgcattatcgccacccgaacccctgccggatgctcgcacgcccggcctttgcctggcaagccctgaaaatcgcacttccgaagcacacgtcctcgcgcttgagctagaataagcggttggaaccgagtgcgtgcgaagcgattggatccgggggtcgtcccggccgttgacggccgaggcggacgcgcctgtcgccgagcatgcggccgcgcttgaccgagcgccgcaataatgatagtaatacagtatcaaatagacgagaagaatacggagagctgctgttatgctggaactcaagaacctcaccttcgaggtgccgcttgcggacggatcgaaggaaacgaagcgcatcatcgacgatctgtcgctcaccatccccgacggccgcttcacggttatcaccggcccgaacggcgggggcaagtcgacgctggccaagctcatcatgggcgtcgagcgcgcgacgagcggccagatcctgctggacggcgaggacattaccgacctgtccatctccgagcgcgccaagaagggcatcggctacggtttccaacagcccgcacgcttcaagggcatgaaggtgaagaagctgctggacatcgcggccggcaagaagctgccgatgctcgcgtgcaacgagtacctggcgaaggtgggcctgtgctcggccagctacctcacgcgcgaggtggacaagaacctgtccggcggcgaggtgaagcgcatcgagatcgccaccatcctcgcgcgcgacccgaagctggccatctacgacgagcccgaggcgggcatcgacctgtggagcttcgaccgcctgaccgagacgttccgcgacatccacgaggcgcgcgacggccgctccatcgtgatcatctcgcaccaggagcgcatcatccagctggccgacgagatcgtgcttctgcgcgacggcaaggttgccgagacgggcacgcccgaggagctcatgccgaagctgggcttcgtggcgaagggcatccccggctgccagctgagcacccccaccgagctgcacctcacggagatcgccaccacctgctaacccgcccacgccgcgctgcgaatgtttcacgtgaaacattcgttcgcgttcacgcacgcggcagctgcacgaagccgccgctttgaaccagaaggaggccatcatggctgttgatctttcccccatcgacgagagcctgctcgccgagatcgccaacatacacggcatgccgaaaggcgcgttcaacatccgcaaggacggcgagctcgtcgagcgccactcctcggcgaacatcgagatcgccacgaagacggacaaccccggcatcgacatccgcatcaaggccggcacgaagggcgagacggtgtacatcccggtcatcgtcacgcaggcgggcctgaaggacgtcgtgtacaacacgttctacatcgaggacgactgcgacgtgaccatcatcgccggctgcggcatccacaacgagagccaccaggcctccgagcatgacggcatccataccttctactgcggcaagaacagccgcgtgaagtacgtggagaagcactacggtgaaggcaccggcaccggcgagcgcatcctcaaccccgtgaccaacgtgatcatggacgagaattccagctgcgagatggagctcacacagctgcgcggcgtgtcgtccaccgtgcgcgacacgaacgccgagctgggcgcgggcgcgaagctggtgctgaccgagaagctgctgacccacgacgaccaggtggccacctcgaacatgaaggtggagctcaagggcgacgattccagcgtgcaggtaatctcgcgctcggtggcgcaggacaactccaagcagatcttcaacccgctggtcatcggcgaggcgcagtgccgcggccacgtgcagtgcgacgcaatcctcatgggcacggcgaaggtgaccgccatccccggcatcgaggccgcccacgaggacgccctgctggtgcacgaggccgccatcggcaagatcgccggcgaccagatcacgaagctcatgaccctggggctgaccgaagaggaagccgagcaggagatcctcgaggacttcctgaactagccggttccgtcggcctcgcggccgacggaacgacccggcactgcgaaggcccccggcatccggccttgccccttgtgcgccgctcggcgcgtaccgaagtacgcttggcagcgcagcgggacaactccgaacgccgggggccttctcgctgccttgctgcgccaacccgcgaggcgttgttctccctccaaatgccgcgcggatgtttcacgtgaaacatttgtttgctcgaacgagtgtttcacgtgaaacactctgacgaagcgctacgacgcggagcggcggagcgggttgctacgcgtcgtagcgctgcacgaagtggaggatgacggcggcgctcgtgggggtacagcgctcgccttccagcttgcgctcgcacgtggggatgccgcgggcgatgatggcggcggtggccggcgcggggatgggcagctcgccgtgggcgcatcgcacggtgccgctgccggtctgcacgcgggtggccgtgatctcgtccgggtcgagcgcctccacggccaggcagatagcgagcacgttgcgcagcgcctcgccgttgcccacttcgtggaagtgcgtctcctccaccgcacagccgtgcgccgtcgcctcggcctcggcgaggatgcggtagacggcgcgcatgtcgtccttcgcccgctcgctcgcatcgagcgcatcgatggtggcgttcacctcgcccaggtcgcgatgatgcccgtcgggcacgccggccgcttcggcggcctccagcacctgcgcgcgccgctcttcgggcagttgcagcaacgcctcggccagcaggtgccgccgcgtagcgttctcttccaagttccaaaccaacgtcgtcatgccgtcctcgctttcacatggttgatcatatgggcctggtagcccgcgccgaagccgttgtcgatgttgacgacggacacgcccgaggcgcacgagttcagcatggccagcagggccgcgacgccgccgaagctggcgccgtagcccacgctcgtgggcacggcgatcaccgggcacgacgcgagaccgcccaccacgctggccaacgcgccctccatgcccgccaccgccaccacgacgctggcccgcgcgatgtcgtcggcatgcgcgagcaagcggtggatgccggccacgcccacgtcgtacagccgcaccacgtcgttgcccagcatctcggccgtgacggcggcctcctcggccaccggcagatcgctcgtgccggcggcggctatcacgataggcccgttgccgtcgggctcgggcgcctcgcccaggatgccgagacgcgggccttggcggtaggcgaacgcgagagggcacgcgccttccagggcacgttcgaccgcggcggccttctcggcgtcgagccgggtgaccagcacgcgctcctgcccgttctccacgagcgcgcggcacacgcccgctatctgctcggccgtcttgcccgcaccgtacaccacctccgacacgccctggcgcatgccgcgatggttgtccaccgtcgcgtagcccagctccgtgaacggggcgatgcgcagcgcctgctcggcctcgtcgacggcggtctcgcccgccgcgacgcgctcgagcagctcgcgcagttgtcgttgctccatgttcaacctccgtcatgataccgatcgtcgaccattgaaccacttggagcgcactccaagtcaagcgcctttccttccccgccataaagaaagccccggacgcgcggtgtcggcgttccagggctttcgaacgttcgggaggatctcggctctaagcagcgacgtctccaggctgcacggcgttctcgcccgcgttcacctcgtcgccggcgcccgtgccttcgtcggcaggagcagcgtccccgtcagcgttctcgccttcgctctcgtctttcggctccttcgaagcaacggtcgcgcccgcgtccgtggacttggtggcgccggcagtcagcggcgtggacgaaaggtcgagcgcggtacccagccacttcgtctcgatgacgccgatggtgccgttgccggtcagcgtggcgagggcttcggagaccgcttgcttgagatcggtgttcgcatccgacacgcccacgccgtagccgcccgcctgctgcatgagcgccacgatatgcacgtcgtcgcccgcgctgtgcgccgcgtacgtcccgatgatggcatcggccgccacgtactgcacctggcccgaggccagctcggcgaacgcgctcttgaggtcgtcggtcgtggagaaggttgccttgtcgaattcgttcgtcaccgcccaagcgctcttcgacgacacctgcgcggcgatcttcgtctcgacgacgttcgtgggaacctgcgtgttggacggcgcggagaacaacgccacggccgtaggcaggtacgcgtcagacttccagaacgaggtgccgctgtcggacttgtcgatgcccatgacgatgtcgaccgttccctctttgagggccgattcggcatccgatcccacgttgacgacctcgagcttcagcccgaagctgtcagccagcgccgccgccacgtccacgtcgatgccaacgattttggacgaggaggaaggctgtcccgccaggggctggttgtcggtgttcacaccgacgcgcagcgtaccgtccttgccgatggtcggcgaggacagcgtgggcgtcttctcggggggagtgtagctctgctgcgatgagcagcccgtcagaacgacgagcagggccgccatgcacgcgaccgccatgcagcaggacgcgagcgttttataacgcttcataaccggtgagcctccatctagcttgatgttcatgctgcctctttcgactgacctagtctttgcccccacactcgcgcactggaactcagcttgcgccttgccctctcgcccgtcgcaaccggatgtcgcgatactcaggcggtgcggcttacctctaggatacgccatgatcgtcgcgcggagaccgcgcggcttacgtgggtcctttcgaccgcatctgccgtggactgaggttgaaaaacccgcaactacagactcgaaagaagcgtcactcagtgtaccagatcatgaaaacgcctgaaagccgagccgtacaatccgcgagaaacgcgcggacgccgccgaaaaggctccaggcgggcacgccgtccgaacgccggacacgatgaggggacgccgctccttcgaggctccgcgcgtcgaaaggcctgcaaggccctgtgaagcgcgcatgctttcgcgacgccggccaggcctgcggcgcacatgcgagaagcgcgcgagaaacgaggggaaagcgcgtggaaacgacgctgaatcggcgtggaatccgcgcgagaacggcgggtgccggacatgagagcgccgtgtgcggcgcgtggaaggctccgtgctatcctcgtaggatgacgatcgcccgcacaaccctcgccctcgcccccgcacgcccgaccgcacgggaagcaggcgcatgcccgcgcgttccccgccgcgagcgcctgctgaggacggcgggcctctacgggcgcggagccgccgaggccatcgccgagacgctgtggcccacgcgctgcgccgtatgcgacaccccgggcgaggtgctgtgcgcgccttgcagcctcaacctgagccatatcgactggtggcgcgcctgcccgcgctgcggcgcgccgttcggccgcgtgcagtgcagcgagtgcaacgacgtgctgatgagcgttgccggacgcgacgagccgcccttcgacgcctgcacgagcgccgtcgccttcgacgatgccgccgcccgcatcgtgcgcacttggaaggatgccggcgagcggcgattggcaggcgccatggcgacgctcatggcgccgatggcgccgccctcctggctcgccgaccatccctgcatcgtgccggtgcccgccaccgccgccgcccgcagacggcgcggcttcgaccacggcgaggagctggcccaggcgctggccgaccgcctgggcctcgccgtcgcgcccgtgctcgcccgcccccgcagccgcgaccagcgcgccctcgcgcgccgcgacagattggcgaatatggaaggccgcttcatcccgctgcccggcgcaagcgccttcccctcggtcatcctggtcgacgacgtgtacaccaccggcgccacgctgttcgccgcgaccgacgccgtccgcgtcgccggagccgccaccgtccgctgcctcaccttcgcccgcgtgtggtaaccccctccccgactcgcaagcacatcggcgccgtcggaagccatcctcgcccgaaaaacacgcctcatgcatcgaggcgtgtttttcgggcgaggatgcagacgtgcgccaaccgggcgcaaaaaagcgacgggcccggaggcccgccgctttcgcatatcgacttgacaccgtgtgctacatggtgcgctcacgctgcttttggggtgcggcgcttgccgcgtcggagagctcggccacatcaaccgagatgctgtgcttgatgggcttccagttgcacttcttcacgagcgcgaccagcgcgatggggatataggtcatcatgaacacggggaacgtgaacatgtacagaaccttcttgcccgtggtggaacggatggagtcccattccacgaacgtggtcagcacgccgaacatgaacatgaagatgaagtagttcagcaggcagaacaggatggacgacagcgaggaggcaaccatgatgcccgtggacatggctccggtgaggctgaggaacacgatgatggcgttgaacagcaccgacacgatggtaagcagcatgcccggcgcgatggtcatgagcatgtcgtagcaagcgaagcgcgcgcccttggggttcacggcgatgcctttcgccaagcgggcaccgtagtgccagaacacctggtagaagcccttcgcccagcggaagcgctggttccacgagtcgcggaacgtgatgggctgctcatcgtagaggatggccgtgggcgtgtagctgatgcgcgtgccctcgagaatgctgttcgcagagaactcgatgtcctcggtgagcaggtgccacttccaaccgccgttcttctcgatgatgtcggcggctatgaagaagcccgtgcccgacacggcgcaactggtgttcagcgtgagacgcgcctggttcaggaacttcgcctcgcgcaggaaccacacggcgtagcccgcggatatccagttggagtcgtagttcttggagtttcgatagctggtcgaggccttcgctccgttgtcgaaggtcttgttcatctcgcggaagtagttcacatccagcacgttgtcggcgtcgaacacgaagtacgcctcgtaacccttgtcggcgtagcgctcgcgaatgcactggaagccgtagtcgagcgcgtagcccttgccaacttccttgtcgttgctgcggggaaagacgatggcgcctgcctcgcgggccacgcgcgcggtgtcgtccgtgcagttgtcggcgatgacgaacacgtcgatgagctcggacggatagttctgcaccttgatggagtggatgaggtcgccgatgacggcgctctcgttgcgagccgagatgactgcggcgaacttgtggttcttcttcgccgtgagctccttgggcttgcgcgtcagcaccacgaacacgtagtagagctgatacgtgtagcagatcgtgaacgtgagaaacacgcagaagttgaatatgtcaacgaacgagatctgcgaaaaaaactggtccagcacctttgctcctttgtcgggccgcgaacgctccttgcggccgtgccatcgcgcacccgtcctgcgggtcgcgctccgcccccctggtgttgttcggtttcgtctgagggttgtgcggaacgccgcctgttcgccgcccatgcggcgctctggctgtaacgcgttccaagctggacagattatagcgggtgagcagccgttcggggcaacaacgagtccgttcgttaccgtttcttccgaattcgaggtcataaatcaccggtattcacaaaggttctgcatacgaacttcataactaggtcggttcggctatgataatctgagagatcgagaatcgcacgttcccttatatgtcaatggaggcatacccttgaaccacgatatcaaagacatcgccctggccgacgagggcctcgcccgcatcctgtgggcggaccgcgacatgcccgtgctggcgtccatccgcgagcgcttcgagcgcgagaagcccttggacggcgtgcgcatcggcgcctgcatgcacgtgaccaccgagacggcgaacctcatgcgcgcgctctcggcctcgggcgcgaaggtgacgctgtgcgcctccaacccgctgtccacccaggacgacacggccgcctccctcgtgcgcgacttcggcatcgacgtgttcgccgtcgccggcgaggacgccgacacctacaaccgccacatcgaggccgtcatcgcctgcgacccgcagatcgtcatggacgacggcgccgacctcgacaccgcgttgcacaccaagttcaccgacgagctggcgcacgtggtgggcggcaccgaggagaccacgacgggcgtcgtgcgcctcatgtccatggccgccgaggggacgctcgcctaccccgtgttcaacatcaacgacgcgaacacgaagcactgcttcgacaaccactacggcacgggccagtccacgctcgacggcatcgtgcgcgccacgaaccgcctcctgtgcggccgcaccatcgtgatctcgggctacggctactgcggcagcggcctggccctgcgcgcgaagggcatgggcatgcgcgtcatcgtgtgcgaggtcgacccgctcaaggcgctcgaagcgcacatggagggctacgaggtgatgcccgcagccgaggcggcgcgcttcgccgacgtgtgggtgaccgtgaccggcaactgcaaggtggtggacggcccggcgttcgagaacatgaaggacggcgccatcgtgtgcaactccggccacttcgactccgagatcaacctcgagtggctggaagaccacgccacgaagaaagaggagatcaaaccgctggtggaagagtacacgctgccggacggccgcacggtgatcgtgctggcgcagggtcgcctcgtgaacctgtcgtgcgccgagggccaccccgcgtccgtgatggacatgagcttcgcgaaccaggcgctggccgccgagtacctgtacctccatgccggcgagctggagaacaaagtgtacgacgtgcccgccgccatcgatacgcacgtggcgcgcgtgaagctggaaacgctgggcatcgagatcgacgagctcaccgaggagcaggtcaagtacatgagctcctggaacttcgagacgctgtaggatccgacgaggaatcgccctttcctgcaggtaaagaacccggtgcatgacgcatcgggttctttttttacctgatcgccaacgtcggctcggcgcctcatgacgaagctacgacgccaacccgcgcctcgccaagagagcccgctcgttttgcagcaggccctccacaagataggctgccgcgcacgaacgccctcgcacggatgtgtctcggagcagcgtcgtcgcgcgccgatcccaccccgaacgctatcgcgaaatcctggtaagttcccgtcgatattgctatcctcatttgcggataaacaggaggggcaatcgttcgacctggggtttcttgatcgagacgaggagctcggccgactcgagacgcggaaaagctcgcatatcgacgcgaacttgccctttttcccgcgcgccccctggagccggcctccttcgcgccccgcatggggacttccccacgtgggacgcgagtcgcccctaaaggcacatgcggtagatgcgctccacgtcttccgcgcccaggctgcgcaggcccgggatccgaccgccgccgcaagcgtggcgcgccatatcctggaaatgcgcctcgtcgatgccgagctcggtcagggttccctcaagccccagcgtctcgaaggcgaaggagctcacgcgctcgatcgccctgcgagcgccttcttcaggcgaaagaccctcttccaccccgaacaccgcaatgcccagacgatagatggcggacgcggtcccgtcgtccaagatgtactcgagccagcgcggggcaaggatggccaggccatgaccgtgcgtgatgtcgtagtaggcggacagctcgtgctccatcatatggcacgcacacccgtgcaccgtccccgcatcgagcaccgtgttgagcgccatggacgatgcccacatcaggttcgcacgcgcctcgtagttctgaggctcctccaacgccaccggggtccacttcaccaccgtgcgcatgacggcctcctgcatctccaggaccaggtcgaaggtggcatcgccggcaaggtagtaattgtccagcacgtggttgaagatgtcgaacgcgccgcacgcggtttggtacgccggcagggtgtagctgtgctcggggttctcgaaggccacgcgggggatcagcgcgcttccgcccaggccgatcttctggttgacgtccatgttcgagatgacgctccaagcatccatctcggaaccggttgcagcgttggtgagcacgaccgccacgggcagggcatcggtcacccatgcgccgcccgcgaccaggggccatacgtcgccgtccgcggtcttggccgccgcggcgacgcccttcgcgcagtcgatggcggacccgccgcccacggccaggaccacgtcgatgccgttctgcctgcagatggcggcgcccctgttcgcggtggtatggcgcgggttgggctcgacgcctgccagctcgaacagttccatgccggcgccttccagaaggccgcgcacctcgtcgtacaggccgctcttcttgatggagccgccaccgtagaccatcagcaccttcgtgccgaaggccgcgagctcttcaggaaggtgctccagctggttctttccgaagtacaccttggcagggttgtggaagatgaagtcgttcatagtgttgcctctttcctatcctcttgctttccttcttgccttcttgcacgggctgcccggcagacggcccgaaccggccaccgttcagccgaagctcccttacgcaagccccaagccctcgatccagggcgccacctgatcgagcgcatcgggaagggcgctcctttcgacggtcaggccgtccagcaggttcgcaccgggacacagatcgcggatatcggccaaggcgccgtcgatgccgctgccgccgctcgtgcagaacggcgcgaccgccttgcccgccaggtcgtgctgcagcagaaacgagcgcatcacatgcggcaaccgcccccaccagatgggattgcccaggtagaccgcatcgtaggcatcccaatccggcaccgcggccgcgatcggcggcaggtagccctcgtcttgttcgcgccgcacctgggaagtcatggcatcgtaatcgtcgggataggcgtcggtcgtctcgatgcggaacaggtcggcacccgtcgcctccgcgatgcgctcggcgacggaaaacgtgttgcccgagtacgagaacaccgccacgagcgcccgcccgccgtgggccgcgggctcgggctcggacgcaacggactcggccggtccgccctcctcgtccggcgcgggcgcttcgttttcctcaacctgctcctctgccgcaacgcatccggcgagcatgccgccgccgagcaccgccatgccgaagccgaacgaccccatgacgaaggtgcgccggtccaattcgctttgtctcatgctgactctcctctcgcttccgtccttcgagtctacgtcctggagctgattccaagtcaaatggaaatcatgtgcagagcgatcaacgcagaatgcggacgagctcgatgccctccgactcgccgcggtcgcggctgtacaggcgctccacggaattgttccagtgctcgtgcacgccgaggctctccaccgggttccctgcgccgtcgcggtacgcggctcccgacggcggtgcagatgccaacgcggcttcgtgcaggtagttctccacgcccaggttgccctcgagcgcggcgttgcggctgacgaccgccggctggttgatgaggaagtcggcgcccaccgagtcgatggccaccggatcctgcgacaggaagatgctggccgcgaacccgccgtcgaagggcgcgccctcccactgcgccgcctcgcgcgtgaccgacgcgccttccgaggttgccggcaccaagccgtccagcatccacagcatcgtcttgccgcccagcagacggttggcgaacaggtcgacgagcacggtgtacatgcccatggcctggccggacacgtagcggtggatgccggcggcctcgggcggtcgcaggcggctggagttgaccagcgagccgaagtggttcttcccgcacagcgtgaggccgtagctgtgccccttgaggcttgcgaggttgatcaggtagtcggcctccgacacgcaggcgggcaccacgttcgccgcgcccgccacgtcggccgaccagacgacgggcgcgctctcgtcgcctgcggcgtcgttcgggccgccctcgtcgtagtagcggaagcgcacgccggcaagcgcgccctccgagcagagctccatcatatgcgccgggaagatgcggcacgcgtcgtacaccgcgatgtcgcccgccgctacgcccgcgtcctccacgagcgacagcagcagcgcacgcaaaagaaccggcgtcgtatagctcatggcgctgtcctcgtccg

SEQ ID NO: 9733 - DNA, 479 bp, Unknown
  gut microbiota DNA sequence
tgccagggtcgacggtcgtgatcgttgccgcggcgcaggcgggaaaggtcgatgcccatcaggcacctcctcttacgctgcgcagggcaaccgaggtggagccttggtcggtgtgcacggtcagcaggccgtcggtgtaggtgaagtcgaaggtggaagacctcacgatctcccgagccttctcgggcgtgaacgccgttccggcgcgcgtgtactcttccacgattgccccctggtaggcgtacaaacgcgtctcgtagtcgccgttgcccaggtgttcggtcagcacgagcgccagcccttcgggaccgtcggccacgcctacggcgtcggtcccgtcggtggctcggatggagttcgcgatcaacgacagccccagtcgggtattgtcagaggaagagcgcacatcgttcgctgcgcggtaggcgctcgtgcccaccagaagcgccagcagcaggaacagcgcgatgacggcgaac

SEQ ID NO: 9734 - DNA, 304 bp, Unknown
  gut microbiota DNA sequence
ctcgtacgcggcgacgatgtcctcaaggtaggcgcggtactcctgcgccagcgcggtcggcttctcgatgcggacgcggccgccgaactgagccagccacccgaacagcacggggctcttcatcaccgtggcgtacacgcgcgcctgcttctcccccgtcggcaccgactccacgtccttgccgaaccggtcgatgaccgcgcccatgatctcctcgtccaccagcagcgtagccgccaccggctcgccgctgtacatgccgaacgcgcggctttccagctcgcgcgcgtcgaacgtggcgatg

SEQ ID NO: 9735 - DNA, 25964 bp, Unknown
  gut microbiota DNA sequence
gcgcgcacgcgaccgcgtgtggggccgcctcgactacacggccggcaagggcatcggcgactggaagccgggctggttcaccccgacgatgaagcaggagatctggtccaccgtcatggaatcgcaccatcccgaccatcccgagtggaggcttcccacctacaccgagccgcctcacggcccgaaggacggcgaccgcatcaaggagtacccgctgaccgccaccaccggccgtcgcatcccggtgtacttccactccgagcatcgtcagctgccctggtgccgcgagctgtggcccgtgccgcgcgtggagatcaacccgaagacggccgccgagtacggcatcgagcagggcgactgggtgtggatcgaaaccgaatggggcaagatccgcgaagtggccgacctgtactacggcgtgaaggaagacgtcatcaacctcgagcacacgtggtggtaccccgaggtgaaggacgccggccacggctggcagttctcccaggtgaaccagctgatcgaccactacgcccaggatccgcactccggcacatccaacctgcgcgcctaccaggtgaagatctacaaggccacgcccgagaactcgccgttcaacaaccccgtgccgtgcgactccaccggcacgcccatcatccatacctccgacgacccccgtctgaaggaatggctgcctacctacgaagggagggagtaaaccatgacgaaggctatcatcaccgacctcaaccggtgcgtgggctgcctggcgtgctcggtcgcctgcaaggcggtcaacaacgtgcccatcggcagctactggaacaaagtggtgcgcgtggggccgaaccccatcccgggcggatcagggcagtaccccgacgtgtacatgtacttcctgcccatcagctgccagcactgcgagaaccccgagtgcgtgaaggtgtgccccaccgaggcgtcgcacgtggccgaggacggctccatccagatcgacaaggagaagtgcatcggctgccagttctgcgtcatggcctgcccctacggcgtccgctacctcaacgaggaggagaaggtcgtcgagaagtgcacgctgtgcgagcagaagctgtcgcagggcgagctgccccagtgcgtcagccagtgcggcggcaacgcccgctggatcggcgacaccgaggccggctacgagtcgttcgagggctccgaggacccgctgggcaagcgccgcaagatggtggagttcctggagccgttcaccgacgccgacgtgcacaagctgcccgacgtgggcaacaagccgtcgtactcctacatcctacgcgaccatcactgggaaggaggtgatgagtaatggaaacgcagtggcctctcgtcatcttcacgctgttcgtatgcttgacctgcggcacgctgggcggcatgtccatcctggcgctcaagggccagggcaggaacctgcagatgaccgcgctcatcacgtccgccgtctcgctggtggtaggcggcatcggagccttcctgcacctcgagcactgggagcgcatcttcaacggcttcgggcacatcacgtcgggcatcacccaggagctcatcggatgcgtggcgctggccatcgtcatcgtcgcatggttcgtggtccttcgaggcggcaagcccgttcccaaggcgctggcctgggcgaccctcgcggttgccgtgctcatgatggtcgccaccgcgcactcctacctcatgccggcccgtcccgcgtggggcctggcgctcgtggcgttctatctgggcaacgcgtgcctcctgggcgccgcggccgtctggctgatctccatcctgaagaaggacgaggccgtcgaggcgacgggcatccagctgacgttcatcgcggccctcgtgcagatcgtggccgacgtggtgttcgtcatcgcctgcgccatggcgaagatcgcgcaattcggctactacgccgacccgacatcgatgaccacggcccccacgcacgtcgacagcctgatgaccgtcatggtgtccggcgcgggagcgcccatgttctggggctccatcgtctccgtgatcgtggctgcggcctgcgccttcgtggcgaagaagaaggtgggcgcctccaagacgctcatggtcgtcgccgccatcggcgcgctggccacctccgtgatgtttcgcgtgctgatctaccagctgggctacccagtggtcctgatgtactaaccgcacgacgcccggcatcttcggatgccgggcggcaccccggtcgcgttccgggaaggaaactgcagccttcccggaaccgatcgaggcaagcggggcgatccccctcccccggccccgcttgcctcgatcttgcgccgccgcccctcccctcatgcggcgaaccagatcgacccatcggcccggccgtccgcccctccccctatcgcggaccgccgggcatcttcatgccccgatcccgaccatctcctcttttcccgttcacgtcgtcggaaaagccggcgcggacgcctcgtgggcgtccgcacacggacgaacaaccggagaccatggcatcattttgcgcctgccgaacccaacccgtcgccgaagccctacaatggatcaaagagcttgagacaggagatccgatgccgggcagccgacgaaaaagcgcctcgacgcaaggccatacgtatgtcatcgaccaatcgtatcgcgtcgtgtatctcgaccgtgcggcccgtcgtgtattccccggtggacgagtgggcgaactctgctacgaatgcttccgcgggcaaagcgaaccgtgcaaggactgcccctggaacgccgagtcgaacgagcacgcgacgcaaagcgtcatctacagcgcgcgcacgggaagttggtacgagataacctgcctcgagctggactggttcaacgaaggcccctgcgtgctgttctccggccatcccgtcgacgagcacagccgcagcttgttcacgtcgttgagcgagccgtcatcttacgatgagctgttcgaactcaacctcaccgacgatgcatacaagattctctaccatgagcccggaaaattcacgacgcctccgctcgagggacgcatcagcgacatgttccccgacgtgcgcgaccgcatgatccaccccgaagaccgcgatcgcttccatgcgttctgggatttcgacacgttgctcgaccgcatcgaacaagcaggcggcgcactgcgcggagagttccgcaagcacctcgaatcgggggcatggagctggacgtcgctgaccgtggcacccgtcaagcgcggcggaagcggcgagcgcgtggtcatgtgcttcatcgcggacatcgaagaagagatgcagcgacgcacggatcaggcagaacgctcgcaaatccagctattgcgcgaacgcgaccagctgaccggcctgtacaatgcggctacgttttacgacaaagccgaacgcctggtagccgacatgcccgacatcgcgtacgatgcagcgtacatcgacatcgagcacttcaaaatatacaacgagtggcatgggcgcgaagcaggcgacgccatcttgcgcgccatcgcctcgcgtatcggggagatcgcccgtaagcacggcggcatagccggctacctgggcggcgacgatttcacgctgctgctgcctcacggcctgatcgacgaaaaacgcgtggaaagcgagctgaagaaggagccgttcgattccgaggacaccatcgggttccagcccgctttcggagtgtgcgccatcgacagcccggacgtgtccgtagtcaccgcctgcgaccatgcgatgatcgccatgaactccgtcaaaggcgcctacaccaagcgcatcgcctggtacgaagccgagatgaccgaggagatggagaccgaggcgaagatcctgctcgaggtgaagcgcgcgctgacgaaccatgagttcgtgctgcactggcaaccgcaatgcaacacgcgcaccgagcgcatcgtgggcctcgaagccctcgtgcgctggcagcatccctcgcgcggcatcgtcatgccgggcgcgttcatccccgtgctcgagcgcaacaacttcatcgccagcctcgacctgtacgtgtgggaggaagcgtgccgccatatccgttcatggatcgatcgcggcggtgtgcccattcccgtatcggtgaacatctcccgggccgacctgtacgccatcgacgtggtcgaagcgctggaaggcctggtctcaagatacgacctcgaccatcgcctgctagagctcgaaatcaccgaaagcgcgtacgcagaagacgagaaaatggccgatgcggtcgcccgtctcaaaggactcggcttcaccatcctcatggacgatttcggcagcggttattcctcgctcaacatgctgaaggacatcacggtcgacatcttgaaaatcgacatgggcttcctcgctcgacaggatcagtctcaacgcagcgaaagcatccttgaggccatcgtgtccatggctcgattcatggatctgcgcatcatcgccgagggcgccgagacgaaggagcaggtggacttcctgcaaggcataggatgcgattacgcgcagggctactacttttaccgtcccatgtctaccgaggcgctcgagcaactgctgtcgcaggacggcatcgtggactaccgaggcgtgttgaaccccagcatggagctcatcgacgtgaacgcgctgctgcacgacgacatggtaagccgcgctgctgtaaacaacctgatcggcggcttagccgtgtacgccgtgtacgccgaccgtttcgagctgctgcaagtgaacaacgagtactaccacgtcaccggatgcaactcgatcgatctgcgcgaacgacagaaccggatctcgcgccaagtgcaccccgacgatctgcccctcgtgcaaagcatgttcgccgaagcgtacgagcgccccgtcacgggagctgaagccacctttcgtcggtaccgactgaacggcgagatcatgtggatgcgcatgcgcgccttcttcctgcgccgcgagcaagaccgcaccatcttcttcgcctcgctggcggacgtgaccgagcagaaacagcaggaagacgagctgcgcgagtcgcaggcggtgctcgaattggaagacgaggtcctgcatcgcatcattcagcaatcggatctgaacgtgtgggtgtacgacatcgcttccgaccgactgtcgttccagaacctctcgtcgaacggcatcgcctcccttttggccgcctcggcggacgaggaggacaccgccagcctgggcgacgacgtgagcaatgtcctgcggaggctgtcgcgcgaaacgttatggggcagacctgccgctcgcacgatcaaggtatggtcgaatacgggagagccgctgacgctgcatatagaacgcgagatcgtgccagacgcgaacggcaagcccgcccgcgtcatcggctacctggaagatcctttgaacgattcgcgggcgaaactgacgcgctcggacgacaaccggctgctcgacatcctcaagggcgccgcggtggatcactggtatatcaacgtgaacacgaagagcttcctcaactcggccgatcgccgcgcatggcgctattgggccggaatctcgctggacgactggtcgagcagcatgctcgaagaccgccttggcaaatacaccggcccaagccaggacgcagaagccatcgagaacttcctcgatttcgacgacatgctgcagcgtttcgccgacggagagcgcaacgactccctcgagtaccgactcggcgaaaacgacgatgaacgctggatggagctgagctaccgcatggtgcagctcgaggaagacggctacgtgtacgcctatctgtcggtcaccgacatcgacgaacgcaagcgccgcgagcttgacctggagaacaaggccgagcacgacgcgctgaccggcttgctgaaccgccaaagcgcatcgatgcgcatggccaacgccttggagcgcacgctgcaacgcggttaccgcggcgcgttcgccatcatcgacctcgacgacttcaagcaggtgaacgaccgctacggccacctgtcgggtgacacggtgctggccgacgtggcgcagcatttgtgcggtgcgttcaggaagggcgaccttatctgccgctggggcggcgacgagttcgtcgtgtactgcgaggacatggagcgcgacgatatcgagaggcgcctggtcgagctgtcggaaggcccttggaacgcgacgctgcccgacaaccgcgtgatcgagctgtcggtgtcgaccggcatcgccatggtgccgcaggacggcatcgcgttcaagacggtgtacgagcgcgccgatcgcgcgctgtatcgagcgaaatcgaagggcaaggcgcacttctgcttcttcgaggcggacaaggactcctaggcttatacgcccagacccaccgtcatgtgcatcatgtagaacgcgaaccgcatgacgaagatgccggccagcacgagcacggcagctcccgccgcgcgcccgaccgacagccgaacccgtcgaggccacaattcgacggcgtccaggccaatgcccgccatgccaagcacgccgaacgcgcataccatcaaaccatacgagggcaccagttccgccgccgtaagatacgagttctcgatcgaggccaaatccgcaccctgcacgccgaacgtcaccacgttcacggccaacgccgcagcggccaccatcgtcagcacgcgtcccatacggccttcaaccggctcgtaacccgcggcgcgcagccccgcgatggcgagtatggggccgcccaccagcgcgttcagcatcaaattgagcggcacgtacaccgtgtgccacgacactatggtgtcggcggcataggcgcagcccaccgcagccacgaacaccgcgcccgccagcatggccagaacgagccacgctcgctgtaactgcggtttgggatgctcgacgaagttgtacagccaatacaatccggccagcgccagaaacaccaccgcacagaacacctcggtggacaaggggctgcgtcccaccccaaggaacacgtacagcgcgttagcggggttgcccaggtgggtggccgaggcgacgagacccaccatggcaaccacgaggggcaaccccaagaacacgttgagccgctgacgcagggcaacggacgcgccgcgccccagcacgggaagccccatgcagatgaacgcaaccacgcccgacggtgccaacgtcgtgaacagcacgagcgtaatctcgccgagcgcggtatcgaatcctgaaatcatgcaggctatcctagcggtagaacctcgggtagacgacgtccaggcccaactcggcctgaatgccttcgagcgaagccttcgtgagacgcgcgagaccttcatagaagggctggccggccgcctcgatcagctggtcgaggaagtgcgacgaccaggtgagcagatgcagccgcagaaactcgcctagatcctgcggctggttgcgcgcgatccaggccatgagcaccagcatgaggcccacatgatcctcgggcgtcttgtcgtccgtctgacgcgcgatgccgtgagagcgcatccacgcgcgcagctccaacgtggtcgcaccgaacacgacgcattcgcgatccgtgtacaccgagccccaaggcggcgcgggcttcggcgcgggaccgatgaacaggcggcggtattcccacaccaggccgtcggcgtcgatgccttccgccaaccccgagcgcatgagatcgaggtcgcaccgcgcctcggcttcgtcgacgaacggccactccacggcggcctgcgcaacgtcgatcgcggccatggccgcgaaggccgggccggcatcgcccttcaccgggtcttgcaggtagaacggccccagcgtctcgccgacgaacgcgatggcctcgcgcacatcctcggacagcggcacggttgcttcttcgctcattccatgatctccttatcggttgcccgaaatccaacttccaacaggttcgccacgacgccgtccttcgattccgcaggacgggcatcggcggacggtttgacgaacaggttcggcacggtcgcctcgggccggggaaacggcgcgatggccgcgcgctcgccgagcttctccatatcgccgaccggcccgaagtccagcgcgcgagccgggcaggcctcgacgcacaccggcttctcgcccacggccacgcgttcgatacagccgtcgcacttcaccgagtgcccctttacgcgatcgacgcgcggagcgctatacgggcacgacagatgacagtatccgcagccgatgcagtgccggtcgttgacgctgaccagcccggtctgctcgtctttgtgcatggcctcggtgggacacacgcgcacgcacaccggatcgtcgcaatggttgcacgccaccgacacgttgtacgagaagcaggtggagccgaaggtgccgtcgccgttgcgaaccgtatcgcctcccgtgtattcgagcacgcggcggtaggcggtgccgacgtcgaggtcgtaggcgtctttgcaggcgaacatgcacgttttgcaccctgagcaacgcgttccatcgaagaaaaaagcctgctgggacatgtggcgacctcctctcgtcaacacggaaccgcaagcgctccccctatcccaaaaagcggggtacgctgtattttagcgtaccccgccaagacgtgcgcctcgcgccgcagattgccacgagcccctcacggagggaagaggggccgtggcgtcgtacgcgaacagtcctgctacgcgacctcgagcgggttggcgatttccgccgcgcccaccggctgagcgtccgcggatgccttgataaagatgttcggggtggtttcggacgggtcgggaagcggagcgatgttgccgcgctcgcccatcttcgccatctcctcggccgtgccgaagtccagggcgcgggccgggcaggcctccacgcacaccggcttctcgcccgcggccacgcgctcggcgcagccgttgcagcgcacggccttcttcttctcctcgtccaccttcggcgcgttgtacgggcacacgatggcgcacgtgccgcagccgatgcacttctcctcgtcgatggacatgaggcccgtgtcggcgtccttgatgatggcgctctgcgggcacttctcgaagcagatcggcgaatcgcagtggttgcacgacatggacagcggatagctgacgcacgtggtggtcaggatgccgtcggcgtccttcacggtgtcgccgatggtcacctcgtacacgtggcggaacgagatgcccagatcgatgttcttgtaatccttgcacgccatctggcaggtcttgcacccggtgcagcgcgtgccgtcaaagtagaatgcctgttgagacatggtatatcaccctttctgcggctcgtcgccctacgccttggtaacctggcagatgttgctgtgctgagggttgcccttcgccagcggagacgggcgatgggtcgtcagcgtgttgatgcagccgcccttgtcgacgcgatcgccgtacatgtcggcgtcgtgccatgcgccctgcgagatgcacaccgtgccgggaaccacgcgcggcgtgaccttcgccagcagctcgatttcgccgaacgcgttcttcacgcggatcttgtcgccctgcttgatgctgcgctccttcgcgtcggcggggttgatccacgcctcctgcgggttgacttccttgagcagctcaatgccgccccaagaggagtgcgtgcgaccgcgatagtggaagccgctgcaacgcaaggggaactcgtcggtgggcacgtcggtctcggtgaagccgtgcgtgtacaccgggatgggcgaaatgagatcttcctcgccaagctcccaggtggcggcgatgccggccagcgtctcggagtagatctcgatcttgccggtaggggtgtccagcgggttggccgccggatcgttgcggaacgcctcgaacgcgatggtcgcgcccttcgggttcttgcgcgtgtagacgcccatctccatggcctcgtcgtacgtcggcagctcggtgtccttctcgcgcgtcttctcgtagagctccttgatccactcttcctgcgtcttgccctcggtgaactgctccttcacgcccatcttgtcggcgatgagggtcagggcatcgtagagggtcttgcgctcgaacttcggcgtggtgcacggctggccgctgatcatgtacgcgttgtcgccgccggtgccgatctgcgacacctgctcgaagcggaacaggtcgggcagcaggatgtcggcgtatttggcggagtccgtcatggccgtctcccacaccacgatgaactcgcacttgctctcgtcggcaaggatgtcgtgcgcgtagttgatgtcgccatgctggttcgtcaggcagttgccggcgtagttcagcatgcacttgatgttctggttgagcttgtcggcgcccgtcacggcggagttgagcgccgtcatctcggtgccatggtcgatggcctcggtgaacaggaacacggggatcttcgccttgatggggttgtcaccggccggcagggactgcaggctgatggagtacgaaccctcgcggcagccgttgctcgtgcccggcagaccgacctggccggtcagcagcggcagcatcatgatggaccagcagttcagctcgccgttgctgcggcgctgcgggccccagccctgcacgacgtacagcggcttggcagcgccgatctcggccgccagctccttgatgcggtcggcggagatgccgcagatgggggcggcccactcgggggtcttctccaccatgtcgtagccggtgcccatgatgtagtccttgtaggacttgctctggcccttggcgctctcgggcatggtgtcctcgtcgtagccgacgcagtaggtgtccaggaactccttgtccaccaggtcgttcgcgatcagctcgtgcgcgatggcggagcagagcgcggcgtcggtgccggggttgatgggctgccactcggcggaacggcccatgacggaatcgttcatgcgggggtcgatgtagatcatcttgcccttcgtggtttcgcgcagatgcacccagtcgtagtgcgacacggcgccgccctggcgcgtctcggtcgggctcgtgccgaacgcgaggatgagcgcggcgtcctcggcggcgttgagcgtgctgccgctgaagcccgatgcgccgtaggtgtgaggcacgatcatttccatctgcatggcgctgtagtcgccgtacgatcccaggcaaccgccgatgcagttcatgaaacgcggcagcgagcgagccgtcgtggagctcacgcccgtcgcgtaggggatgtacacggactcgttgccgtactcgtcgatgatgcgcttgagctcgctggcgatcgtgtcaacggcctcgtcccacgagatttgctcgaacttgccttcgccgcgcttgccgacgcgcttcatggggtagttgatgcggtcggggttcgcgagccagcggcggtacgtacgaccgcgcaggcaggcgcgaggctgcacctcgtcgaagccggcgtccttgctcgtgtaggtttccacccaggcgacctcgtcgtcctgcacgtggaacttcaggctgcaacggccgggacagttgatggcgcagtggccccacgtcgtggtctcctcgacggcctgcgtcgcagcggcgtcgccgcccttcgcgccgtcggcgctcggcgagcagccgaacagcgacacggcacccgtgcccatcgcagccgcacccaggccggccagcgccgagcccttcatgaacgtgcggcgagacacctgagcattctccaacatgttcgtcatggtccctccctctttcactctctcgtcctgtgctccgcttcccaggcggaacgcttcgcattgtggcactcccccgcgaccgccgtgtcacataaaatatgcgaacttatcgtttccccaggtcacaagacagcactttgggtaatgcgtcgcacgatacttctgacaataccgttatactgatgcaacgggaacagtgtgcgggaacggaaaaaccgcatatgcgcgcggtctcgggggaggatctttgaacgcagccaccatcgtcagcatcatgaagccgaacatcacctcgctcggctacggcttgttcttggccatcaacgccgcgggcgtatggggcggcgtgttcccgtttcttccgatggagttccaaaccaccgagatcgtgttctggttcttcctcgcgcaatcgctcgtgttctcgttcagctacttcgccagcgccctgggatcgtacttcttccccggccccacgcgcacattcatcgtacggctggccaccatgccctaccttttgggatggtgctgcctcatcgcggccatctatctggacgcatgggcgctgccgctcgtcgtcagcggcggcgcgctcctgggcctggggtcggccggtttctacatgctgtggcaacgcctgttcgccagccaggattccgacaccggcaaccgcgacctcatcaagggtaccctatacgcggcggtgctgtacttctcgctgtaccttattccgcaagcggtgacggcgtttctcatcccgctcgtgttcctgccgctattcgggttgaccattgtgctgaaaagccgcgagatcgacctcgatcaagccatgttccaggacgtgccgcgcgaccatccgctcgtgtaccagcgcctggtgaacgactactggcgaagcgcgctatgcgtgggcgcgctggggttctgcacgggcatcatgcgctccctggccatcggcgagccggcggtgggatcactcgtgaacgtgctgtcgatgggcggatcgttgaccgcggctatatcgctgctggtgctgtggcagttcaagaacctcagcgtgaacgtggtgggcgcctaccgcgtcttcttcccgttcgtcatcacctcgtttctgctgctgccgtttctgcccgaggagtacgcgcgctggctggccggcggcctgtacgccgtgtacagcgtggctatcatgctcatgatgattcaatgcgcgcaagcttcgcgcgaccgcggcatcaaccccgtgttcatctacgggttcttcggcggcatcgtgtacgcgctgcacgacgtgggcttcatcggcggcacgttcgccgagcagaccatgatcatcggcatcgcgccgctcgccgtggtggcgctcgtggccgtgtacctgctggggctcatgtacttcatcggacagggcgggttccgccgcatcttcaaacacgacagcgatgccgcggccagcatcgagctggtcgccctacgcgcgcatgcgcccgagaagaagcctgcaggggcgaacgcggagggcgaaaagcccgacgacgcggtgccgaagaaggcgggcaagcgcggcgatcggccgcctcgcgcgagccgcaagccgcagcgcgaacgcaagcgcgaggagcgcgtgtacctcgaccgcatctcgaagcaggcggcgctgttgcagcagcattaccgtctgagcgagcgcgagacggaggtcatggagctcatcgcgcgcggcaacaccgtggcgcgcatcgccgaggatctcgtggtcaccgagaacaccatccgcacgcactcgaagcgcatctacgcgaagctggacatccacaagaagcaggagctgctcgacctcatcgagtccttcgaccccaacgacttgcaggaatagaaacgctgcagtgcgcggaagcccgcttcgagaccctttgcctaaggtcgcgcgcgaccccgattgttgtacatcgattctccttgcggagcacggccgtttttgtataataagggcgagccgcagggagcgctaactccccacggctctcggatcgcttcggcggtttgggtttactgtgagcgctcctttcccttgcgggtttggagcgcgtctcttatcatcaggaaaatctcgatgattcgggacatcagcctcataagcacttcagccaacaccagcaaatccaaaacggtcatggtcatcacctccgttcatctagaatatgagagggagaggcaccaagccgccggaccgaatccgtatctataagtatagcgagcccgttccacgtttccatggcacgcatcaccatggaaaaccttcccgaccttgcccttttccaacgccgctcccacgcaaattccacgcgccttgccatcgtttccaacgcggattccacgcgccttgcacgcggttccaacgccgtttccacgcagcgggacgaacgcgcgaaaacgcaccgggcgagctctcgcgacgtaatcaagaccgtccctcagcaaagtctcacctgatcgcatgctatacttcttgccatctgggttcgccgcacgtttccctgatcggagctgccatgaacgctgcatcgcatgtcgaatcgccaatatccggacggaagctgtgcgcgttcgcactcgccgcggcgcttgcactcatggcgggagcacagttcgctcccgcgcattacgcctgggctgaagacgagccagcggcaacggctcaggcggatgcgactctccctgacgcggccccactcgaggaagccccgcccgaggtggcagccttggcgcccatagagaatgcgccgcacctcgacctgaaggacggttccatcctcttgaaggactccggctcgaacctccaatacagccaggacaacgaggcaacgtggacgtcctattccggcaacgtgacgatcggtggaacggcaggcagcggcacgaacgtgcaagtgctcaacggaacccatacgatacttctcaacggcgttaccatcaacgagccgcgcgccaatcacgcggcgattgaaatcggcagcgacacgcaggctgcgcagcttacgctctggctgtatggctcgaacaagctttccggttcgagcgggtatcccgcaattttcgcacctggtaaggctcatctgattttcaaaggcgatctctacggcagtctggaagcgcagggaggatacgaggctcccgccatcggtgcggacagcgcggtttcaagttgcggcaccatcgagttttggcaacccggcaacgtaaccgcgcgaagcggcaacggcgcccctgccctcggcgacccgacctcgagcgctgtggatgcaacggggtcggtgtctttcttttcgggaacggtgaccttgcagtcctcaggcacttgcgacattaccgcgaaaagcatcgtcaccggcggcggcaacattcacctctcgcagcgcccgcccgccaacacgacgctcgccgtcgatcagggcggctccttccccagttccgcgtatgttctggtgtcgggcttggcggcaggtgagaatctgctcggagccagttttggtgagaaaagccctgtctttgtcagaggcgatcggtgggtggatgccaagcattacatcgtagacggcttcgccacttggatggacgacggcgatctgggactttttctcgacagaaacctgcttaaggacggcagctccgtcaagatgagctttagcgaatccggcaacgtatacgaaggcacgatcaagggttctgccgaagccggatacacgcttcatctggccattcccgacccgcctgttgaaaaccccgtcgtcagcatgcacgaaaaaaagggctgcaagctcatcgtcgatgtgagttcggagggcattccgcagtacaccctcgacgggggagtgagttggacgcgctacagcgggtacctggctgtcacgggagccgcagattttacctccttccccgtaagcaatcaggtgatcgtgaggaaaggtactcacgcgctgcgctttcaggatctgagcggcgttgcggcttcaatcgaggaatcctcgaacgtgacgctcacgctggtgggaagtaattacatatgcggccacagattggaggcgtcgccgggggtggcggttcgaggcacctcgtctcttaccatcaacggcaagggaaccttgaatgccgtgggagcaggcacaggtcgtcagccttgcatcctgggagagccgaacacgaccatctcgatagcgggcggcacggttctcgctcattcgggagtaacgggcggtaatggcattactgcaggaaagctcgttgtttccggaggcactgtcgaagcgctcagtcagtcgagtggaagcgcagcgatcacggcgagcaagtccatcaccatcagcggcgggtcggttaccgccaaaggctccaagttcgtcgctggcatcgggtcggaccattacggctcgtgcggctccatcaccatcagcggcggcatagtgaacgcgcacggcggcgacctgtctgcagccataggttgcagtgtcggcgactcgtgcggggaaatcaagatcagcgggggcaccatcaacgccgtcggcggtccgggcacttatggagccggtcgggtcgcggctatcaccagctccgtcaaggcgcccgtcatcaccggcggaacggtcaaatgcaacgaggcggtttcaacgagggcggcgtctttggcgtcggcatcagcttcgccgactccggcagcgttgaacctcctgctcgcctcccccgtcgcgctcgcgtccgacctggacgaggaagcaacgtctcttgcctccgaggacgagcagcgcttcgtcaacgaaaacaacgacgacctctcgcttgtaacgatacacgggcttccggcgaacacgcccatctcctccttgcagatgcgtctgctcgacacggaattcgtggaagagccgaccggcggcagcacctacggcatgcgcgacgtccagaccgacgaccaaggagcgctctacctgcacctcacgccgctcgaggcgacggacaagctggtcgtcgcctcgtggaacggccgcgattacagcgggctgagcgagaggaacctggacggaaccttcgccatcgcactcgcccccaccgaggccgccgtgtactaccagtggcacagcttcgaggacggctgggcctacgaggacgccggcgtcgattggagcatcgacgggcagacgagcggaaacgccgccggccacgacgtgaccgcgctgcgcatcgagacgtccatcggcggcttgaacgtttcctacgcggtcgacaacggaagcgggtggagcccggcggttgagaacggcgacatcgcgggcgagatggagcagcccgtgcaggcgctgcgcgtcagcctgtcgggcgacgaggctgcgcgctacaccgtctactaccgcctgtacgtgaaaggcgtcggctggatggcttgggcgcatgacggcaccgccaacggcacgtcgggatacggctaccccgtcaaggcgttccaggtggcgatacttcctgcgggagcgacgcccacgaccggcgaggccagcgcgaccgagtacgcgtacctggtgaaagacggccaaagccagccggggctcatcggcgagaagccttccgccgggcatgaggaacgcgaggctgcgccccctgcgaaggcgctcgcctctaccggcgacagcccggctttcgccatcgccctgggcgcagccctcgcaagcggcgcgctggttcttgcgtcgcgcgcccgtcatcgcaggtcgctgtcctgatcggagctcctgccgctcgcgcgagacaccgcgcccgcagagggagcatcgcctctgcgggcgcggcagggcttccgggcgcaagcggcgcgacgagcgtcacaggtcgccgtcttcgggcacgacgatgcagtcggtagtcgttcggccgttcttcatggagacggtcacgggcttgcccggcaccgtgttcgaggccgccgccaaacgctccatgctcgtaccgcctttgcatcagaggagccaccccacctgcacggcgctgggaagccgatgtagaagatggttccatgttaccacatgattacaccgtttcggacgcgccgagccaaggccgcgcgcaaggcgaaagcgtgggaaagagacgaaggaacggggagatctccctcccgccatcctcgcccggctccggaatgcgcgtttttcacctgtctgttgcgtcccgatcgttgcgcaacgatcctcttggcggagcacggtcgtttttgtataataagggcgagccgcagggaggtggtgctccccacggctctcggatcgcttcggcggtttgggtttacttgtggcgctcctttcccctacgggttaggagcgcgctccttatcaccagaaacagctcgatgacgcgggtagcgaactccaagagcaaaatcgccaacgaagcaatccccaaaacggtcatggtcttcacctccatccttctagaataatgagagggcgaggcaccaagccgccggatcgaatccgtgcttctcagtatagcgacgcggtctcacgtttcgtttgcgcagatccaacgcgcgttgccgccaaatcaagcgcgtttcccacgtcgttccaacgcggattccacgcgccttgccgccgtttccaacgtcgtttccacgcgtgtcacatcccaatccagcgccgatcaaacgccgaagcagcggacaacatgcggtcgaagggctagcgcgagcgaagggtcgccgccgacgcccgatgaggcgaaatttcgtttccgagggtaaaactgagccggtttggcaatttcgagagcgcgatttcagcccggttggcacctatcttgggctgaaatgtcaggcgtgctttcaaaatgcctgatcagcgcgatgtgctatttaatgattatatcgatcataattgccaaactgacttgtttttaccgctccgcgggacaatttgcatcaccagcgcgcctgcccccttcgcgcgcccccaccgccactgcgcgtgccgccgcgcgacacgcgccgccacgcgacaagctcaggcgtgcgacaaaaacaaaaaagccgccgacggcctttccggcgtcggcggcttgaaggtcctcgagggccgaagcctctacacctgcagcgcgtagaacatgaggcgcgccacgaagatgccgatgagcacggccgcgttgccggccacgagcagcgggatggccgaacggacgcccacgggagcatcagcatcgacgtcctcgcgatcgcgcagcgggatggccgccgcagcacccgccgtccttcccatcgccgccacattgtggccgccgggcatgagcgtggcgcgcagagtcgccagcataacaacgaaccccacgatggatatcacgaggtacacccacgaaccgggaagcacgtcggagcccggaaagaacgcgttgaacgtggactgggcgaacagcagctgcgcgctgacggcgacgatggccgccaccacgccgataaaggccgtgaacagcgctaccgttggcaaccgcgtcaagcgcgcttcgggcatcccacccgcgagagcgacgaccagcacgccgagcggcacgccgcctgcgatgcagaacccgatgatgccgagcggcacgagcggagagttccaggtgagcaccgcggagcccatgtacatcaccccgatgctgagcgacagcagcagcgaagccgcgcccactacggtggcgaacaccttgcgcggacgctcgtccagattgcccgtcatcgcgatgatccagtacaccacggccagcgcgatgaatagcatgccggcgatgcccacgaaggacaacggcgcgatgtcgacgccttggaacaagctcatcgaatactgcggcgacgagagcgccacgaacgacgcgatgtagcccacggcgaggatcgccatcggaagcagcgtccagcggtcgatgcgggcgaggcactccttgctgaaacgcgaggtcagaaacgccagcgccaggccgacgaacgcgcccgaagccatcggcacgagcgtggtgaacagaaccatcggcatttgaagcaatgcgagatccatacgatttcacctcctcaggattcacgatgaatcccctagctgtcatataaacagccctcatcctaggagcgcgaacaggcagggcagctgacccgccgccccgtttgagaaggtgttgcccgatcgtgacttcgatgtcagcgcgtcgcccccacccctgcaaggcaagctggtaccgtagatgcttcgacgaaaggagggccgccatgacccgtatccaaagaggctgggcggtggccgccgtgctggccggcgccctgttcgcctgcacgatcgccctgttcctcggtggcacgatgccgcttgcgcccgcggcggcgctcgcgctcatcgcctgcgccctcttcgtgacggccgcccgccaagcccgccgcccctagaaggcgggcggtacgctaacgcaggtcgaacacgtctttaatgctgtaaacgcccgcgggctttccttggagatacgcggcgcagtccacggcgccgcgggcgaagcagtcgtcgccgtaggagtagtgggtgatctccaaacgctcgcccatgcctccgaagtacaccttgtggtcgctcgtgatatcgccggcgcgcagcgaatggaagcccacgccgcccagcttgcacgcgccgcggccctcgcggccgtactcggccagctcgtcgagcgtggtgcccttgagctccgcgatcatgttgccgatgatgacggcggtgccgctgggcgcatccagcttatcgcggtcgtgctggtcgatgatctcgatatccgtctcgtccacgagcgcccgcgccgcgatctccaccaacttcagcatcacgttcaccatcttcgaggtgttgcatttgaagatgatcgggatgtgccggccggccgcttcgaatcgttcgaactgttcgggcgagaaccccgtgctggccgtgacgagagctttcccatgcgccacggccaagtcgagcgtttcgaggcactgctccacgctggaaacgtcgatgagcgcgtcgcacgcgtcgatgacggacgagaggtcgtccgccacggggatgcccagatcgcgtccgaggcccaccacctggccgaggtcgcggccgatgtagtcgcgtcccgcagggcccacgcctcccaccagctccataccctcgcgctcggcgacgaatcggctgacgggctgccccatctgcccgaggcatccgacgacgatcaccttcatgacgttctcccttctcgacgcgcaccgatgcggttgatgctgccagtataagccccggcgctactcggcgctcggctcttcctcgccgaacagcacatcgaacaggtagcgggtgatggtggcgcggcgcaccatgccgatgagcctgccgtcctcgtcgatgaccggcaccttcttgaacctcttcttcgccagcacgtcggcgatctcgccgatggtctggtcggccgtggcgcacagcacccgctgcacggccagctccatgacgttgcggcgcttgagcgcgcgggccttctcctcgaaggactcgttgtcgtacagcaccatgttggagtacccgccgccgaagatggagcgcgtcttctgcgcggcgaccgccttcatgatgtcgccgtcgctgataaatcccaccacatggcgatcctcgtcgatcaccacgagcccgctcgtgcccagttcgttgaacagggccacgacctcgccgaggtcctggtcgtagcggcacgtgtacgcgtcccgctccatgatgtcgccgatcgtccgattcatcgtgcagctccttcccgagcttcttccatttcgatctcaagcggcgcttcggcctgggatgcgggcgaggcgaccgcttgcttcttgacgttgcgcaccttcaagacggcgatgaccagagcgatgccggccacggccgcggagatgccgtacgccacgtcgatgcccgccgccgtggacagcaccgggccggcttcggcgttcgccgcggtcaccatggtcatcaccgtcacgatgagggcggtgctcaccgcgccgcccacctggcgccccgtgttgctgatggcgttgccgtgcgcgatcatgtcgttcggcagcgcgttgatgccccaggtggtgaccggcatgttcgccagcgtcagaccggaggactggatgacgtagaacgctacgaggtactcgaccatcgtcttgtcgtcgacgaaggacagcgccgccagcgaagcggtgagccccgtcaagcccacgatggctatgacgcgcggcccgaaccggtcgaacagcataccgctgaccgggctcaggaagatggtggccaccgcaccgggcgtcatgaggatgccggtttcgaacgctgtcagtcccagcacgttctgcaggtagatgggcaggatgacgctgcccacggccagcgccgagttgaccaccgtcacgatgacggccgagtacgcgaacgtgggcgttttgagagcccgcagctgcagcagcggctcctcgatatgcagctggcgatggatgaaccacgcgagcgcgaccacgcccacgacgatgctgtcgacgaccacggcgttgccccagcccagcgtgcttgcactggagaaaccgtacagcaggccgccgaacgcgaacgtggacaggacgatggacggcacgtcgaggtgcgggcgcttgagctcccccacgttcgtaagcaggaagaagctcaccgccagcacgaggatggccagcgggatcatcgcccagaacatcatgcgccagccccacgcgtcgatgatgcccccggccagcaccggaccggccgccggcgcgcagctcatcacgatgccggccatgcccatggccgtgccgcgcttctcgggcgggaagatgagcatgggaaccacgcccacgagcggcagctgcacgcccgcgccggccgcctgcagcacgcggcctacgatgagcagctcgaacgtctgagcccccgcgcacagcgccgtgcccacgatgaacgagatcagcgagacgaagaagagcttgcgcgtggagaagcggtcgatgaggaacccggtgatgggcaccatgataccgttgaccagcatgtagatggacgtcacccactgcgcggtgccggccgagatggagaacgcgtccatcagcttcggcagcgcgggcgacaggacggtctggttcaggatggcaaggaacgcacctgccagcacgatgccgatgacggtgatttccttgcgagttactttgtgctgttcagcaaccaattgttgttcgttcaagagcgcatcgacttcctttgcggacgcgtcgacgaccgagccgataccctcgctcgcgcgcaggaaggcgcacgaagagaacggccggcgatcgatcggggaatatgaatgaggaaagcgaaaacgcggaggccgtcgaacaaggccgtccgcttacgagagtccgctcatcgatggccttgccacacgccggggcccacttcgcccggcgcgcggaacgcagccgtgcgcgaacgtcgccgcgaaagctggcgaaggctggtgtagcgctcgaatatgtatagaagcgatttcacagcgggcaagtatagcggaagccggaacccccgtatcttcgagaaagtggcccgctccaagcgaaattcacaaaccagctcgcgcccagcgcgcggcagccgcgcccttcctcatagcgcatcccctccacggcggcggcagaggttctggggaaccgaacgtcgcacgccgcgccgaccgcacgccgcacccatcacgaatcggcgcggggaagatcgctggaccgcatggccttccccgcgccctagagtgcgccgaattcctacgccttccgcacgtccacccagaggtcgaactgggcggcgccgcctccgataggatcggtcacgccgcctcctccggcaagcgtctcctcgggcagcagctcgttcatacagaagccgcgcccccgcccgccggcgaaaccggtcttctgcttgccgggctcgtcgccgtcgaggatgccctcttcttcaaggtaatcgggagccggacccatcaacatgccgtcgatggtgaccgcgcgcgcggcgtagccctgctggccgaacgagtagttggcccccaccacgccgggacgaatgccctcggtcacgcgcacgtgaccggaaagcgtgccttcaggccccacgacctccacgacatcgccgttcttcaagccgcgctcggcagcgtcggacggcgacatccatacgaagttctcggtggtcgtctcgcgcaaccatgacgcggcgatggtgcggtgcgtgccgttcgtgcgcgctttccagttgatgaacgcgaacggtcggtcggccggccgcgccatcggcgtgccgtcggcgaaggcgatcggcgccgtatgggccaatccgtcgaagttctcaccggtcaacgcgtctttcagcgaagccgtcttcgggtcgtagaacgcgcacaagccagcgtacttcgtcttgatcagatctccgtcgtaaccgtcgcccttcgcagggtcggccgacgcgaaccgcccgccgcggttcagcacgtacaccaccttcggccattcctcttcggtgacggcggctttccacgcctccagatcgaacgcctcgcccagcgcgcgcttgcgggcgcgctcgaacagggcgagctcgtcgtcgtcggcgtccggcaccggcttctcgccggcgtaggcgatgttcgcggccatcttcaaccagtagtcgtactcggtcgaaagggccgccgtgccgccgtcgccgtccttgcccaccggcacggcatgctcgccgacgcccggcagcccgaggcgttgcatgatgtcgaagtacacgtcctccaccgagcgcgggccgtcgaaggcgcgcaccgccggctgccccagctggatgagctggtactgctggttcggatagatggattcctggctgaagcgctcgaggtacaccttgtccggtaacacgaagtcggcaaagcgcgacgtgtcgcctatctccacgtcgaacgacaccagcaggttgatcttgtcctggtcgcccagcacgtcggccagtcgccgcccgccgggcgtggagtccaccagcgaatggcgatggatgaacagcgcgcccaaatgatcgtacacgtagcccgcgcgcaaggtgggcacgatctcgtgcgacaggttgcccggcagcgggtaccacggacgcggcgccggatagccgtcctgcttgaagtagctggtcttctcgtactcggtcttctggcgcgtgatgggaatgccccatccggcatgcgcgtccggcacggtcttcaagtcgtagcggccctcgaacggcgcgaacttcgccgcggcggcgatgtgaccgcccttccaatcgtggttgccgatgaggaagttgagataccccacggcgcgcaccgcatcgaagccgttggcgtgcatagccgggccgcggtagctcatgacgcaggcacgtttgccgtgcgacgtgaactcgcgcgccacctcttccaccacggagggctcgatgcccgcatcggcggcgtactcctccagcgttcgctcctcgacgcgctctttcaaaagctggaacacgctcttcacgcgcgcaggctttcccttgatgtcgatctctgcgtccactagcagatcggcggcgccctcggcggcatcggcgagagtcagctcgccgtccaccagcacgaagcgcgcgtcgtcggccagcgcctcgccgttcgcgccgacctcgcccgcgcgccccagcgccttggccgtgacgatgggccggttcggcaggtcgacggccacgaggtgcgtcgcatcggaccaggtgggctcgcccagcgccgcggctgccttcttcgaaggcgccgacaggtaggccgcatcgtagcgctcgttcgcgatgatccacgacatcatggcgaacgccagctcggcgtccttgccgggaatcacgggcagccacacgtcggccttcgaggcgctacgcccctggcgcgggtcgaccacgtacagcttcatgccgcgctcgcgcgccaccgacaggcgcggagccagccacgacggacccttg

SEQ ID NO: 9736 - DNA, 4601 bp, Unknown
  gut microbiota DNA sequence
cgcgctgcgcccttggcgcggatcgaccacgtacagcttcatgccgcgctcgcgcgccaccgacaggcgcggagccagccacgacggacccttgttcgccgtcatgggctcggtgccccagatgataaggcattcgcaatggtcgatgtcggcgtacatgcgcttatggttcgtcgtggggtgcgtgcgcacgttggccatgacgcccgtcatgccgcacacgccgccgtggttgaagttgttgaccgagccgaaccccagctgcgtcaagcggtctccgacgaggaacatgcggtcgccgccggccgagcagaacaggttggacttggggccgaggtcgggatgctccacgtcgatcagcttgtcggcccatttcgccgcgaaggcgtccttggtcatctcgcccgactccacaagcgcgacatcggcctccacctgcttcttcggcgcgtaggcgtaccattcggcgatgcccggcgtgcccagcgcgggcgacccgttcacgatctcgtcgagggccgtgtcccagctgaccgtctcccactcgtccgacccgcgctcccccacgcggcgcaaaggctgcgtgatgcggaaccggtcgtgcacgagctgaatgcccgcctggcccttgaggcagatcatgcccccgttcgaagcgcgaccggccacggccatgtcgtcgccgggggcgagcgcttcctcgggccgcgtagcgtaggggatcggcgcgtagggctgcgagttgagcggcgagtacggattgcccgcgatcttgcgcaccagcgcggtggcgccgtcgttcgcctgcttgccgtcggccgcatcggtcacgcgcaccttgatggtgcagtagctgttgcagttgttgcacatggacaggatgacgtcgtcggccgcgcacgcgccggtggcgttgccgcgcccgtgaggctcgtcggtcagcgggtcatcagcggccatgtacgcgcccagcccgcctccggcgaccaaggcgcctgcggcgaccgcgcaaccggcgccgaccacggcgcgccgcgaaggcgttccgaacaagctcgaacgctgaggctcgcttgcggcatcgcatcgccgtccgtctttatgctgcgcctccatcgcgcacctccttgcccgtcgaaaccccgccgcacgacacggcggccgaacctgcgccctcgtaggagctttccaaccgcgcctcgccctcgctcgcgctcctgcgttcgagcggcagcaggcgcacagccagtccgtagcagccgacggccaatcccagaacgaacagcgtcaccatcgcctcgcccaaagtgggcacgtacgcaggcaggggcatgccgcccagaagcggaaccgagaaccctgccaccaccagcacgtagcgcagcgccaggatgcccgccatggcggagacggcagcagcgaccgtccaagcgccgccggccgcgcagcgcgaacgaaacgcccccacggccaacagcgccgcgggcaccgccagtcccaggccgatctcgccgatccagaacagcggcgccaaagaacccgacaccatcacgcccacggccgtcgccgacgccggatcgcccgacagcaacggcggggcgatctggaagaacacgcagaacgccagcgcgaacagcgacgccgccagcacgcggttcagacccacgagcgcgctaccgtccggccgcgccccgcgcagccgcgcgagcagccgatatgcgacgatcaggaacgcggcagccgtcaccacggccatgacgtagaacagcaccgacgtgatgccgccctcccacagcccgcgcgtcttcaccgcagcgaagaacatgcccgtaccgcccggagggcccacgaacgacgtggccacgcccaccccggccagcacgcggatggccaggttcacgttgccgcgccgccgaagcgattccatgctgggctcgccagcagcctcggcagctcgcttgtcgttcagcagcacgagcacgaactgtgcgacggccacgaccatgaagaacatatacgccttgatctcccaggccaacggcgacgaccaatggaagaacagcagcgttcccagcgaatgccggatggcgcccaggtcgatgccgatgaatatcatcgacacgacaagcgacaccacgctcaaacccagcgccatgcgcgcgacgggcgcgaagcggggaatcctcagcaggtagaccagcgccgaaaggaggtacaagccgcccgccaaaccggagaaccagatgtagacgaccacccacaagccccagggcacggaattcgtggctcccgccatgcccagtccgttcgccaagcggtcgtacatgaagtacgcgcccgcaaccagcagcacggctacgatcaccgcccacacgatggtagcacggcgcgagaacggtgccggcagccagcgcctgcgcttcgtttcagatgccatagatgctcacctcgctcatttcagatagtagacggacgggttcgtgcccagctcctcgcgcaggcggaacgcccgcggcgaagcggccagctgcgccaccttcgacgacggatcgttcagatcgccgaagtagcgcgcgtcgccgatgcacgtctcgcagcacgcgggcgcctcgccctcggcgatgcggtgcgcgcagaacgtgcacttgcgcacggtgccgtacgtgccccggtacttcccgcgcgcgccgtggtccacgccgtactcgggcgccgtcacctgatcggccgcctgcatctcgactgcgtacgacgaaccctcgtcggccgagcgcgcgccgtacgggcacgcggcgatgcagtatttgcagcctatgcaacggtcggcgtcgatgaccacgatgccgtcatcgccgcggtacgtcgcgctcaccgggcataccgacacgcaggcggggttctcgcactgcatgcagggacgggggatcgcctcgatacgcacgttgggatacgcgcccgtctcctgttccagcaccacgttgtacgtgacgcccggaggcgtgcggttctcggccttgcacgccacggtgcacgaatcgcacccgacgcacttcgcaagatcgatgaccatgccccaatgcggaacgtgggattcttccatagatgccacctcgattcgtcggaatacagacgggcgctgcgcggagggggagtgcgcagcgcccatgaaagaggaaaagcggccggaagagaaagggagggggaatccggccgccagcgccccgccagggggtgggcggggcgcacgggtgagctagaggaacagcacgggcagggcggccaaaatcaccagcaggcgcagcatgaagccgcccaccagcacgccggcctcgccgatgacgctgaccaccatcgaggtcgtcgacgtttccacgcgcttggcgatgaacaccgggtagccctcgataaggaacggcgcgacaagacccagaaggacgatgccgccccagaacgccggagcgtactgcccggccacgagcgagtagaccgacgcggcgccttcgaagctgccggcgctcacgatgatcagcatcgtggccagcacgaccatttcaacggcggacaggatgacgtggctcttcttgatcagccacatctgctcgaagcgctcgcgatccacgatcagccccacgagcgacgtggcagcgaggcccgccgacagcgccgacaccacgaacaggatgggcaatatggcgttgttccacagcgggtacgccttgaccacgcccagcaggaagccggtgtaggccgccacggcgaacgccgcgacgatgcctatccacgtgagccacttcggcacgcgcttcttgagtatctcgagaacggccacggcaagcgccaccggcatgtacacgcagatgaagtacacgcccagcgtcatcacggaaccggggttcgagatgagccagaagaagcgcagcgggttgtgcagaccggcttcggcgtccaacatgagcatgagcaggccgatgccgacgaagatgggagcgatgatgcggccagcgacgcgcatcttcacgctctcggggtacttggcttcgacgaacgcggacgtcaggaacgctcccgccgacgcgccggccaaaaacaggtaccatgcgatcataggtccccaaaccatggttcatcacctcacgtagtagattttcgaaacggtcaggttgtcagcgagcggctgtgcgtggtatttcgcgatagcctggttgatctcgctatccgggtcgtccagatcgccgaagatgcgcgcacccgaaatgcaggttcccacgcacgccggcggattgcccggtttttcgccgtcccagcagaagcggcacttctccaccacaccggtcttctcctgcacgatgcgggcgccgtaaggacacgcagccatgcagtacttgcagccgatgcacttttcctcgtccaccagcaccacgccggaatcggtgatgcaggtggcatgcgtcggacacacggcagcgcaaggcgcgtcctcgcagtgcatgcactgggtggggacgatctcgttgtacacgttggggtattcccccgtctcgatctcgtggtacttgatgaacgattcttcgggatccagatggttcttcatctgacaagca

SEQ ID NO: 9737 - DNA, 2221 bp, Unknown
  gut microbiota DNA sequence
taggtggcatgcgtcggacacacggcagcgcaaggcgcgtcctcgcagtgcatgcactgtgtggggacgatctcgttgtacacgttggggtactcccccgtctcgatctcgtggtacttgatgaacgattcttcgggatccagatggttcttcatctgacaagcaatgcggcaggccgagcagccgacgcacttcttcgtgttgatcagcattccgtagcgggtcatgttacgcctccactttcttcaccgtgactgcaacttcctggctcatcatggagccgacgcccggctccgcgtccagcgggatgaagtcggtcaggctgatgccgtaatggtatgcgcgggtttgtgcaggcgcgtcgccgccgtagtgcgtgggaaggaacacgacgccgggcttgaggcgctgcgtcacacgcacttccacctggccggtgtgctcgctcgacgacacctccacggtgtcgcctgtctgcacgcccaggtcggcagcgtctttggcggccatccagaggcgctccatgtggtattcgcgcgagatggcgtgcagggcttcgatgttctgggtcatggtatgggagtggatgccctgcttgccgcccacgatggcgaactcgccgctctggggcgtcaccttgcgcggaatccagccgatcaccggattgaggccggcctcgcccaccttgtcggttttgaactcgaacttgcccgacgccgttttgaacgtgggcacgccgtactcgaagtgcgggtcaggcagctccaccacgccttccttcttcatctggtcaagcgacacgcccacggttgccagctgcgcctcagcccaatcctcagcggtgaactggaaatactcgcccacgccgcacgcttccgccaggccgttgaagatctcgtcgcacgtcctcgtttcgggatggatcttctccaaggccactgttcgcatgccgacgtagtgcttcttacctcccacgaactccggaagctccaggcgctccaggtacgtgacctcgggcagcacgtagtcggactgctgagccgtctcggacatctgcacgtcgatggtgaccacgaggtcggtcttttccagagcctcggtccacttcttcggctgcgcgtagcccttcgccgcgttcgagttgtagaagaacaggcccttgatctcaccctcgagcgtcgcctgcaacgcagccacgttggtgccggcgctggccaggaccagcgggtactccgcatcgccgatgcgcttggcagcgggcttcgcgggcgccttgaagcgggcgtcctcgatagcgccggccttcggcgaggacgtgatcagcgcgccgcccttcgcgccccagcagcccagaagcgagttgatggccgtgatggcgcgcgccgtctcgaacgagttcttgtacgaacagccgatgaccgagcgccaacccgactcgatggaagccgccggagccgctttcgccatggagcgggcaagctcctggatggtctcggccgggacgtcggtgatcttctcggcccactcgggcgtgtactccttggcttgctcggcgaactcctcgaagccgtacgtgttctgctccacgaaatcgtggtcgtagaggtcttcctcgatgagcacgttcgccattgccatgagcagcgccaggtcggtgccggggttgatgggcacccagtcgctggcgaagatgccggagttgttgaggcgcgggtcgacgatgaccacgcgggtgccgtgctcggcggcgtcggccaggctctgcaccgacgagggacggatgccgtcgccgtagctgcggccgatgaacatgaccatcttcgcattggcgaagtcgttcgaatagccggtggcgccgatggtcagctggtaggcgctctccttcgacaggttgcacgaagaagagtgcgcgtacacgttcgccgaacccagcgcgttcatgaagcgggcggagtactgcttgcccgacggacgcggatcctggatgatagccagcgattcaggcccgttcttggcgatgatgtcctgcaccttcgcgccgatctccttgaacgcggtgtcccagtcgatgggctcgaaggtgccgtcgtccttgcgacgcaaaggctgcgtgacgcgctcgtcggagtacgccatctgggcaagaccatggccgcgcccgcagatgcgtcccttcgagtacggatggacctcgttgcccttgagcgtccagagctggccg

SEQ ID NO: 9738 - DNA, 660 bp, Unknown
  gut microbiota DNA sequence
ccgctcgtcggagtacgccatctgggcaagaccgtggccgcgcccgcagatgcgtcccttcgagtacggatggacctcgttgcccttgagcgtccagagctggccgtccaccgtcgtggcgataagcccgcacttgctggaacaaccgttgcacagcgacggggccgtggccgtgaccgccggttcggccgctgccgcgcgctcggcctgccatgagccaagcgagatggaacccgcggcgcaggcgagcgcagccgtagcggccgaacccttgagaaacgttctacgcgataccgttgtctccctcattcctttcctccctttcttatcgttcactcgtcttgcttgttcacctatgggcacggcgcctgcttgcagcagcggacgccgggtaggtcatacggcgacggcctctccttcggcggcgttcgcgaaggcgagcgcttcgcccaccgtccgctgcgcgagcgccgcgagagcccgcaaaaacgcgatgccgtccagcaggttccggcggcgcaccgacgggagcgcttcgttatgcgccaccatgtcggcgcggtcggccaacgcagcgtcgtactcgcaaagccaatcgagatggtcggcagccagctggcgggcggcttctccgttgcccgcgtccagcagcagcgccag

SEQ ID NO: 9739 - DNA, 17795 bp, Unknown
  gut microbiota DNA sequence
tatgtcggcgcggtcggccaacgcagcgtcgtactcgtcaagccaatcgagatggtcggcagccagctggcgggcggcttctccgttgcccgcgtccagcagcagcgccagcagctccagctccagcgtcagatggtccggcatcgaggcgaactccgcggggacttcgatggccagctctcgatacacctgggacaaatgccgcgcaggatcgcctaagtacagcccgcgcgtagcgccgaacgcgttgccctgctgcgtggaccacgccttgtacagcgactccaccggcatagcggccagcggcatgcctggcaccagcagttcattctgaaacgacgagcgagcgggccatgtcggaagcgacagtgcctcttgcagcggagcgcctgccgccgcgcgcacgtccagccatgcaaggttttgctgcatggagacgtaatcctcttctttcaggtaggaaaaaagcggtgcaatgagcgataatatgtaggctacgttcgtcataacggacacgatccgtcctttctcgtcatcgccaatcctaggcgcgaccggaacgggtcgggtaatcagtttctggtgatttgaacgttttacctgatgaatagggtcatcagcacggttgttaagcggcttcgacacggaacggctacccgttcgtcgaccgggaaagggaggaatgtgagcactcggatcgcggtcgcgcgcgaccgccgcagcatgcggatggtttggaagacgttgcgattccgtcacgtcggcctcgccttcttctgggcgtgcagcatgctcacgttccgcagttccatcctgctgcaggggcccgcgaacacgcccgagctcgagacgctcgtcgtgctggtctcgttcatcgcgaacatgaccaccttgttcgccatcgccgcgttcatggaacgcgatccgcatacgttcgaccgccttcccggatggctgttctgcgcgctcatcatggccggcctcgtggtcatcgacgtcgccggacgcctgggaaacgacgcgacgatgatggcgctgctggtgggaggatcggtgctgacgggcgtgggttacggctattactggggaagctgggcggagtacctcgggcgcatgcacccctcgcgcacgtcgttctacgtgccgatggcgtttttgctgacagctgcgctgttcctgatcatctcgctctcggccgaatacgaaagcgccccgccgctgctgttgatgctgccgcttcccgtgctgtcgctcgtctgcctgcgccggtgccatgcagaggttcccgacgggcgctacgcgcgcaccgtggattcgaaacgctacctgacggcgctcgcctcgctggtcacgctcatcgtggccagcctcgtgctatcgctgctgttcgggctcgtgtgggagatgacggtgttgtcggtgggatcggtgaacgaggcgcaccaggcgccgctcgttgcgaacctcgtggtggccgtatgcctgatcggacttgtgctatacgcccacaagcgtcttgacctggccttggcataccgtgtcatcgtgcccgtcatcgtcatcctgttcgccgtgcttccgttcttctgggagacgagccccgtggtgctcaacgccgtgatgagcgcatgctacgggacgttcgacgtgatcatctggtacatggtggtgtcggcctcctacgacttcgccgtttcgggcttcgtcatcggcgccctggtgcgcggattgtcaatcctggcgcgcctgctgggaatcggcatcggctatctgctcatgctcgtgccgggaagcccgtcgttgctgatcgttggtatatcggtgggcgcagtgtacgtgcttgccatgctgggactgttctaccgtacgcgtcgcaagggcatgccgatcgtggtggaggacgagccgatcgaaaagaaggcggccgcacctgcgacgaacgcaccgcccgcagagccggcgaacgcgccggccgccgtcatcgcccccgtcgtgcaggcggctgaagctcccgcagcctccattgcccctgcagctcccgaaacccggccggacgacgcgcccctcagcgaagaagccgtgttcgagcagatcgccgaggacttcagcctgacgcggcgcgaggccgagctgctgcctttcatcgcgcgcggccgttcggcgcgcgtcatcgccgatgccctgttcgtgtccgagaacaccatccgcacccacacccgccgcattctggagaaaaccgacctgcactccaaacaacaggtgatcgacctcatcgagaaataccgatagccgcgtgacaaagggacgggtgattcgagacactgtacagtgtctcgaatcacccgtccctttgtcacgcctttgctgcacccgcgcaagaatccgcgagtgttggcagagatcgcacgctatgcacgattctattgttcggaataatcagcgacctggggttttcatcgcaagccccgacaagaatcgccttggaatcgtgcatagtgcgcgatctctgccaaccgagctttcctccgcatggccggcgcaaggatccggcgagatcgcgccgatatgcgagtcctcccgagccccggcggaccaagggcgccgccgggcgctctgcggaagaggcctccctgcgccgcatgccaagcccttcacgcacgacgggccctcgcatcgtgcgagggcccgcttcatgcaaggcgccgcagagggggttgcggcgcctgtcggaataggcaaagcttacaggtacagcaccggaagcgccgacagaaccaccagcaggcgcagcatgaagccgcccaccagcacgcccgcctcgccgatgacgctgaccaccatcgaggtcatcgaggtctcgacgcgcttcgtgatgaacaccgggtagccttcgatgatgaacggtgccaccaggcccagaaggacgatgcctccccagaacgcaggagcgtactgcccggccacgagcgagtagaccgacgcggcgccttcgacgctgccggcgctcacgatgaccagcatcgtggccagcaccaccatctcgatggccgacaggatgacgtgcgacttcttgatcagccacatctgctcgaagcgctcgcgatccaccagcaggcccaccagcgacgtggccgcaaggccggccgacagcgccgataccacgaacaggatgggcagcaccgcgttgttccacagcgggaacgccttcaccacgcccagcaggaagccggtgtaggccgccacggcgaacgcgaacacgatgccgacccacgtgagccacttcggcacgggcttcttcagcacctccagcagcgcggaaaccagcgccaccggcatgaacacgcagatgaagtacacgcccagcgtcatcacggaaccggggttagcgatgagccagaagaagcgcagcgggttgtgcaggccggcttcggcgtccaacatcaacatgaccaggccgatccccaggaaaattggggcgatgatacggccggccacgcgcatcttcacgctctcgggatatttcacctcaacgaaagccgaggtcaggaaggcacctgccgacgcgccggccagaaacaggtaccatgcgatcataggtccccaaaccatggttcatcacctcacgtagtagatcttggattcggtcaggtcgcccgcgataggctgggcgttcgtacgggcgatctcgcgagagatgtcgctttcgggatcgtcgaggtcgccgaacacgcgcgcaccggaaatgcaggtgcccacgcacgccggcggattgcccggctcgccctcgtaccagcagaagcggcacttctcgatgacgccggtcttctcgatctggatgcgcacgccgtaggggcacgcagccatgcagtacttgcagccgatgcacttctcctcgtctaccagcaccacgccggaatcggtggtgtaggtggcgtgcgtcgggcacacctgctggcagggggcgttctcgcagtgcatgcactgcacgggcacggtctcggcgtacacgctgggataggttccctgctcgatctccttgtagctgatgaacgcctcttcgggttccagcttattgatcatctggcacgccatgcggcaggcgtagcagcccacgcatttcttggtgttgatgagcattccgtagcgggtcatgttacgcctccaccttcctcaccgtgacggccacttcctggctcatggtggcacccgtgccgggctccatgtggaacggcacgaaatcggtcatgttcaagccgaactcgtaggcgcggctctggtacggcgacgatccgccgtagtgcgtgggcaggaacaccacgcccgggcgcatgcgctgcgtcacgcgcgctgccacctggccggtatgctcgctcgaggcgatctcgatcatatcgccgtcggcgatgcccaactcggccgcatcctgcaccgagatccacgcgcgctccaagccgtactcgcgcgagatggcgttcattgtggccacgttctgggtcatcgtgtgcgagtggatgccctgcttgccgcccaccaggtagaactcgccctgcttgggctccacgaggcgcggcgtccagccgatgaccgggttgaggcccgcctcgcccaccgcctcggacgagaactggaacttctcagtcggggttttgaacgcaggcgtcttgtactcgaatccggggtcggaaagctccacgatgcccttctccttgagctcgtccaggctcacgcccaccgtctcgagctgggcggctgcaagctcctccaccgtgaacgggaagtactcgcccacgccgcacgcctcggccaggccggcgaagatctcatcgcacggcttcgtctcggggtggatgggctcgagcacctgcgtgcgcatggccacgtagtgtttcttgccgccgatgaactcggggagctccatgcgctcgaggtaggtgcactcgggcagcacgtagtcggacgcgagcgccgtctcggacatctgcacgtcgatggtgaccacgagatcggtcttctccaacccctcgcgccacaccttcggctgggcgtagccctgcacggcgttggagttgtagaagaacacgcccttcatagcgccgtcgagcgccgcctgcagcacggccaggttcgagcccatgccgctgggagcgagcgggtactccttgtcgcccacgcgcttggcctcgggcttcggagcggaggggaacttctgcttgtcgatgtcgcccgccttcggcgaggacgtgagcagcgcgcctcccttcgcgccccagctgcccagaagcgcgttcaccgccgtcaccgcgcgagcggtgtcgaacgagttctgatgcgcgcatccgaacgccgcgcgccacgaagcctcgacggccgcggccggagcggccttggcaagcgcccgggcgatctcctcgatggtggccgccggcacgccgcactgctgctcggcccatgcgggggtgtattccttggcctgagccgcgaactcctcgaagcccacggcgttctgctcgacgaactcatggtcgtacaggtcctcttcgatgagcacgttgcagatacccagcagaaacgccaggtcggttccgggcttgatggacacccagtcggtggcgaagatgcccgagttgttgaggcgcggatccacgatgacgatgcgcgtgcccttgtcggccgcggcggccaggctctgcaccgacgaggggcgaatgccgtcgccgtagctgcgaccgatgaacacgaccatcttggagttgccgaaatcgaccgagaagttgcccgtgccgatggtctgcgcgaagcccgcctccttcgaggagttgcaggccgcgccgtgcgtgtagatgttggccgaaccgagcgcgttgatgaagcgcttggagtactccttgcccgaagggcgcggatcctggacgattgccagggcttcggggccgttcttggctagaatgtccttcaccttggcgccgatctcggaaaacgcggtgtcccagtcgatagcttcgaacgaaccgtcggccgcgcggcgcatgggctgggtcaggcgctcgtcggaataggcgatctgcgccacgccgtgacctcgaccgcagatggtgcccttggcgtagggatgcacgtcgctgccgcgcagcgtgaacagctggccgcccagcgtggtggccacgaggccgcacttgctggagcagccgttgcagagcgatacgccttctttgcgctcgtacgagccttcggcgtgagccgcctcggcctgccatgcgccgagagagcacacgcccgcgcccgtcgcagccagcgccgccgtggccgccgaccccttgaggaacgtccgccgtgttacggatgagttcatttcgcttcctttctttcctcccttgttggtgccgttttcgcctcgttcggcgtcggcgcgctctgccccgcatgccgcgcgagctcgcccagaagcgcaacgtacgcgcgcacctggccgatgccgcgcgccagagcggcgcgcccctcctcgtcgaaggccgaagccgaggccgcctgctccgcgcgctcgtcgagcgccgcgtcgtaggcgtcgagccagtcgaagtgatcctgtgcaagcaggcgggcagcctccttgttgccggcttccatgtagagcgcgagcagctcgcacagaagagacaggtggtcgggcatcgccgcgaaacgcttcggaacttccaccttaagcgcttcgtagagcgcctgcacatggcgcgccgcatcgcccaagtacagccctcgcgctccgccgaactgcgagcccggcaaagacgtccacggcttgtagagcgattccaccggcatggccgcaagcggcatgcccggcgtgagcacctcgcgctccaccatgcggcgcgcgacgctatccactggatcgggggcggtaaagccgtgagcagcgagcaagcggcgaacgtcttcggacagccaatcgacttggaacccgttgcagcacgagccctcttcgccggcctccgctgcgtcgtcaatcgagccggtcgcgaaaaccggagcgcacgcctgtaatcctattactatggtatcattttgcccgtcgatcatcgcagcccccttccttcggcgtgggcaatgctatgatgagggtctcgggacagtatcatcaattattgatgatttgattgtttgcgctgatgataagcttttccaagatgaaagggagccatgcgccgttctcagagaaacaggcggcgccaaggacgaggagggattgttcatgcctgaacgcctgtcgcgcccgcgcgatcgacgcagcatgcgcatggtgtggaaaacgcttcgtatacgccacctcggcctcgctttcttctgggcatgcagcatgctcacgttccgcagctccatcctgctgtcggggccgatgaacaccacgggatatcagacgctcgtcgtgatcatctcgttcgtcgcgaacatgaccacgctgttcctggtggcctcgcgcacggaacgcgaccactccttctacgacaagcttcccgcttcggcgttcacggcaagcatcgtgacagggctcgtgctgatgacaggctcgggcatggccggaagcgccggattgttgacggagatgctggccgtcgtcccgctcgtgctgggctccgttctagccggcgtgggatacggctacttctggggaagctgggccgagtgcctcgggcgcatgcatccgtcgcgcacttcgttctatctgcccgttgtgctgttgttgaccgcgctgttgttcgtcgcgttctcgttctgctcggaggagctgggggttccggcgctgttgctcatgttgccgctgcccgtgctctcgcagctgtgcttgacgcgctgcaaccgcgaagaaaccgacgatcggcccgcgatcacggccgactcggggcgttaccgcacggcgctcggctcgctggtcagcctcatcgtggccagcctcgtgctgtcgtgtctgttcggctacgtgtggcagatgaccgtggcttcagtcgactcggcttacgaggctcaccgactgccgcttatcgccaacatcgtggccgccgtggcgctcatcgggctcgtgctgttcgcgcgacgccgcaccgatctggcgcttacgttcaaggtgatcgtgcccattctcgtggtgctgttcgcgctcatgccgatgttctggagtacgtacccggtggagctcaacacggtaatgagcgcgtgctacggcgtattcgacgtgatcatctggtatatggtggcatcgaccgcatacgacttcagcgtgtcgggcttcgtgataggcggcatcgtgcgaggggtgtccatcatcgcacgactggtgggcatcggcatcggctacgtggtgatgctcatccccgaaagcccatccatgctggtcatcggcgtgtcggtgggcgcggtctacgtgctggccatgctggcgctgttccagcagggcggcaatcggttctcgtttttgagcttcggcgccagcaaggcgaaagacgccgaagggaaagccgcggccgtttcgtgcgcagccggatgcggagccgcctgcccccgccagcagatcgcctccgccgacgaagcgcgaggcgacgaatccgcctccgagcccgacggcgacgtgctcgagcagatagcctcgtactacgggctgacccgccgcgaagccgaggtgctcccctacctggcgcgcgggcgctcggccaaggtgatcgccgaggcgctgttcgtgtccgagagcaccgtgcgcacgcacacgcggcgcatcctggaaaagaccgccctgcattcgaagcaggaccttatcgaccttatcgaaaagtacgagtgatcgccatggataccgtttttcgccctacctggactgtaggagtcatccgcgtcatcacgcaggatcaagaacaggctgacgcgcatgggctgctcatcgagcgtgcgtttcctcaggtgcgcgtcgtgtcgcgctgcattcccgatcaacccgagggcgtgcacgatgccgctacgaagcgcactgccgaacctaaagtgattgcgcttgcctgtcagctggtcgaacaggacgcggacggcatcatagtgagctgcgccgacgaccccggcgtagccgaagcgcgcgccatcgtgggcgtgccggtggtgggcgcgggcgaaagcatggccaccgccgcggcgcttcacgaggggccggtaggcgtcatcggcatcacgccggacgcgccgcccgcgttcccgcgcatcttgggcgagcgtctgttggcgaacctcgtgcccgacggcgttcgcgacacgcgcgatctgaacacgcccgcaggtcaacacgccgctatcacgacggctcgacgcctgcgcgaagaaggcgcagcggtcatcgcgctcgcctgcacggggttttcgactatcggcttggcgccgcagctcgaacgagccgccggcatccccgtcctcgacccggtgacctgcgaagcgcaggcgctgttggcgctgctagcgtaagaatcgcgcgcgcctgacgcacctctgacactccccgtcagccctcggtgacgtcgccggactgatcgaggctgatggggtcgcccacgaacgtcgaaggtaccttgaacagcgtcttgaagaagtccttcgtgcgcgcggggatctcgcgcagatcgtactggagctgcttggagtagtcatggtagtcgctggccacgccgagggaatcgaggccaagaccctgcgcggcgtacagcgcacgatacagatgataggtctgggtggccaccacgatgcgctcggcgccgaacacgtgcttcgcacgatacatgctctcgtacgtggagaagcctgcatggtcgcagaagatgtcgtagctcggcacgccttgggaaatggcgtaatccttcataacctgcacctcgttgtacgacacggtgctgttgtcaccgctcatgatgagcttcggcgccacaccttccttgtagagcgcgatgccgtcgtccagccgatcccgcaagatgcccgacggcgtgccgtcggcgaacacggatgcgcccagcacaacgatcgcgtcggcatcgaagccgaccgccgcttgcggctcgacgatacgatctttggtcgtggcgatggtcgccacgttcgtcgccgcgaacacggcgacgaccacgagcatgcatccgagcatcaaacccagcatcgtcttcaaccatccatgtttcttgcgtcgcgtcataagcgtcgatgatagcaaatcccgcaccgaacccgctacgcattccgcggccgtcatcgaaacttgaagccgattacatgagaattgcgcgggttcgaggagacaagggaacgaggtttgctcgccgcccatgcgcgcgaagcgccgcacggggcggcgcttcacagggagggagggcaggttggaaagcaagcgcttacagatcgccggccagaaaacgcgcgacgtggcgaccctgggtggacgtgcgacccgaggcgcatcctacaatgtattcggggtagttgccgctgaagaagctgccggacacgtcgcccgccgcatacaaaccgtcgatcacctggtcgtcggcgtcaagcacctggcagtccttgttgatgcgcagaccatcgagcgtggtcaacatcgacccgccgaaccagcaaccgtagaacggaggcgtgcgcagcgcggacagacggtaggcctctttgccgaagtcgtcgtccttctgcgcatcgaactgcgcgttgtaacgttccacttggtcgaggaaggcccgcttggcctcgccctcgaagcccagcttgtctgccagctcttcaagcgtttcggccttctgcatgatgccctgcccgagcgccgccttgcagaactcctccaccggcatgcccaaagccatcatctggttggcgaacgccgagcagccgatggtggagaagcgcaggatgtcctcggacgcgttgccgtcgaacacctggcaccatacgccaccgggctgctgggcagcctggaagcacaggaagtcgtagggcgtggactcgttcgcgaaacgcacgccgttgcggttcaccttcatgaacggctgactgccaatgttctcctggaagatggtgcccggcagcgcagccttgtcgccctcgcccacgtagccggcatccacgcccggagccacggcgccgcggtcgaagatcatcggcgcggcatcggggtctttcgccccgccagcccacatgccggccttcagaccgtagccgtcgtcgttgatggcgtagctcgacgccgtgcagcacgccagcgcggacggctgcagcgcgcgcatcatcgcgggattcgccggatagccgccggttgccagcagcgtgctcttggcgttgatctgcacgtagccgtcgtcagtgtcgaagatggcacccgtcaccttgccgtcgtcgtgcaccagcttcaccagcgcgtgcctgaagcggatctggttgccggcttcctcgatggaggcctgcagcacctcgttgcgggtgggaggctcgtaaggcgtaagccatacgtgctgaagcacgggcaggtagtagtcggtgccgccggtggcatgcgcgagcggcatgtccaccaccagctgcttgcccgtaacctgcattttcgcatcgacccagtccagcagctcggcgctttcgtcgatccaaaccttgatgacgtcctgacggcatttgccggacgcatagcgcgtcaactcgttgagcagcttcatcgtgtcgacttcgccgccttgcgccagagccgccttcgagttcaccacgcccaggtactcgcgggtttcctgaaccgaatcgttcttctcgcacaggatgaaatccattcccaaatcgcttgccgtgccggccgcgcacatacccgccgcgcccgcgccgacgatgaggaagtcggtgtcttccgttttgacgatgtcacccgcggcgatttccggttcggcgcccagccagtcgaccgctgcgccctgcgagccctcttcggcgaccgcctgagcgccctgcccctgcggcgcgcaacccgccagccccataaccgagcccgcggccgcaagcgcgcccaggcccaagaaaccgcgacgcgacaatcccgcacgcttcgtttgttcgttcatcgttccctcctgcattcgtcctccgacggcccctccggccgccgttttgatgagcgaaccttaccgcccggtcgcccctctggcttcaccctgcgggcgcgagctttcttttccccgcgtgcgatctggcggttcttcatcgtcaacggcaaatctcgccttctgagggtgaggcgatttccgaacggatgatgtgctcgaaaaccgattccggtacactacgaagagtcgaaaggagaagcatgaggcacgtcgaagcacgcgataccgcatccggcgaggaggaggccggtcttcggctgggatccgacgacctcgcaacctgcggatcgctcgcgctgctgctgattgcggcttatttgctgaacgcgtacatcttccccagcgtcgccttcctcttccctgccgggcgcgagatttccacgtactgcggggtggggttctccgtcgtagtcgcggtcgcgtcgtatcgacagccggcggtgtttcgcgagaacccttggtcgctcacgtgtctcgggctgttcgccgtaggattggccatgttgggcgccgggctgatggctgacagccctctgcttgtcgcgttgggcagcccgttcggcggcatcggatcggtatggttctcggtgcttgtgggtctggcgcttgtcaagctggggacgaagcgcagcatggtggtgatccccaccgccttcgtggcgaagtacgccgtgcagttcggactggtgctcatgggcgacgcgctggaccttttggcggcgctcgtgctgtatttcgcgtgcacgactgcatcgtacttgctcattcgcccgcgagtgcaccgcatgatcaccgccattcgcgaaagcgcttcgccaaccgtgctggacgcgacgaacccctcgtcgttcctgccgttctccagcctcgtgtacgtgtccgtcttcctgttcaacgccgcatgcgggtatgcgttcggaagccaagggcagatgatgccgcaagctgccacgctgctgtcgttcgtcccggtcgtcgtggtgttcttcatcgtggtggctgcgcgcgcccgtcttgtcgccgatgcgctgtaccgcgtttcggcgctgctcgtgttcgcgggatttctgttggtgccgctatcgttcaacggtctcgacaggcccgccgggttccacatgtcaagcatgctgctgtatgccgggtcggactgcttcagcgtgctcacctactacctgatcgccgccgtcgggtcgcgcaaccccgccggcgcgttgtctacctcggcttttgcgattgcggccggttggctgggcatcggctgcggcgcgctgctggtgcaaagcatcgaagcgctcggcgcgctcgacggcagcacgctactctggtcgtcggccatcgtcacgtttttgttcatgacgtacaacttcgtggctatgcggggattcagtttcgaggatgccatcaaaggggtgcgaccggcgcatccgacaccggcgcgcgcagcggcggacgaagctggcgaagaccccgacacgtcgcagcttgaagagtcatgcgagaacgtgatcaggcggttcgggctgaccccgcgcgaaggcgacgtgttacgcctgctggcgcgcggcagaacgagcccggtgatccaggagaagctgttcctgtcgcacaacaccgtgaaaacccacgtccgccacatttacgccaagatggacattcactcccagcaggagctcatcgacatcgtggaaggcgcggacgcgtagcgcctaggggagaatgcagcgatggcccggcatcgtgctgcacttatcgcacgaaacgcagcggggcttcgcctgcggatcgacccgccagcgttgcgccagtcgcggttcgcagataagcggacggcacaggccgaatcccgcaatgcgaccctcgctttccaccgcaaggcgatccatcgcttcgaaactgcgattgccgcccgtcagaatgacgggaacgtcgatcgcgcgggcaagccgctgcgcgtaggcggcgaagaacggctctccatcgaagtcgcgcacacggcagttccgccagttcccgctcacttctatagccgacgcgccgtgagccgccagcagcttcgccgcttcaatgctgtcgtcctcagtcaggccgccctccacgccgtcggagctgttcagcttcacgatcagcgggaacgtcgcgcccactcgcaagcgcacagcgtcgacgacctcgacaaggaagcgggcacggttccgcagggcaccgccgtactcgtcgcggcgcctgttgagcaaggggctcaagaactggctgagcaggtagccgtgcgccgcatgcagctcgacgccatcgaatccggcagtttgagcacgggccgccgcatcggcgaatgcttgggcgagctcatgcagatcggcaaccgtggcctccaccggcacgatgccggtcttcgggttggcgacggccgacggcccgaggatgcgcctgctgggcggctggagcttcgtcgccgagccgccgtatacgatctgcgatacgatagccgtcccatgcgcgtgagccatgtccgtcaatgcccggaattcgggaacgaacgagtcgtcgtagatgcccagcatccgaggattcggctgttcgtttcgcataacgcgtgcataccccacgatgatcgtacctaccccgccatcggcaagctcctcgtagatcgccgtcagctcaggagtcatatgcccaccgtcatcggctaacgcctcgtaggtggctgctcgcaccagtcggtttttcgcccgcaacgagcctatttccatctcctcgaacaacacgctcatcgcgcatcctccttgagtgcgaatgtctgcaacaactccgaccgcaatgcgcggtgcttgcgcgtgaaatccgggtcgctgtaccgaagccgtttgcccgtctgcttggccagctgatgcgccaagcgattgaacgcgccggcgtccatcacctggccgcgcgtcaccgtgaccacggtgtagcccaacgcgatcagcgtgctgcgccttcgcgcgtcgctgtcttgccgatcggggtcgacgtggtaccgcgcgctatcgtactcgacgcacagcttcgcctccggccagcaaagatcgcatacgcagtacgcgcgatcggccagccttttagagctggaaggcacgtcgacacgatggttgatcagcggcttctccaaaccgtaaccgcccagaccgtagggcaggcacagcatcatggcaagcatggtctccatcggcgaggctgcgccgtcctggacgtaccgcacggcacgagccgccttcttgcaaccgcgcgccccggatgactgctcgacaaaagcagctagcttgaccttcgtcgtcaacggggcggcacggcgaaccgccggggcgcccccgacgagggcgtacgtgccgcacagctcgaatcccagctgaatcagttggacgagcgacaagcagcccgccatctgcaagaagcagaattccggcgtgctcatcaaaaacccctcccccgcttcggcgaatgcggtgtcgggaaacgggcttccccaggtatgcgtgaccactccctcggtttcggtgcgaacgcatgcatcggcaatcagcacgtgcaagggaagggcgcatcctgcaggacgccgattcccttcgcctatgcggggcttctccttcgccgccatcacggcgcgggcccgtctcgtagcggctcggcgctggcgacccgttcgcaagaaacgctcgcccaccgtgcgccaatattcaagcgccgatatatgtccgataagcatatccatgaacgcatgataccacattctggcacgaatttgcgggtaggggaatcatccggccgccagattgccgggcgcgaggggccgacctggccatacgctcgtcccactcgctcaaacctggccgattcggcccctatcattcccctacccgtgaatttgtgccaaaatcagccagcccgcgttccgaatgcagcgagggcggcccgaatacccgagccgccctcgcattcctatgtcacaacgcgcgcacccgcaggcgcgccgcccgtcctctacttcgcgacgatgttcaccaggcggccgggcaccacgacgaccttcttaacgtccttgccctcgagcgccgcttcgacggctgcaaggcctacggccttgatgtcgtcctcggcagcatcggcggccaccatgatcttggccttcaccttgccgttcacctgcacagccagctcgacctcgtcagccttggcctgctcgggatcgaattcaggccacggctgcgtgtgcaccgaaccgtccttgcccagcaccgcatgccacagttcctcggcccaatgcggcgcgaacggagccagcagcttcaccaacacctcggccacctcggcatcgaccgcccgcgacccctcgcaaccggcacgctcttcaggcgagcacttgcgcagatagtcgctcgccgcgttcgtcagctccatgatggcggcaagcgccgtgttgaagttgttgcggtcgaaatcgtcaacgactttgcccaccacgcgatggcgctcgcgcaccagctgttcgagcgctttgatgccctcgtcctcggacgcgcccggctggtacagcgtttcctcgtcggcggctcccatcaggtcgttcacgatgcgccatgcgcggttcatgaacttgtagatgcccgccaggccgccctcgtcccacagcaggtccttgtcgggcggggccatgaacaggatgtaggcgcgcacggcgtcggcgccgtactcggcgatcatgtcctcgggggcgatgacgttgcccttcgacttcgacatcgtctcgccgtgctcgtccttcaccatgccctggcacaacaggttcgagaacggctcgtcgaactcaagcagccccaggtcgcgcagtactttcgtgtagaagcggctgtacagcaggtgcaggatggcatgctcgatgccgccgatgtactggtcgacgggcatccaacggttcgccttctcgggcgcgaacggcagctcctcgttgtgcggatcggtgtagcgcaggtagtaccagctggagcatgtgaacgtgtccatcgtgtccgtctcgcgcttcgccgggccgccgcataccgggcacgtcgtgttcacgaacgcctcgtgcgtggcaagcgtctcgcctgcggccaggtcgatgtcctcgggcaggcgcaccggaaggtcctcctccggcacgggcacgaggccgcattccgggcagtgcacggccgggatggggttgccccagtagcgctgacggctgatcagccaatcgcgcaggcggaactgcacggtcttcttgcccttgccctcggccgcgaggtcgccgatgatcgcattgacggcgggcgaatgcttgccgcccaccatgccggtgtacttgccggactgcaccagcacgccctcggcatcgtaggccgcttcccaatcgaccgacgtcacgcggcgctcctgcacgccgttgagctggggatacagcggatcgtcctcgccgaggatgatggggatgatgggcaggtcgtacttgcgcgcgaactcgaagtcgcgctggtcgccgcacggcacggccatgaccgcgccggtgccgtagtcgctgacgatgtagtcggccacccatacgggcaccttctccccgttcaccgggttcaccatatagcg

SEQ ID NO: 9740 - DNA, 8054 bp, Unknown
  gut microbiota DNA sequence
cgggcgccagcaggaagaacgagcagccgaacaaggtgtcgggacgcgtggtgaacacggtgatcacgtcgtcggccgtcggctcggcaggagcctcgccgtcgggcccgcacagcacgaagtcgatttcggcgccttcggagcggccgatccagttcgcctgcatctgcttgacgcgctcgggccaaccgtccagctggtcgaggtcgtccagcagctcctgggcgtagtcggtgatcttgaagtaccactgcgtgaggtcgcgcttctccaccgcgccgtggcaacgccagcactcgccctcggtgacctgctcgttcgcgagcaccgtcgcgcagttcgggcaccagttcaccgggctgttgcggcgctcgaccaaaccgcgcttccagaactgcaggaagatccactggccccagcggtagtactcggggtcgcacgccaccacggtgcggtcccagtcgtacgagaagcccatgcgcttgaagctggccttctgcgtgtcgatgttggcgtaggtccatttggccggatggctgttgcgcttgatggccgcgttctcggccggcaggccgaacgcgtcccaacccatgggatgcagcacgtcgaagccgcgcatcttgtagtagcgcgcgacgacgtcgccgatggtgtagttgcgcacgtgtcccatgtggatgtcgcccgaggggtacgggaacatctcgagcacgtacttcttcggcttcgagggatcctcggtcaccttgtacaggtcggcatcgtcccactccttttgccagcggggttcgatctcgtgcgggttgtacggtttcatggtcattggttttcctcgtcaggccgtcgcccgcccatgcgcgtccgcacgggtgggccaattgttcgcgaatgttcctattatagtgatattgtccgatgcgcgaaatggcggctttcacatccacccgaaaaccgccgggattcgaaagctcgatgcactccggcgtgcgcaacacgacaagacctcgtcgtccatggtggtccgcattcgtcaggcgattcacgagaacttctcgcaaagctttgcgctcagaggagtcatcaattcgagtcaaaaccgtttgtttgattatttgaggttatgcatggctatttctgaacgaatacatagcaatcgtcggtcgaccgagcgggatcgaacgcgtagccgagcgcatcgaaggcttgcaggtcggcaggttctttaatggcgttctcggcgcaccagcgcaccatggtaccgcgcgcggctttcgcggcggtggagcgctgcacgaggcgatcgcgcgcgtcgacggtgccgaacaggcaggtgagcactcttgccccgcagcgatccgcagagggaacgacggccttcgcgtattccaccgatgccaggttcacgatgacgtccgtttcggccgcgagcacgcggctcaggctgtcgccccagaactcgtagagattgcgcgcgccgtccaccgcgagcttcgcctgcatttccaggcggtacggcgccacgccgtcgagcgggcgcaccacgccgtagagccccgagaggatgcgcagatgctcctgcaggtaatccaactgctccatcgtcatcacctgcggcgcaaggttctggtactggatgccctcgtaggccagcaccgccggcgtcaacgcgccggagcgcacgtcgagcgtgcggaagcgttcgaagttgagttcggccagcgcgtcgctgcactgccacagcgccttcgcctcgtcgtacgagagcgcccgcaccgcatcggccagacgcgcagcccgatccgcgaacatcggcagatcgcgccatccaaacgcatcgtcgaccacgttcatcttcttagcaggagaaacgatgaacctcatatcccacctcaccttgcatccagtttcagcaacaccgttgtgcggtacacgccatcttcctgcacggtttccaacgtgccgtcgtgacggtcggcgagggttttgaggatgttcaggccccagccgtgctcgggaaggcggtcgccgcgcgaacggcgcggagcgcgacgggcctcgccaggttcagccggcgcgcaactgttctccatccgcactgccagatagccggcatccacacgtgctttcagcttgatgaaccgcgcgccctccggcaccttgccgcatgcgctgacagcgttgtccagcaggttcgagaacaccgcgcacagctccacgctcggcagagagacatcgtcggccagcgccagatcgagctcgagtcgaatgcctcgctccgcacatacggcagccttcatcgagacgagggcatcgaccacctggtgctcgcacgagcgcttgcaggacgaatccatgatgccgaccgccttcatcagcccccgcgatgcctgttcggcctcttgccgttgcagcagatcgtccaccgccgctagctcgcgtgcgacgtcttcgcgaacgcggcgcgcttcatcgatgtccgccgataaacgccgcaaatactgttcctgcgcttgcaactgctcttccagcagacgcacacgctcgcgggacagctcgcgcttctcggactcctccaacgctttgaacagcacgagatcgaccggtccgcacagggcgcccacgaccgcgaccagcgcgaacatccaaaaaggcagctcgtaggcaatcgcataataaaagaggaacgcaacgatgcacagctggctgaacgggaacaaaaggttaatcaaaagacgcgtcgggggcacgccgcgcagccggcgcgccagcaccgccataatcgcgcacatcagcagcagcacgcctaccgcgatgatcatccgcacgatcataagactgcctcctcgcttcggcgggtatcgttaagcacctcggccatgcaggcaagatgttcgtgggcctcttgaaagttgccgcgttccgacagggcaagcaccacctgtacgtggttgcccatatcgtgccgcaccttcaaggtatgctcaatgtccgaaacgaactccccgcaacgcgcgagataccgatccagctgctcttcgagcatcgtcgcacggacatcgtcgcgccgcttttgggcgaagcgacccatagcctcaaacagcagcagatcgaccgcgaaaccgacaagcgccagcaccacgcttgcgccgtaatacgtcatcgattcctggatgtagccgagcggtaaaaggatcatcacgttcaccagaacaagctgttccaaggaaaaaagcacgggcagccattcgcccattccccgttcctgagcgctgccgaaacggttcagcagcatgcagagcatcgcgagaagcggaacgagcagagccatatgagccgcatgagtcaggaaaaaagcgccaagatgcgttcgaacggcctcgtaatcggcgaccggcgtgccggtcatcgacatccacagggcgccgccgggcagctccgcaaagaaaagcaccagatgcgccagcgtcacgacgagaatcctgcgcgcgaggcttccctgcgataggaatatgggaatgagggcgagcggcacggaggccgccaatctgaactcgacgctcatgcttgaacgaaacgaggagataagcagcacgaaaacaagttccagcacccagaacagggagagcctgcgaatattgagcatcttggtgagcgcataggcgaacaccaattgcacgggaacgaccccgatgatgtcgaggagagcatcgggcatacgagagcctcgccgtcctacagcttggattgcacgcgcgagaagacagcttcgcgcacgaatttgcggcgcttctggctcacaggcacaacctggttcgacgagagcaccacgctgtccgctttgagctccttgacgtgatccatgtttaccaggaagctcttatggcattggatgaacgaagcgggcagctcggcagcgaggtcggacaacgacgcgtacgcttcgatctcctcggctcccgcatggatgcgtactttgcgccgatcgctttcgatatagctgatcctgctcggctcgacaagcactaccctgcttccaagccgaacgctcaggggcttgctcgagtcggcctcgagccgctcgagcacgcggctcaacgcgtcgtccaagtcgtcctgcgcgaacggctttaccagaaaatacagatgctctgtgcggtacacgctcgtgcagtattcgacgaagccggtgacgtagatcacctgcgtgccgcaccctgcggggaaataccgcttcacgaggtcgatgccgttcgcgtcttccgagcccagctcgatatccatcacgagaacgtcaatggccggttcctccgcaagacgcgccgtcaaagattcggcgtcgacaacatgctcgatggcgagctcgccgccacgcggggagcattcgatcatgctccggatgatctcggcttgggcggcatcgtcttctactattacgacctggtacatggcatcggctaacgtctctggtttgcatggaggggataagcgtgctgcgctccacgagattatatacgatgaagcttttgccccttccgggtttttcggtcacttcggcaaatataatgaccgaaacgatgatatatgatcacgggcgcgcacatagtcgcctctctcggcaagcgccatagccgcatgagcctggtttcgcacgtcgtggcgcatcctcgccgtctgctcgacctccaagacgaacgcattgcactgcgcaagacacgcatccagctgaccctgcaacagcgcggctcgctgatcctcatgccgcttgcgagcgtagcggtccatcgaagcgaacagcatcgcatccacgacgaagcacccgatcgcaagcaccgacatgccgtagaagagcatgctggaacccaggcgggcatacaccctgcaatcaggggaaccgtcagcagaagagcctgcacgaccggaaaccagaggaacagccgcaaattcatcgatcccgcagactcgccgcgttgtagagcgaggcgcagcgcggcgaacagcgctatcatcaagacgagatggaccgcgtgcatgatcgcgaactctccgagatgcgcccgcgtattgtcgtaatcgatgatgtcgattcccgtcatgccgtaccacaacgccgtccccagcacttcggcgatcatgattgccacgttcatgagcgcaatgacgaacacttttcgcgcaggacgctcgtctgccatgaggaagggcagcacgcctcccgtgaacacgaggtaggcgaagcgcatccctgttcccgcatcgccgcgcgtcaacactaccacgagcatgcagcttgacataagaaggtagaatgcggccctgttgcgcatatgcagcacgcggctccaggtgtagatgatgaccgcttccaccggagcagtgcccagtacgtcgagcatcgtgttcgacagatgcataccctctaagcctccagagaggcgacaacacaaggcacgacgagggtgctcattgttcgcaggtgggcggctttggcggatgcatccgcgatcatcgaaactccttcaaccgggtctgtccccagcagggtaccacgccaacagcgctataaactgatgccgtaggtcatatgcatcatgtagaacgcgaaacgcatcacgaagatgccggcgaacaccagcgcagacgcgatggcggccgatgcaaccgagatgccgcgcccgcgcatgagcggaagagcgtccactgcaaccccggctacagcaagcaggaagaaaaccgtcgccatcgcgccatacgtcggtacaagctgttctgcggacacaaggtagtttctcatcgtaagtacgctcatgccttgggcgacgtacacgcccgcattcgctaggagagctgcggacgagagggcgagcagcatcccgcccacccggctttctaacggcgaccaccgcgagaaccgcaagccgaaaagagtcagaaccgggccgcccaccagcgcgttcaagcacaacgcgacgggaacgaagggcgtgtcccaggtgaccaccgtcctgctggcgtaggcgaacgacggcgagcctgtttatcaggaccgcatctccaagcaggcggcccgcatctgccagaagttccgcctgagcgcacgagaagccgaggtcatggagcacatcgtgcgcggcagtgcgcatcgccgaggagctggtgatctccgagaacaccgtgcgcatgcattcgaagcgcatctacgccaagctcgacatccacaaaaagcaggacctcatcgacctcgtagactcgttcgaccccgaaccgtgaagctaaccgagaaccgaaaacagcaatccgaacgtcctttttagtgcgcgacggtttgcacagaatcggcaacgggcttcacatcgaacgcgagaccaaggctgtcgagtattttcacaacggtttgaaatcgaggattcgagtcgtcggatagggttcgatacaagttctctctattcaatcccgtggaagccgcaaccgaagacatcccttcagcccttgccacgacaccgagcgcatgctcaaaatatccaggatccccgtctttgagagcctcgctgaggtactcggcaatatcgtcaggcgaagcaagatgatctgcagcatcccacgtcctcgtctcaagcatgtcgctccctccattcgctcaaaagttctcgggctttcttgatatcggcagtctgggtcgatttgtcgcctcatttaagagcctttgcttgttcgaggcgttgcttgagatattcgtagtgagcgctttcttcggcggtccatgctccgaagaggatgcgttcgagcgcttcgctcgccggttcttcgtcgtccgcgctggagaagaggcgctgctcgctgcgcgagtacaggcctatatcgtcgaacatgcccgactcttccaacaccttcaaattgccgacgatgctcttgacgatggaaaggtggtgcgccggatcgaccgcgcgcggctccgttccggcgatgcgcatctgctcgtatcgcaactggcagctgatgagcgatatctccggcttaaccgccatgagcgccagcgatacgctatacccgcgatcacgtaggagccgcgcagtcttcagggggacttcggacgtgcgcaacgtcccttcgataatgaggttgtatcccataatggagagcgcatcgataatcgcctcgaccatccgaccggcccacgccgccgtatgtgcaggcgagtcgatgccgtattgggcgcagatctgtttatatcgcggatgaaaagaacggtactcgtcaccgttaacgacaatcacgttaccgttcatcgcattgcgaaagacgttgtgaagagtcgtcttccctgctccgctctggccgccaagcaaaatagcttgaggcttatccgaaggcgcaagacacgcaccgacgaccgatgagctgacgatctcctgtattccttcatagagttcttcatccgagtaacattcgatgctctccatgctatgcggccttcgcttcgcggctcttcgccaaaagctctatgcattcgatttggcccttgatctccgatagcctcaccttgttcaaatgaccttcgtcgataatgcgtcgcttggccaacgccagctgcatgaacgcatcctcgtacaccgcagcagaaatctcgtcccctttttcccgtgcggcggcacgcaagcgagaaacctcccccagtaactgagcagcctgttcgttcagcacttcttgctgcaaggtgatttcgtacatttcgttaatatccatgatgtccccgtcctcgtcgaaggttaccagagcgtagatgatctgctcggccttgccgcgctgctcgtgcgacagcaaatctccgtcgcgttcgaagcaatcccgcatgaaggccgggttgtcggctgcgcgaatgaggttcgcgttcgccttgctgggcgtctgcccgttctcgtagcgcacgacgctcgcctcacccaatccaagcaaacgagcgaaaccctgctgcgtcaagccgtacttccttcgaatgcgcttgatgtcttgagccgtcaaatccttcgacatgagtcctcctatcaatcgtttgattg

SEQ ID NO: 9741 - DNA, 6594 bp, Unknown
  gut microbiota DNA sequence
ccaccgagatcaggaacgcgagcgatgcgaccatggccgctcccagcagcacgttcagcacccgctggcgcgcatgctcggcgaactggtagagccaatgaagacccgatatgcccaggaacaacacggccgcgcacacttcgttcgatagcgggctcgcacctacacgcgagaacacgtacagcgcgttatcgggattgcccaaatgcgtagccgaggcgacgagccccaccagcgtcacgagaaacgggatgagaagcgcaccgctcagccgcttgcgctcgtcgccctgcgcgcgcagcgccgccatgcccatgatgacgtacgccaccgcgcccgacggggccagcgtggtgaacaacacgagcgtgatctcgttgagcgcggtggcaaagccggtcatcgccaaagcctaccgatagaagcgcggatacgtcacgtcgatgtcgcgtgcttgctgaatgccttcgagcgaggccttcgcaagccgggcgagcccttcatagaacgggtgatccgccgcctcgaccagctggtcgaggaagtgcgacgaccaggtaagcagatggatttgcaagaattcgtccaggtcgtcgggctggttgcgcgcaaggtaggacatgagcgccagcatgaggccgatgtgatcctcgggggttcgctcatcggtcgtgcgcctcacgccgtgcgcgcgcatccacgcgcgcagctccaacgtgccctcgccgaacaccacgcattcgcggtcggtgtacaccgagccccagggcggggccggctccggagcgggaccgacgaacagacggcggtactcccacacgaggtcgtcggcgtcgatgccgtcggccaaaccgttcaccatcaagctcaaagcgtgacgcgcttcagccccgtcggcgaaaggccacgcatcagccgcttcctgtgcacggagctgcgccaccgcctgaaacgcagcgcccgccgtgccggtgcggggatcttgcaagaaaaacggggcgagcgtctcgcccacgaaagacacggcctcgagttccgccttgacggcatccatgcgatcgtccataggtgctcccctcacactagttcgcgaatattgcaaaccgcgccttccgcaagcacgcggctctcgtcctcttccaagcgcacaggaaggctcaacaccaaattaggtgcggttttcgatgaatcgggaagcgggggcatgtcggcgacacgaccgtgacgcgcccgcaaatcggagataggcccgaactcaagcgcccgcagcggacaagcttccacgcagacgggagcgctcccttctcgcgcacgttgagagcatccgtcgcatttcacgctgtgccccacggtccgatcgaccttgggcgcatggtacggacacgacagcgcacagtagccgcagccgatgcaccgatgctcgtccacgctcacgagtcccagctcgttcttgcccatggcacccgtggggcatacttccatacaggcggggctcgcgcaatgattgcacgccgaagacacgtagaacgcgaagcaatcctgcgcccagcacccgcgctcgtccttcgaccagctgccgccgacaaactcatacacctggcgaaacgacacggaggcgtccagattgcggtagtctttgcacgcgagcatgcacgttttgcagcccgtgcatcgtttcgcgttgaagtagaaaccgaattgctccaccgtgtcctcccccgatcgtcggccatgccgacgcgccgcgcgtccccctgcagcgcaccgggtgccgcgccgtcagaccgcgcggcacccgcttgatactgctcagaagattctacgcgatctcgcgctcgttgagcaccgaccccgtcgcatctccagccggcttcgcgttcaccggctcggtgatcacgatgttcggcttcgtctcgtcggcgctgggcagcggggcgatgtcggccatctcgccgtacttctggcgcagctcggagatctcgccgaagtcgagcgcgcgcagcgggcacgcctccacgcagatgggctgcttgccctcggccacgcgatcggcgcacatgtcgcaccgtaccgccttctttatctcctcgtccaccttcggcgcgctgtacgggcacgcgatggcgcacgtaccgcacccgatgcacttctcgggatcgttgttcacgatgcccgtgtcggggtccttcgagatggccccctgcgggcacttcgccatacaagccgggctatcgcaatggttgcacgcgacggagacgtaatagccgaacgcgtcgttggaccacaatccatcgctctggctccacgtgccgccgccgtattcatacaccttccggaacgagatctcggccgacaggtctttgttgtccttgcaggccagcacgcaggtcttacatcccgtgcagcgcttgccatcgaaatgaaatccatactgagtcatggtctaccccctaggccttcttgacttcgacgaggttcgtgtgttgcgggttagccttcgccaaaggcgtcgggcgaggagaggtcagcgtgttgatgcagccgcccttgtccaccttgtttccggacatgtcggcgtcgtgccaagctccctggcccatcgacaccacgccgggcatgatgcgcggcgtgaccttcgccacgatctcgacggtaccgcgatcattgaacacttgaaccttgtcgccatctttaatgctgcgctcgctggcgtccagcgggttcatccacagctcttgcgggttcgcctgcttgagcacgtcgatgcagccgtaagacgaatgagcacgcgccttatagtgatagcctggcatctggagaggatacgtttcgcgaagcggatcgtcccaaccctctacgcccggcgcgtatacgggcaacgggtcgatgatgtcgcctttggccagctcccatgtttcggcgatctccgccaactgctcggagtatatctcgatcttgcccgatggggttttgagcgggttcgctaccggatcatcgcggaaatccttgagcgcaacctgatgaccgtccggatccttacgacgataaacgcccatttccttcatctcgtcgtacgttggaagatctgcgtcctccttgcgagcttcctcgtagcagaactgaagccaagcctcctcatcgcggccctcggtgaacgcttcctccttgcccatgcgcttggcgatttcacgcagatcggcgtacagcgtgcgccgttcgaacttcggcgaggtgaccggctcgcccatgatgataaagcccatgttgccggcatagtcgttcgagacgaagttcggctgctcgaccggcataagatcgggcagcagcacgtcggcgtacttggcggaatcggtcatgaacgtttcccacaccacgatgaactcgcacttgctttcgtcttgcaggatctcgtgcgtgcgattgatgtcgctgtgctggttcgtgatcgtgttgcccgcgtagttgaagatcatcttgatgggcacatcgagcttgtccttgccgcgcacgccatgggcgagtttcgtcatctcggtgccgtgatcgatggcatcagtccaggtgaaggtagcgatcgacgtttgcaccgggtttttgtccgacggcaccgagaacgacgagaaatagaatccgtcaaggtcggaacccgtgttgccgccgttgatgcctacgttgcccgtgagaaccggcagcatgcagatggcgcgtgccgtctgctcgccattcgattggcgctgcggacccttgccttggtagatggcgcagggtttcgcagtgccgatctcgcgtgccagctcgacaatggtatcggcgggaatccccgtaataccttcggcccatgcgggcgttttctcgacgccgtctacgccttgacccatgatgtaggctttgtacgacttgttctgcccctgcgccgattccggcatggtatcctcgtcgtaaccgatgcagtaggtggccagaaagtcgtgatccactagatcttcctcgatgagggtatgggctacggcatcgacgagcgccgcatcagtgccgggacgaatggggatccactggtcggcccgcgtcgccaccgtgtcgctgtagcgcggatcgatgacgatgacctttgcaccgccctgctcgagcgcctgttccaagtggtacgtaggcccggcaccgccagccttcgtttcgacggagttctcgccgaacatcacgacgagcttcgcgttcacgatgtcggagttcgagttggcggcacgcttgccgtacagatacggaagggcggcggatatctgagccgagctgtagctgccgtagcgccccaggcatccgccgttcatgttgatgaaacgagaaaggaacgacccgatgttgctggcgttgacgcccgaagcatagtgattccagatggcttcaggaccgtattcgtcgaggatacgctgatagttatcggcaatgaggtcgtaggcctcgtcccaggaaatctgctcgaacttgccttcgccgcgtttgccgacgcgcttcatagggtaagacaagcggtcgggatgattaatccaacgccggatggaacgaccgcgcagacatgcgcgaatctgatgatcgccgtacacgtcatcgcccgtgttgtcgctctccacccacgcaacttcgtcgttcgtcacatgcaggcgcagcgcgcagcgaccttcgcagttgacggaacaatggccccaaaccaccttctcgtcgaccgtctccgatgccccgccagaaacttcatcggttccttgcggcgagcacgcgaacagcgtgccggtgcccagtgcggcggcgcccaggccggccagggccgagcctttcacgaacgtgcggcgagaaacggcatgctctttcgttttcgtcatgatccctccttgattccctcgtctgctcatgcgttccgtcgggacgaaacaccgcgcattgtaggccgatcggcgcaatcgcgtgttacatgaaatatgtacattttacgtttagcctgttcagaagctcacgatgtgcgaaaccgctatcggattcccccgcattcgcgccagcgcccccgctatactgatgcaggggatattctacccgtcgaaggctatcatccaggggaggatcgtagtgaacgcgacgaccgtactgcgcgctttcaaaccgaataccacgctgttcggctatgcgtcgttccttgccgtgaatgccgccggagcgtggggcggcgtgttcccgttcttgccgatgaagcttcaagaaccgcagacgctgttctggttcttcctcgtgcagtcgctcgtgttcgccgcctgcttctttttgagcgtagtaggctcgtaccatctgccggggcccacgcgcttgttcatcgtcaggttgtcggccgtgccgtatctgctgggatggttctgccttatcggcgccatgtatctggacgcatggacgctgcccctcgtcatcgcgggcggcgggttcatcggcgtgggatcggccggtttctacatgctgtggcaacgactgttcgcaagccaggactcggacgcgggcaaccatgacctcatcctcggcaccgcgtacgcttcggtgctatacttcgcgctgcacctcatcccccgcgcggtcaccgtgtacctgattcctctggttatcacaccgtttttcgctctggcgatatcgttgaagagccgcgagatcaatttcgaccagcccatgttcgaggacgtgccgaagaagaacagaggcgtgtaccgccaggcaatctccacccttgcgcgcccggcgctgtgcgtgggctcactcgggttgtgcgcggggctcatccgcgcgctggccatcgacgatccggccatcggatcgctggtgaacgcgttgtctatgggcgcatcgctggttaccgccgtcgcgttcatggtgctgtggcagttcaagagcgtgcggctcaacgtagtttcgctgttccgcatcgtgtttccggtgatcatcaccggattcgtgctgctcccgtttctgggcgacgtctacgcccgttggctcgcggccgtcttgtacgcggcgtacagcgtcaccatcatgctcatgatgatccaatgtgcccagtcgtcgcgcgaccacgggacgaaccccgtgttcgtgtacgggttcttcggcggcgtggtgtacgccttgcacgatgcagggttcatcggcggaacgcttgcgggacaggtggccattccggggctgtcgtcgcacgctgtggttgcgctcggcgccgggtacctgctgggattcatgtacttcttcggccagggcggcttccatagcgccttgcgcggcgcacatcgatcggttccggacgtcgagctcgtgtcactgggaccgacgcccgacggttccgcaaagcgagagggaaccgtccgaccagctcgcaaacatgccgatggcgagcctgtttaccaggaccgcatctccaagcaggcggcccgcatctgccaggagttccgcctgagcgcacgagaagccgaggtcatggagcacatcgtgcgcggcaagaccgtggtgcgcatcgccgaggagctggtgatctccgagaacaccgtgcgcatgcattcgaagcgcatctacgccaag

SEQ ID NO: 9742 - DNA, 322 bp, Unknown
  gut microbiota DNA sequence
aggaagctagccgagggctcttgcttgttcgaggcgttgcttgagatattcgtagtgagcgctttcttcggcggtccatgctccgaagaggatccgctcgagcgcttcgctcgcttgcccaccatcgtccgcgctagagaagaggcgctgctcgctgcgcgagtacaggccgatatcgtcgaacatgcccgactcttccagcaccttcaagttgccgacgatgctcttgacgatggaaaggtgatgggcaggatcgaccgcgcgcggctccgttccggcgatgcgcatctgctcgtatcgcaactggcagctgatgagcgat

SEQ ID NO: 9743 - DNA, 563 bp, Unknown
  gut microbiota DNA sequence
acgaaaccgcgggtggacggagcggtagtcatcaccgttaatcacaatagcattgctttcctcaagtgcgagaaagacatcgtgcagcgttgttttgcccgcaccgctctggcctcctagcaaaaccgcacgcgggttatctgacggagctagccgtttgtcgataacaagagtaccgataagcggcttaagcgctgcaagaaattctctatccgaatagctttcgagatccgtcatactaagctgccttagcttgacgactatccaccatattcttcaaacattcgatttgccctctgatttctgaaagcctcactgtattcaagtgcccttctgaaatgatgcgtggcttgatgtgagaaatctgcttaagtacatcttcgtacaccgcttcagcaatcgcatcctcttgctcacgtgcggcaagaagcaaattgatcgtatcgcccatgagttgcgcagcctgttcgttcagcacttcttgttgcagcgtgatttcgtacatttcgttaatatccatgatgtccccgtcctcgtcgaaggttaccagagcgtagatgatc

SEQ ID NO: 9744 - DNA, 697 bp, Unknown
  gut microbiota DNA sequence
ccgctcatggtgcgagcgctcacatgcctcgacgctgtggcgctgccggccggcgagtgcacgtctccgctgaccgaggaggcctcgatggcgtattcgccgtccgaaccggagaacgaggcgttcacgctgccgctcacggcatcgaacttcgcgtcggtggctgccacgcccgccgccaggatgtcgccgctacccatgcgggcgtcgagggtcgccgtgttcacgcctcgaagcagctgtccgccgctcgccgtgtccagcttcacgatctcggtcgcctcgacgtcggagaattcgatgttgccgctcatcgtggttgcgctcaggtatgcgcactggacgcgctgcacctgcacgttgccgctggcggcgttcgtcacgatatcgtccgcggcgaggcgggagagcgagatgttgccgctcgcggttttcgccgtcactgagcccaacctgtccagatctgcggcatccacattgccgcccatgaggtcgatgtcgagcgtgcccgtgtagctgcgcggcaccttcagaacggtagagtggtcctcgaacgatccgatcatcatgatgtcgatggccggctcgcgcgagccttcgacggtgacggtgccgccgttgtcgtccacgtcgaagctcttgcgctcgttcgtccagtacgtcacctcgatggcgtcgccgtcggtcggctcgatgc

SEQ ID NO: 9745 - DNA, 1059 bp, Unknown
  gut microbiota DNA sequence
ccgatggccggctcgcgcgagccttcgacggtgacggtgccgccgttgtcgcccacgtcgaagctcttgcgctcgttcgtccagtacgtcacctcgatggcgtcgccgtcggtcggctcgatgcgcacgtcctcgcccatgtcgcgcaggacgatggcggtgtgggggttttccgtctcgggtgcgaacgtcttcgtggaggacgtccaattgcgggattcggtcgagaggttctcgaagttgaacccggccgccgcgaacgcgccgaacgatatggcgcctccgccgatgacgaggatggttgctatgacgagcaacgtctttttgccgctagacatgagctgctccttccggcgcgatcgggctggcatcgttgcgcttcagcttgatgaacagccccttcacccagcgggcgaacgaatgcgtgaggttgacgagccccttgctggcggccagcacgccgaaccaagagaacaatcccaggcctgcaccggccaggccgcagccgaagacccagatgcccgagagcggaaaccccgtggccgcgcaccaggccaggccgaacacgccgatgggcgcgcatagaagcagcatggccacgacggcccacagcgccacgacgaccgaccaaatggccaggtagatggccaacaccatgcaggcgaacgccagcgccagcgtcacccagatgggggagaggatggcaagcagcacgatgttgagcgtgcggctgccggtgttcgccttcgcgatggccttgggaatgggcggcgtctcggcgacgatctgagctgcgatggcgtgcaccgatcccagcgcggccacggcttcctgctcgctcatcccgtcctcgatgcggtcgtcgatcatctcggcgtagaacgcgatcgattgttccacctcgtaggagggcagcttgccgagcgcatgcctgagcgcatccaaaaactcggtcttgttcatcggttggcacctcgtttcacatactcgtagacgtccaatacgtcgtcccaatccttcaagaactcgtcgaggtacgtgaccccggccggcgtgatg

SEQ ID NO: 9746 - DNA, 304 bp, Unknown
  gut microbiota DNA sequence
gaaactcggtcttgttcatcggttggcacctcgtttcacatattcgtagacgtccaatacgtcgtcccaatccttcaagaactcgtcgaggtacgtgaccccggccggcgtgatgcgatagtacttgcgcaggcgcccgttgtgctcgatggcgtaaaccgtcagcagccccgctgattccaagcgtttgagcagggggtacagcgtcgattcggtcaaatgcaaactcgaaggcacgtctttgacgatctggtacccgtacgagtcctggcggttgatcgatgcgagcacgcaaacatcgagg

SEQ ID NO: 9747 - DNA, 3409 bp, Unknown
  gut microbiota DNA sequence
cgattccaagcgtttgagcagggggtacagcgtcgattcggtcaaatgcaaactcgacggcacgtctttgacgatctggtacccgtacgagtcctggcggttgatcgatgcgagcacgcaaacatcgaggaaacctcgtttcaattgtgcatccatcgcatacctcctttcgccttatactatatgacacatagtataaggcgtcaacgggtatttggagattccgcgggaaggatggcggggaaggggctgcgcggctgcgacggctgccgatgagctgccggggctgtgcggttgcgacggctgccgatgagctgccggggctgtgcggttgcgacggctgcgacggctgccgatgagctgctggggctgcggggacgctccgagatggggaagggcctggtcgcggagccttcccgctcagccgaagtgcgcgagtgtctcacgtgaaacatttgtgcggttctccatcgaagcgaggcgcgacggtatcggtcgcgagaacccgggcgggagacgccgatcgcgcgctcggcgccgttacggtagtgcgcggcacgtcgaccggcgcggcatgtttccgtggttccatgtgcagcaaaaacgagcttttggcacccctcggtgctcttcggcattttgctcgttgaaactttgcagcaaaaccccaggtcgcgtttcatcgagccttgggaatgcggcattcgacctcggttcggcggtttccggacgggtccggcgtgccaaaagggaccccggacgtttttctggactgaatttcgatgaggaaagaggtccgtgaatggcttacggcaaagaatacaaggaggaggtcctgagcaggttccacgcgagcggcatgtcgatgcgcgcggcgtgctcgagcctcgaggggttcccgtgcgcggcgacgctctcggccttcgcgcgcgaggagggggccggcctcctgcgcccgcccgcgctcgcggtgccgggcaggtgcgagggccgccgggcatgggagccctaccccctcgggacgaagcgggaggcgatgcggctcctcgcgggcggcatggagccgcgcttcgtcgccgggcgcctcgggatcgcgagcgccgcccccgtccgcctgtgggcctccaggctggggtgcctcgacgggctcgacggccggtcccgtcccgacggcgagcgcgagcgcggggaagctgttacgatgttcgcgcgagggtcgtccgtctccgagatagccggacggatcggcgcggacaggaggaccgtgcgccgctggctggacaaggccggcgtcgagcggaagcgcgcgacgaaggggaagggcggcgagggcgtggcgaaggaagaaggtggcgagcggggcgaatggtcccgcgcatggggcgacctccccgaaggcgaccccgtcgagcgggcgcggctggccgaggtcaggctcgcggaggcgctggcggtgttggacgtcctaaaagcaccaggcccgggctctttgagcaattcggagaagcgccgggcgggcgagagggcgagggcgatggcggcgagggcgagggtcgatgacgtcctgagggatttccgcatcgccaggagcacgtacttctcgcaggcggcgatggcggccaggcccgacaggcacgcggccctgcgggcgcgcgtgcgcgcggccttcgagggctcgaagggccgctacgggtcgctgagcgtgtgggcggccctgcggcggggcgagggcgcgcccgtgcgcgcccgcgacctcgcgcccggggacatggaggcccccgtcgtcgtctccgagaaggtcgtgcgccggatcatgcgcgaggaggggctcgtcccggtccaggtcaaggagcgccggcgccacagctcctacgcgggcgagaccgacgagcgccccgcgaacctgccgcttcgagaggacgggacgcacggcttccgcgccgacgcgccgggcaggctcgtcgtgaccgacgtgaccgagttcgacctcggcggcctcaaggtctacctctccccgatcatagactgcttcgacggctgcccggtggcgtggcggacgtcgacgcgcccggacgacgagctgacggcgggctcgctggaggacgcgctcgggcgcctggaggagggctgcgccgtccacaccgacggcggcggcaactaccgctccgccagatggaagggcgtctgcgaggccaacggcctcgtcaggtcgatgtcgcgcaaggccaagagccccgacaacgcgagggcggagggcttcttcgggacgctcaagcaggagttcttctacgcgagggactggaaggggacgacgaaggggagcttcgtgcgggccctcgacgagtacatcgtgtggtatcgtgacgagaagatcaagagatcgctcggatggaagacgatagcggcccatagggcggcgctcgccgcagccgcgtaggagtccagaaaaacgtccgtgccccctggctaccgttttgcgcccaacttccacgccggacgacgatgtttccgcggcttgtcggggcttgtggatgttctctgacgggatgatggcgggggaggggcggcgcgtatagtgggaacatgaagaaatccgaagcgctcaacatcctggggctctcagacggcgcgaccgacgatgcggtcaaacaggcccaccgcaagctggtgatcgagcaccatcctgacaagttcgcgctaggatcgaaggagcgcgaggaggcggaagagttcacgaagcgcatcaacgaagcgcgtgacgtgctgctcaaccgttcatggacgcccgagttcgatccgcgccgcgatcctcgcccctacgcgaacaacccgtacgcccaccccacgcagaacccttacggcggcgcgggccagggcggcgatcccttcgcgggctggccgttcggtcaggcccctggccaaggccaggggcagaccacctacgtatggacgtcgtgggacgcgccgcgctccggcggttccggcgtgggcagccagccgttcgaccctttcgacccgttcgcgcccttccgcgcaacggccgagccgcgcaagaccccgcaggaagctctcgacgaagtcaagcacgacctcgggcgcgaagggctcgtcattgcgggcaaagcggcgctgttggcggtggcggcgctcgcgggcaccgcggccaccgggctgttcctgtacgtgatgatctccatcgtatacggcctgtggaagcgcttcggctcgtgcctcatcggtctcatcgtgccgctcatgctgctgggcgcgcccttcgtgttcatcatcgcgccccggcagggggccgtcaccgcggggctggccgtggcgttcctgctcgcggtgctgttcgacgtggtgaacgtgcgcaacctcctgcgcgccctgcgcgtcgcgcgccgggcgacgt

SEQ ID NO: 9748 - DNA, 1806 bp, Unknown
  gut microbiota DNA sequence
tgtgttcatcatcgcgccccggcagggggccgtcaccgcagggctggccgtggcgttcttgttcgcggtgctgttcgacgtggtgaacgtgcgcaacctcctgcgcgccctgcgcgtcgcgcgccgggcgacgtcctagcggagcctctgtggcgggaccgccgcgtcccgcttgcagcgcgcaccctcatgctatactgaatcattccgtcatggttcgtcgaaaggggacgctggttgaagaaagcgctgctgctcgtcatcggcatcgtcgcagtgtgctttctcatcgcgaacgccgattacctggcgagcttcctcgcgacgctcaagaccggcgcgctcgtgccgctggtcgtggcttgcgtgctcatgctggcgcgccacctcgtgcaggcggcgtcctacgacgcggccttcgaggcggtcggccataagacgggcttctggcacaacgtcgtgctcatcttctcgctggtgttcatcaacacgttctgcctgttctcgggggcgacgggcgtggcgttcatcatcgacgacgcgcaccgcacgggcgcggacgcgggcacgtccaccagcggcgccatcctctcgcagatcggctacttcgccgccatcctcgtgatctccgtcatcggctttctcaccatgctgctgtccggcagcatgaacacgctgttcctcgtcggggggctggcgttggcggcggtgctggcggcgctgtccagcatgttcgtggtgggctatcgcaaaccgcgcgtgctgttccgcctgttcatcggcatcgagtcgctcatcaacaaggcgttggggctgctgaagaagcatctcaagccggcctgggggcgcaagatggccagctccttcatctcgtcggcgggcatcctcgcgaagaacccgcagggcaccatggtcaccgtgtcctacgcgtcgttctcggccatcctcaacatggcgtgcctcgtggccatcggctacgcgttcggcttcgagaacgtggccgcgctcgtggcggcgttcgcggtggcggccatctcggtcatcctgagccccacgcctcagggcgtgggcgtggtggaggcggccatcgcggccatcctcacggcgcacggatgctcgctggccacagccacggccatcgcgctggtgtaccgcggtatcatgttctggatccccttctgcatcggcgcgctgctgctgtcgcagtcggggtttttcgccgacaagaagagccctaccgaggagaagcgcgcgaaggacacggcttgggtttcgggcaccatcgtgctcatcgtgggactcgtgaacatcggcatggcgttgatcccgcagacgttcaggccgttcaccgcgctcacggattggatcaacatgggcggcctgctcatcggtccgttccttatcgtggggagcatcgtgctcgtggtgctggccgtgggactcatcctgcgcttccgcacggcgtgggcgctcacgttgggcgtgctcgtgctggtggctggcgcggagttcctctacgtgaacaccgtgcaggttgccgtggcggctctgctgctggtgatgtggctgttctggaagcgcgacgcgttcgaccgtcctatcgctccgcaagacgacgcgccgcgcctcgtgcgcgagttccgcgagaacgtcgagcggttccgcgcttggcgcgccaggcgggctgcggcgaaggcagcgggtgagcagccgctcgccggcatcggcagcgccatagcctcgcgccgagaagagggcggcgcgcgctcacctgcgaaaaggaaaacgggttgggaacaacgtgcc

SEQ ID NO: 9749 - DNA, 3663 bp, Unknown
  gut microbiota DNA sequence
ggcgggtgagcagccgctcgccggcatcggcagcgttatagcctcgcgccgagaagagggcggcgcgcgctcacctgcgaaaaggaaaacgggttgggaacaacgtgccgaaaaaggcgcggagatcatccgcgaggctggacatgagggtatactgccctttggcgatgatgccgagccagcgcccgcgggggcggcaacggcaggcgtcgccgattctgcagcaatgaaggaggagtcaaaccatgatcgtgctcgatgagccctacgtgtccgaacctctgatcgcctggctcgaggagtcccagcatcccgtgctggacaacgctttcgcgcgttcgatcgccgacggacgcgctctgaacctcgtatcgtccgacgaggcggttcgccgtatcgacgcaggggagcgcgtgtacacgaactccgagaacgccctggcctggatcgtcgagagcgcccacaacgaaagcctgtcgcgcgccatcggcctgttcaaggacaaggccgccatgcgagctgcgctggccggcctcgaccccgacctgttcttcaaatcctgttcggtggacgagttgttcaagctcgatttctcccagcttccggcgcctttcgtgctgaagccgtcggtgggtttctgcagcatgggcgtctacgccatccagaaccgcgaggactgggagcgcgctctggccgacatccagcagaacgcctcgtcgtggcacgacatgtaccccgaaagcgtcatcggcgccgggtcgttcattctcgaaggctatcttgagggcaccgagtacgcgctggacgcgtacttcgacgagacgggtcgcgcgcacatcctcaatgtgctgcgccacgacttcacctcgcctgaagatacctccgatcgcatgtacgtgaccagcgcctccatcgtgcgcgacacctccacgatgttcgcctcttggctcgaccgcgtgaacgcgctcatcggcgcgcggaacttccccgtgcacgtggaggtgcgcgtgtcggacgggcatgtgagccccatcgagttcaatccgctgcggtttgcgggcctcggcggcaccgacgtcagctggtacggctacggctaccgcacctaccaggcgttcctcgaagacgacgagcccgacttcgatgcggcgttcgacggcaagaccgacaaggtgtactccatgtcgctgctgaacgcgccagccgatgcctcgggcgacgaagacttcgactacgacgcgttcctcggtcgattctcccacgtgttggagatgcgccccttcgacgtgaagcgcgtgggcaactacggcttcctgttcttggagacggatccgtccacgtccgacgagctggatttcctcatgcgctccgatcttaaggagttcctccgctaaggcggaggagcgcacggcgcacgggctgatcggtgaagaaactcaacattcgaaacctgctcatcggactggtcatcgtcatcgtgctggccgtggtgctgctgcgcggcgaccagctggtcgagctcgtcgagaccatcaaaaaaggtgccgtcattccgcttatcgcggcggtgtgcacccagttgggcaagtacttcgcgcaaagcttctcgtactcgtacgccttcgaggccgtcgacgagcacatgaatccgcgcgagacgctgccgctcgtgttcggtacgttcttcgtgaacactatcgcgccctctctcaacctggcaggcaccacgctcgtggtggacgatgcgcgccgtcgcggcatcgcgcccggcaaggctacgagcgctgcgttgctcatgcagatcaccgtggactcgggcttcgccaccatcatgctcatcgcgttcggcatcttggcggccacggtgggtttgtcgcccttgtggtttctgttggggctgctggttatagcgctggtcagcgcgatggtgcttatcctcgtgctgggacgcaagcgtccggctctcgtcctgcgcgccctgcgtcccatcgaacggcttgtcgaccgcgtcctcgtgcgcttcaagaaaaagcccctcgacccctgggtcgagcgcatcgtgggctcgttttccgacgctgccggccttatcgcgcataaccccaagacaacggcgaaggcgttcggctgctccattgcggccagcgcttgcgagctggcctgcttcagcttggtgggcgtggcgttcggcgtgcatcagcccgaacctctcatctgcggctacgtagtcgccacgttgttcgccatgatctctatcacgccgcagggcgtaggcgtggtggaggctgccgtggtggtggcgttcacgtcgttcggcgtgtcgggcgcggcgggcctgtctatcgcgctcgtgtaccgcggcatcgtgttctggatgccgttcctcatcggcgccatcctcattcaaaccaccaagacgttcaagcacgatgcgaagcgggccgtgcgcgaccagaaaggcaagggcttgcgccgttaagcccgaagcccgtcatccgttcggcgcatccagccttcctccgcggcctcaatggtaaattgacgacgtttcggtgtgctccatgttctagaatggcaggatgcatgcagcgcggctccggctgccgtacggaacgaggggactatgaaaaagaatgtcatagggcgcgcgggcacggctttcgcgcttgtcggcgctttggcgcttgcgggttgctcgggctcttcggcgccctcggaggatgcggtttcgtccgtgctcgacccgtccgatccggtgcaggtggagctgtggacctattacaacggcacgcagcagcaggctttcgaagacctcgtcaaggacttcaatgcgacgaaaggcaaggatctcggcatcgtggtgaccagctccagccaaggcggcgtcaacgacctggcctccgctgtcaccgattccgcgcaggagcttgtgggttcggaggcgatgcccgacgcgttcctgtcgtattccgatacggcgtcggtcatagacgggttcggcatggtggccgatctgtcgggctaccttactgaagaggagaaggccggattcgtggagggctttctggaagagggcgatctgaacggcaacggcagcctcaaagtgttcccggtgggcaagtccaccgagacgctgcagatcaacatgaccgatttccagacgttcgccgatgccaccggcacttcgctcgacgagatgagcaccattgagggcatcgtgagagtcgcggagcgctactacgagtggaccgacgcgcagacgccgggcgtcatgggtgacggccgtccgttcttcggacgcgatgctatggcgaactacctgatcacaggttcaaaacagctgggtcacgagatttttgaaattgagaacggcgtgtgcgcgctgaacttcgaccgcgctacgatgaagacgctctgggacaactactacgtgcccatggtgcagggctggttctcggcggagggcaagttccgttcggatgcggtgaagacgggcgatctcatctgctatgtgggctcatcgtcctcggtggtgtacttcccgcaaacagtgacggtggacgatgccacgagctatcctatccagttggacgcgttgcccaacccgtctttcgagcacggcaagccgtgctcgccgcagcagggcgccgggttcgtggtgac

SEQ ID NO: 9750 - DNA, 439 bp, Unknown
  gut microbiota DNA sequence
ggtgacggtggacgatgccacgagctatcctatccagttgggcgcgttgcccaacccgtctttcgagcacggcaagccgtgctcgccgcagcagggcgccgggttcgtggtgacgaagtccgacgagaaaaaggaaaccgcgtgcgtcgagttcctcaagtggttcaccgctaaagagcagaacaccgacttctcggtgagcgccggctacgtgccggtcaccaaggatgcgctgacgcttgagaacctccaggcggcggccgagtcgatcgacggcgcttcgggcaactatctggtgaacctgcctgccacgctggataccatcgaggcaggtgtgtacgcgaacccgccgttcaaaggcggcgtcgaggcgcgcgccgtccttgaccgcgcgctgtcggacagggcggtggccgatcgtgcggcggtggtcgaagca

SEQ ID NO: 9751 - DNA, 3991 bp, Unknown
  gut microbiota DNA sequence
cggtgtgtacgcgaacccgccgttcaaaggcggcgttgaggcgcgcgccgtccttgaccgcgcgctgtcggacagggcggtggccgatcgtgcggcggtggtcgaagcaatggcggcgggagcatcgtccgaagaggctgtggctccgtatctcgacgacgcagggttcgacgcttggctcgccgacctggagacccagctcagggaagcgatcgcttaatattgaggatgcgttccggacagaagcgcacggctagacggcgaggagtgacgtttcgagctctcgtcgttttgccgttctgcgtcgcgttgggaatccagggcgtcgtctgcgctaccgtgctcgcgcgcagcgagatactcaaacagatggagatcgacgcgtacgatctgttctcggagcgcgtggcgagccgtgcgggttatctggaaaacgatatgatattccgctggtcggacttcgatcccgtggtggaaagcgcgaccgccagcattgacaaggcgctggccgcggctcaggcaacgtcggcggatatcgaaaccgggtccgatctggccatctccataatcgaggcgacttcccaagaccttctggcctattctcatcgcgccgaagtcgacggcgtgttccttgtgctggctgacggcgcagaaggacaatcggacaatcggacggcgctgtacatccgcgactcgaaccccaaggtggaggttgccaacggttccgatctcatgttggccgcctgccccatcagcatcgggcgacagctgggcgtcaccctcgacagcatgtggtccgccacgttccccttggcagccgagggtgaaagccggagcgcattctattacgagcccgtgcgcgctgccgagcgctaccctgaggccagcacgaacgatctgggttactggggccgtccggtcgacttcggatgggcgggaaccccttccattacgtacagcaagcctatcagggatgcgcaggggggcatcgtgggcgtcataggcgtggaagtgcgcctcgaccgcgttgcatccttcttcccgtatcgcgatctcgccagcagcggcaacggttcgtacgtgctggccatcacgaacgaggacggcggcttcgtccgagacggcggcgtggcgccgctgccggacaaggagcgggtgtacgaggcgcttaccaccaccggcgcatcgcagagcctgtatctgaaggagtctgcgttctccgcgtcgatcgacggcgccggacgcatggtggtagatccggcggacgacgcttcctccgacgcgcgagccgtcgccagtgcagccgagatccagctctacgacagcacgtccccgttcgcgtacgagcattgggcgctcgtcgggcttgagcgcgaaggcgagatgttctccgcatcgaagacgctgtccgacaacctcaccgccgtgttcgccgcatcgctcgtggtgggcttgctgattgccgtcgtcgctgcgtggctgtcgtcctcacgtttgcggcatctcatgtccgaggtgcgcgcggcgcagcccgagcagcctattgcgttcactcccacgggcatcgtggaggtcgacgagctgtccgaggccatcgagtcgatgggggaggaagtggccatgaccgcatcgcgcctatcgcgcatcctgcgcctgtccgaccgcggcatcggcgccttcgagtacagctacgaaacagatgtcatcacctttaccgacgggttcttcgccacgttgtcgacgctggaacctcctgatccctcgtacttcgatccgcagcgcattgcgacggggtcgttgagcgcgagcgagttcgagagccttatgaaatggtacgttccctacatcgaggtggaggaagagggccgctacctcttcacgggcccgcatcgaacctcgtgggttcgtctcgtggtggtggaaagcggcgagcacaaccgcgtgctcggcctcgtggaggacgtgacgcatgagatcgagacgcgtcgccgcatcgagcatgagcgcgaccatgacatcctcaccgggctgttcaaccgccgcgcattcgagcaggaggttaccgacctgctcgcgcaacgcccgcctgcgctgggagcgatgctgatgctcgacctcgacaacctcaagttcatcaacgatatctacgggcacgattggggcgatcagtacatcaaggcggcgggccgcgtggtggacgaggcgttcagggacaagggattctactcgcgcatctccggtgacgagttcctcgtgttcgtcgacgtatgccccgatcgcgcatcggtggaagaccttttcgccacgttccgcgccatgctcgatgccagctccatcgtggcgcccgacggaaagacgctcaaggtgcgcgcgtccatgggcgcagcgttctatcccgaggatgcgacggacttcgctcacctgcgcgaatacgccgacttcgccatgtacctggcgaagagcagccgcaagggggatctgttctcgttcgatcggcaaagctacgaggagaagtcgttcatcgtcaacaacaaggaggacttgaaccgcttgctggaggagggtctcgtcgagtatcacttccaacccatcgtcgacctgcgtgcgggcgagccggtggcgtacgaagcgctcatgcgctcgcagttggacaccattccgacgcccgaccaggttctggcgctggcgcgctcgcagtcgaagctctaccgtgtggaacacctcacgtttttcggcgcgctcgaggcgttctcccgttatcccgaggcgcatggggccactctgttcgtgaacagcatcgctacgcagcgcttgtcgtccgacgacgagctcgtactgaacgagcgctatccggacctgctcaagcgcctcgtcatcgagatcaccgagagcgactacagccgcgagatggcgttgtacaaagaggcgctggcgcggcgcttcggcgcgcgtctcgccatcgacgacttcggcagcggcaacaacggcgagacgtcgcttttggactaccacgtggacttcgtgaagatcgacatggagatcgttcgcgacatcgacgtggcgaaagatcaccaagacatcgcccgcaacctgatcgggtacgcgcatgatcgcggcatccgcgtgatcgcggaaggagtggagaccgaggccgagctgcgagcgttgcgcgaattgggcgccgattacgtgcagggctacctcaccgggcggcctgctcctgagccgcgcgatgtcgacgacgaggtcaagcgcctcatccgcagcctgaacgacgcgcggtaggggagggacggcagcgcgggtctgtccggtgccgcgatggcgcgctgcgggtatacttgacgaaaaaccgcacggaggccgcgacgatgcggcctcgttaacgaaggaggcttccatggcgttgaccgatacgctgcgcatcgagaccgtttccgccgacaagcgccacgtcgaggcgacgatgcccatcgtgcccgaggttttccagccgcacggctacctgcacggcggcgccaccatcgcgctgctggaaacggtggcaagcatcggcaccgagcagaacacggatttcgacaaggagcgtcccttcggcatcgacgtgcaggttcgccatcgtaaaagcggcaaggagggcacgctgcgcggcgtggccgacctcgaccgcgaggaggtgtcggagcgcacgggggccgtcaagcagtactggaacgtggcggcgtacgacgatgcgggcgacgtggtgtcggacggcgtgatcatgacgaagatcgtatcgctcgcccgcctcgcccagaaggagcaggagcggacgtcttagagcgaatcgactcttttagacgcgtttgcgggcagcgtgacgacgacgaccgtgccgcgcggttcgttgggttcgagggcgatggagccgccgtgcgcttccacgatgtgttgcgcgagcgagagccccagcccgtagccgcccgtctcgcgcgagcgggccttgtcg

SEQ ID NO: 9752 - DNA, 1233 bp, Unknown
  gut microbiota DNA sequence
cgtgccgcgcggttcgttgggttcgagggcgatggagccgccgtgtgcttccacgatgtgttgcgcgagcgagagccccagcccgtagccgcccgtctcgcgcgagcgggccttgtcggcgcgatagaaccgctcgaatacgtgcgcgcggtcttcggggtctatgccgcagcccgtgtcggccacctcgacgacgcactgtttcggtcccgatgcgcgcgtgcgcacggttatctcgtcgccgggcgcggtgtacttgagcgcgttgtccagcacgatgcccagcagctgccgcaacttgtcggcatcggcctctatcgtttcgcgcgagcccgtttccacttcgaggcgcttatcttggagcgtggcgaagtcttcgtaagctgcgcacgcttcgcgtacgagcgcgtcgaggttcaccgcgctcgcatcgagcgacgagcgcccggcatcacccagcgacagctccatgaggtcgtccaccagccgcgcgagacgcttcgtctccgaggtgatggcgttcacgtcctcgaagcggtcgacgatgcggctattggggctgtccagcagcagctcgccggtggtctggatcacggcgagcggcgtgcgcagctcgtgcgaggcgttctgcacgaattccgtctgcgcgcgcatgttcgccacgatgggcttgagcgtgcgccgcgaaagcaagtagcttgcgcccgctgccacgacgacggctgccgccaagtagacaatcaacgtgcgcgtgaagccgtctagaatggcgatctccgagtcgacgttcaccagcgtctgaagatacgtggtctcgccttcgtcgtttgccgcatacgtgatgccgcggtactcgtgaccccccgcggcaatctggtagacgcgttcgaggtcgttcttgtcgaaggggatatggcgcaggaaggaaggataggaggcgtacagccccacggtctcgagaaggtcgccctgctcgtttcgtatgagcgtgatgaactgcggatcggcgtccacgatgctctgctgaagcgtgagggagaggtcgtcgatcgccgtggcgtcggagggggcggcgccgtcgggctcttctaccacgacgtcgtcgacgatcgcggatccgctgccggcggcatcgagggttatgtaatccgattccatgccaatggcctgcaggttttcgtcggcgtttcggtagatattcgagctcaccatggagtagacgcctgcgcccag

SEQ ID NO: 9753 - DNA, 2447 bp, Unknown
  gut microbiota DNA sequence
cgatcgtagccggtcggagccagcgctttgcgcagcgcgctcacgtacacctccacgacgttcgaggacgtgtccgacatgaatccccatatcttgtcgaacaaccgctctttcgagatgagactgccctggtggctgaccaggtattcgagaatgtcgtactgcttgcctttcagagcaaggggctcgtctgcgatgaaggcctgccgggttcgcgtgtgcagcgcaagctccttgaacgcaacgatgcccacgtcgcgccggcccgtcgtgcggcgcaggatggcctcgatgcgggcgagcagctcgtcccggtcgaagggctttgcgagatagtcgtcggctcccgagcgcagtccgcgaagcttgtcggcggtcgcgctccgagccgtcagcatgagcacgggcgtgtccacgccttgtgcgcgcaaggcttccagcaccgagaagccgtcgcgttcgggcagcatcacgtcgagcacgacgaggtcgtacacgtcctgagcggcgtagaacaggccttcttcgccgtcgaacgcctggtcgacggcgtaagcgtcccgcaggctgcgggctagggcgtttgagaggagtcggtcgtcctccacgatcagcagtttcatgcggtcattctagcacgcgcaacctgaaacgatcctgaaaccgaccccctcggcaagcttcggcggggagacgcgaaaaacatcgccgcggttcaggaagttttaaggcggctttcgttagactggccgccggaagatatcgagacgacgcgcagaagtgcgcagtgaggagtcgacgatggggtcgaaagggttcaaggtgctcgtcggagtgctggttgcggttatcgtcgtgctgggaggtttgctggttgccaagaacctgcttcccgaagcgggaggaaccgatgcgccggagactgcgaaaacccgaaacgaagccacggctcaggacgtcatagcggagccgacgccctcggtcgagggcgagacgtacgttccctgatcgacatcggcaatcttggcatcgtgaactatagaaaggaacgcaattgtgaaaagcatagtaggcaagtccgtgaccgtcgtgcttctgctggccgttgcgagcgggctggccgcttggctcgtgttcggcgacaagatatcggcggcgctttccggtgagcctcagaccgtttcgccgctgaccgctcccgtggagcgaggatccgtgcagcagaccgtcaccggcgttggcgaggtgaagccgctggaaaccgtgaagctcaggcctgcggacagctggcattggctgcaatcgttcgacgcgccgcttaacaagcgcgttgctgcaggcgagacgctggtgacctacgccaacggcgagaagtgggcggctccgtacgacctcgtggtcacctcgcgcgagcttccggagaaaaacaaaggcgccgtgacgaaggacgaccactacatcgaggtgcagcgcatcgacacggtgtcggtcaccatggaggtttccgagaaggatctggggcttttgtccgaagggcaaagcgtgaaggtgaagctgggatccgataacggccgcgagtgcgacggaaccatctccaacatcaacgaggtgggtacgtacggcgcgacgggctccaagttcacggtcacggtcaaagtgcccaacgacggcagcatcaagctggggatgtcggccaacctgtccatcaccgttgcggaagcctccgacgtgctcacggtgccggtgagcgccgtgatcggcgcgggcgacgacaagttcgtccaggtgtacgatctcgcatccggcgagcagcgtgcggagccggtgaccacgggcatatccaacggcaccatggtcgaggtgtcgggcgagggtctgaaggaaggcgatctcgtggttctcaacgaggcagagcctgcgggcggcggcttctcggaaggcgatgccgaagaggggcctataaccgtgactccggtgttagagtaggcggtcggcgatgatcctcttggagagcgtttccaaaacctacgagatgggcgaaggggtcgttcgcgccctcgatcatgtggatcttcaagtcgaccaaggcgatttcctcgctatcgtggggccgtccggatctggcaagtcgacgctgatgaacatcctcgggctgctcgacgtgcccgacgagggtcgctacctgctcgacggcatggatgtcggggctttgtccgacaatcggctagcctccatccgcaacgaaaagatagggttcgtgttccaaagctttaatctgttgggcaagctcacggcgctcgagaacgtgaagctgccgctgagctatgccggggtacgcctgaaagaagccgacgcccgtgcccgcaagcagctctcgctcgtgggtctcgaagggcgcgagcaccacctgccgaaccagctgtccggaggccagcagcagcgcgtgg

SEQ ID NO: 9754 - DNA, 169 bp, Unknown
  gut microbiota DNA sequence
ctgggcaagctcacggcgctcgagaacgtgaagctgccgctgagctatgccggggtacgcctgaaagaggccgacgcccgtgcccgcaagcagctcgcgctcgtgggtctcgaagggcgcgagcaccacctgccgaaccagctgtccggaggccagcagcagcgcgtgg

SEQ ID NO: 9755 - DNA, 2733 bp, Unknown
  gut microbiota DNA sequence
aaacctcgtttttgctgcacatcgccttgaagagacgcgcgaacccgcccgacggcacgaagcgtcgacccggcgcggcgcgatccgagccgcgttcctcaaggcgcgcgggcgttgagaaaaatcatgcggggcgggagcgcggtgggttggcaacgccgaggtttgctattatagacgggttatgttttcaccggtgccaccttcggttttcgagcgatacgcgcggagccgatgcgtgaaaacgagagaaggaaagcaggctctatgacccaacacctcaccgagcgcgacgtccgcagcatcgcggagtacgcgcgcatcgggctggacgccgacgaagtcgtgcagatgacggtcgatctcaacgccatcatcgacagcctgaagcccatcaccgaatacgacctcgacggcgtggagcccacgttccaccccatcggcggcctttcaaacgtcatgcgcgaggacgaagaatccccctccttcacgcagggggaggcgctggagaacgcgccgaagcagcaggacggctgctttttgatcccctcgattctgggcgaagggggcgatcgctgatggctgcaaccgcacccgtgttcgccgcaatgggcgtgcgcgagatccgcgcgggcctcgcctccaaggacttctcggcgcgcgagatcgccgagagctcgcttgcccgcgtgcgcgcgctcgacggcgcgacgcatgcgttcctcgaaaccaccgagcagctggcgcttcggcaggcggctgcgctcgacgccgccgtcgcggccggtacgctggacgcgtgcggcccgctggccggcgtgcccgtggcgttcaaagacaacatgaacctggagggtacgcacaccacgtgctcgtccgcgatgctggcgaactacgtgtcgcccttcacggctacgtgcgttcagcgcaccatcgaagccggcggtattccgctgggcaaactcaacatggacgagttcgcgttcggctcttccacggagacgagcgcgttcggctccactaggaatccgtgggatctctcgcgcgtgcccggcggctcgtcgggcggcagcgccgctgccgtgggcgcggggttggccgccatcacgctgggcagcgacacgggcggctccatccgccagccgggcagcttctgcggcgctgtggccgtcaagcccacgtacggcgtggtcagccgctacggcgtggtggccttcggcagctcgctggaccaggtgggcccgttcacgcgctcggtggaggatgcggctttcgcgctcaacgccatcgccggccgcgacgtgctggactgcacgagccaggacttggacgtcgacttcacggcgaacctcgccgagggggtcaagggcatgcgcatcggcgtggtgcccgcgttcatggaagcccagggtctcaccgacgaggtgaaggccaaggtggaggaggccgtggagcatctgcgcgcgctcggcgccgacatcgtggaggtggagctgcccaacgcccaggccgctatgagcgcctactacgtgctgggcccctgcgaggcgttcagcaacctcgcacgcttcgactcggtgcgctacggctactgcgacccgggccacaaggacctcggcggccagtacgaggccagccgcgcgaagggcttcggccccgaggcgcgccgccgcatcatgctgggcagctaccttctgtccgcaggtgtgtacgacacctactactacccggcgcagcaggtgcgcacgctcatcacgcaggactatgcgcgcgcctacgagcaggtggattgcatcgtcgcgcccgtgtcgccgcgcacggcgttcacgttcggcgaagtgagcgaccccaccgacatgtacctgtcggacatgttcaccatctccatcaatatcgctggcaacggcggcatgagcctgccggtgggcctcggcgcccagacgcagctgcccgtgggcgtacagctcatctcgccccagttcaaggaccagaacatgctgcgcgtggccgccgcgctggaaacggtgtacggccccgcccccgtggccccggccttcgccccgggtcaaccctaccccgaaggatcgatggcggacatccccgacgccgccgacgcgaccccaggcgtcgacctgccgggattgctgacggaggagggcggcttcggcgttgcccaccaagcgagttccgcagcgcagcgaggactgtctgagcgactgggcaatgccgaagctgccccgtcccaggttgaaaaggcaggtgagtagccatgcggaaactcgaagaggtgctcgaggattgggaggccgtcatcggcctggaaatccatgccgagctcaccacgctcgacaccaagatgttctgcggctgcaagctggagttcggcgccgagccgaacacgcacacgtgccccgtgtgcctggggatgccgggcgcgctgcccgtgccgaaccgcgcggccatcgagtccatcgtgcttgcgggccttgccacgaactgcgacatagagaagcactcgatgttctaccgtaaaacgtacatgtaccccgacatgtcgaagaactaccagaccacgcagggccccgtggcgttctgcatgcgcggccacctcgacctcgacgtggacggcgcggccgccaaggagcgcatcgacctggacggcctcgacgtgggcgagagccgcggcaacgtgacgcgcaccgagaccggctacaccgcgcacgtgggcatcac

SEQ ID NO: 9756 - DNA, 33026 bp, Unknown
  gut microbiota DNA sequence
ggcgaaggccgcatcgccggcgccacgcactcgctggtggactacaaccgcgcaggtaccccgctcaccgagctggtcaccgagcccgacctgcgcacgcccgaggaggcgcgcctgttcatgcagaagctgcgccagatctacctggcgctgggcatctccgactgctcgatggaagagggctccatgcgctgcgacggcaacgtgagcctgcgccgccgcggggcaaaggagttcggcgtgaagaccgagctcaagaacatgaacagcttcaagaacctccacgacggcctggcctacgagatctgccgccaggcggaagtgctcgaggagggcggccagatcttccaggaaacgcggcattgggacccgtcggccaagcgcaccatcgtgatgcgcgtgaaagagacggccgacgactaccgcctgttccccgatccggatctcgcgccctacgaccttacggacgagtggatcgattccgtgcgcgcgaagctgcccgagctgcccgaccagaaggcggcccgcttcgaggacgcgttcggcctgagcgcctacgatgcgcgccacttggtggagcatcgcgccacggccgacttcttcgaggcgtgcatggagctggccggcgccgatgcggccaagctggcgaagccggtggcgaacctcgtcatcaacgacgtgaccgcctacctgaacgcgcacgaaggcgttcagctggccgacacgccgcttaccccggcgcgcgcgcttgcgctcgtgcgtctcaccgccgaggacgccatctcgtccaagcaggccaaagaggtgttcgcggccgtgctcgacgaggacaaggatccggccgccatcgtggaggagcgcggcatgaagcaggtgtccgacacgggcgccatcgaagccgtcgtcgacgcggtgctggccgccaaccccgacaaggtggcgcagtaccagggcggcaagaccggtctcatcgggttcttcgtgggccagtgcatgaaggagatgcgcggccagggcaacccgaagctcatcaacgagcttctggcgaagaagctcgggtaagcatgcgcgccgccgcctcgggataggcggcggcgcgcttcgttctcgtaaaggggaagaccaatggatttcaatgagatgctcgtcggcatcaccggcgaggtgagcgggtttctgtacacgtacatcctgctcgtcctgctcgtgttcgtgggcgtgtacttcacgatccgcacgaaaggcgtgcagatccgcttcatcaaggacatgttcacgcagttgacggagaagaagcacgtcaagggcgagcgctccatctcgtcgttccaggcgctcatggtgtctacggcctcgcgcgtgggcacgggcaacatcgcgggcgtggccacggccatcgccacgggcggcccgggcgcggtgttctggatgtggctcatggccatcgtgggcgcggcgtcggcgttcgtcgagtccaccctcgcgcagatctggaaggtgcgcggcaaggagggcgagttccgcggcggcccggcctactacatcgagaaggcgctcggcaagcgttggctgggcatcctgttcgccgtgctgctcatcctgtgcttcgcgttcggcttcaacggcctgcaggccttcaacgccacctcggcgctggaatactacattcccgactacgccacgaacggcacggccatcgcctgcggcatcgtgctggcggtgatgaccgcgttcgtcattttcggcggcgcgaagcgcatcagcgtcatcacgtccatcatcgtgcccatcatggccatcggctacatcgccatcgcggtgtggaccaccctctccaacatcacggagctgccgggcgtgttcgcgatggtgttcgcctcggccttcgacgtgcaggccatcttcggcggattcgcgggttcggtggtcatgctgggcatcaagcgcggcctgtactctaacgaggccggcatgggctcggcgccgaatgctgcggccacggcgtcggtgtcgcatccctgcaagcagggtctcgtgcagagcctgtccgtgtacatcgacacgctgctcatctgcacgtgctcggctatgatggtgctcgtgttctacgtgcaggatccgcaggcggcttccgcccttaacggcatgccgctcgtgcagatggccgtgaacaactcggtgggcgagttcggcatccacttcatcacgttcgccatcttcgccttcgcgttctccagcctcatcggcaactatttctacgccgagaacaacctgcgcttcatcaagggcgacagcaaggcgctgctgttcgtgttccgcgtggtgtgcctgtgcgtggtgttctacggcgccgtgaacagcttcgacttggcgtggaacctcgcggacatcttcatgggcttcatggcgctcgtgaacctcatcgccctgctcttccttggaaaatgggcgcttgcggcgctcgacgactacacgcgccagcgtaaggagggcatcgatccggtgttcgtggccgatcgcattcccggtatgccgaagaccgaatgctggcacgtgtccgaggtgcacgactacggcaagccgccggtcaaggagtatctggacgacgcgctcgaccccgagtacgtcgggctgaactgacgcgcgccgctggacgggcgtggtaggatagagggaaacgcgcgcgggcgggcggcgcgccttgggaaaggaagcggcatggctgacgacgaccgtcgcgcgggcgactggcagaagcgcgacctgcgcaagaacgcgaacgacctgatcgaagagccgaaccagaaggcttggtgcaagcagacgttttggatcgtgttcttcctcatcgtgttctggccggtgggtatcgtgctgtgctggaggagcagctggcatatcgtggcgaaggtcctcgcttcggtggcggtggcgttcatggtgtacttctcggtgaccatgtaccaggctacgcaagcgctcatggcggcgggcatggcgtaggtcgtccgcgccgctcggttcgcgactctctgcggaagaagggtcgtcccgctcgcaaccgagcgggacgacccttgctttttcggaaggcgaacgactcctgtgcgatttttcgcctttcgccgcaagagcgtatcgcgaatgttccttgtgcgctatcatttccaacgaaaacagtgatccattcagtacgagttgcacaaggataacgatatgacgaacttcgcgaacggtcacacgaccgtcctggcaggccacggtttcgccgagtccggcccctacctcttgatcaacgacgtagagcaaggcgagcagcaccgttttcccgtgttgggcaagacgttctcgttgcgccgccttcccacgcgccgctgcgtgggacgcttcgatctggcgtcctacacgaaggaggtgtgcccgctcaacgtggagctgcttcccgatgcgaaggacacgatgtgtccggcatgccaggaggccacgggcttcaacccctcgttctactacgccgacttcatctccgcccagcagcgcgcctacaacctgacgccgcatttcacgtacctggcgtacttctcgccgaagcacgtgaaagccggcatctcgtcggagacgcgcggcatcgagcgcctgctggagcagggcgcccgcgcggcccgcatcgtcggccgcttcggatgcgccgacgacgcgcgcgagctggaggcggcgctgtgcgcgcagcccggcatcctggagacgatgcgcgcgtcgaagaaagtggacttgctggtgaacgagcgcttcgatttcgtcgaggcgaaggcggtgctcgacgacgtggtggaacgtctgggtctcgagggcgctgagccggctcaggacctgtcgccccactacttcggcggcccgtcgcccgactgccacgacttgcaggtgcccgaaggccacgacggcgaatgcggcggacgctgcatcggcatggtgggcggcgcgctggtgttccagcaggagggcacgaactacgtcgtgtcagtcaaagagtgggagtcgcacgaggtcgagctgctgctggacgaagtggtgtgcacgtacgacttcgcgccccaacagttctccttgttctaaggcggggtgggcgagggcgtgcgccttcgccccgacggcggcatcgcgtgtgcggtatcgaccgaaatgccgcagatccggcttccctcgacttccttgccttttctacgggcaggcttcattgcggcttcggaatcgctgcttttcaggaacggcacggatggtcggttcgatctgctgcaaaaacgggtttttggcggcaaggggaacgaacgctcccggcggaaatcttgcgaccaggtgtttttcaggcttccccgtgttcgagggctttcggtggcgctgaagccgcgaaattgctgccaagaacccgtttttgcagcagatagctcagtccaaagcgtacatccgtcgcttgatgcggacggcgtttttccgcgtgcggggaatcgataggatgcagcgtccttttcttcggctaaacattctttcctcgaggtgcggcgagccgtgatcgcgctccttctatgacgtaaaataaagcggttgtccgaaacgttctgcaaacggcttgctttactactctactgtgataaagtactaccagcaaacgaacggcgtgcgcggccgcgtgcgaaccggcgaaacgatgcagcgaaggaagagaaccatggattacgtgacaccggcagggttcagagacgtgctatccgacgaggcgtgcatgcgcgagcgcatcgctcgcgacgtgcaggcatgcttcgcggcgcgcggctacctgcccatcgagacgccgacgctggaggtcatggacgtcatgcgcgcgggcggccgtatgcccggctctcccttcaagttcttcgacgcgagcggcgaccttctggccatgcgccccgacgtgacgctgcaggtggcgcgcatgtgcgcgacgcgcctcgcgggccagccggggccgttccgcttccgttacatgcagcgcgtgttccgcgaggccgaagggcgcatgcaggcgcaggcgcgcgagatgacgcagatcggcgtggaatgcatcggcgaggccgggccgcaagccgacgcggaggtggtggagctcatggcggaggcgctggagctcgcgggcgcgcgcggctgcaagctggccctggccacggtgggcgtgctgcgcgcgctgctggcggccagcggggcgtccgcgcagtggaccgagcgggtgctggcggcgttccacgcctcgaacttcgtggaggtcgaccggctcacgggtgaggcggcggccgtgccgcccgtgttcgccgcggccatccgcgcgctgccgcgcatccgcggcgggcgcgaggcggtggaggaggtgcgcgcgctcgtggcgcccctggggtgcgaggacggcctcgacgactttgcccgcacctgcgacctgctggccgaggcgggcttggccgaccgcatcctcgtggacttctcggtgatgagctcgttcgattactacaccggcatcgtgttcgaggcctacgcgcccgagctgggcacgccgctgggcagcggcgggcgctacgacaacatgatcggctcgtacggcgagagccgcccggccgccggcttcgcgttctcgttggagcaggccatggccgcggccgccgccgccgagcgctcggtcgacgacgaagccgcgcgcccgctgcgcatcgcggtgccgaagggctcgctcaacgccgacacggttgccgcgctcgaggccgcgggcctcgatacgaccgggctcgacgaccccggccgtcagctcatcatccgcaaccccggcgtcgagtacgtcatcgtgcggcccaccgacgcgcccgcgttcgtgtcgctgggcgcggccgactgcggcatctgcgggaaggactcgctgctggaagcgcagtccgacgtcgtcgagctggtcgacctcggatacggcgcatgccgcttcgtggtggccgagcccgccggtgcggccgaggccacaggcgagcactaccgccgcctgggatcgctgcgcatcgccacgaagtaccccaacatcacgcgcgcccactacgcgaagacgggcacgcaggtggaaatcgtgaagctgcacggcaacatcgagctggcgcccctcacgggcatggccgagcgcatcgtcgacatcacggccaccggcaccacgctcaaggagaacgacctcgtggtggtggacgaagtcctttcgtcgaccgcgcgcttcttctcgaacacctgcgcgttccgcacggacgcgcgtatcgtacaattggcgaatacgctgcagcggaacgcggaagcctccgcgagcccggccggcgaggaaaaggagtagcccatgcgccgcatcatcttgcaacctggcgagcagttcaccaacgcccacctcaagcgcaccggcgcgttcaacgcccaggccctgacggcggccaccgccatcatcgagggcgtgcgcgagcgcggcgacgaggccctgcgcgcctacaccgagcagttcgacggcgtgcgcgtggaggagttccgcgtgtcgcaggcggctatcgcagaagccatcgtgaacgtcgacgacaagacggcgcgcgccctgcgtcaggccgccgcacagatccgcgacttccacgagcgccagaagcagcagagctggttcaccgtgcgcgaggacggcgcgctcgtgggctcgaaggtggagccgctggaatccgtgggcatctacgtgccgggcgggcgcgcgctgtacccgtcgtcggtgctgatgaacgcgctgccggccgccgtggccggcgtgaagcgcatcgtatgcgtgacgccgccgacggccgacggaacgctggatccggccattttggaggcgtgccgcatctcgggcgtcaccgaaatctacgcggtgggcggcgcgcaggccatcgccgcgctggcgtacggcaccgagtccatcgcgcccgtggccaagatcaccggacccggcaacgcctacgtggcggcggcgaagaaggtggtgtcgggcgatgtgggcatcgacatgatcgccggcccgtccgaggtgtgcgtcgtggccgactccacggccgatccggcgctcgtggccatcgacctcatggcgcaggccgagcacgacccgctggccgcctgctacctggttacgttcgatgcggcctacgccgacgaggtggagcgcatggttgagcgccacctcaagtcgtccacacgcgccgagatcacggcggcatcgctggccgaccagggcctcatcgtcgtgtgcgacagcatgccgcaagccatcgaggccgtgaacgccatcgcgcccgaacacctcgagctgcacgtcgaccacgccttcgacctcttgggcgccatccgcaacgcgggcgccatcttcctgggcgcctggacgcccgaggccgtgggcgactacgccgccggcccgaaccacacgctgcccacgggcggcacggcgcgctacgcctcgccgttgtcggtggacgagttcgtgaagaagtcgagcgtcatccagtattcgtcgcaggcgctcgcccgcgatgccgacatggtaaccaccatcgcgcgccacgagggcctgtgggcgcacgccatgagcgtggagatgcgcaagaacctgctcgacacgggcaacgtgtatgggatcgagggcggcgacggagcgggccgcgcggccggagacgggggtgccgatgcgtagcgtgtgcgcggccgcgccccagctggcgggcgtggtgccctacgatccgaagtatttgcccgccaccgccgtcctctcggcgaacgagaacccgcacgacgtcgacgacgagatccgccgcgacatcatgcgcgaggtgaagcgcctgcccctcaaccgctacccggacccgctggccaacgacctgcgcgacatgatcgccgaagcgaacgggctcgaccgcgaccaggtgctggtgggcaacgggggcgacgagctcttgttcaacctggcgctggcgtggggcgggccggggcgcacgttcctcaacctgccgcccacgttctcggtgtacgacgcgaacgcccgcctcacgaacacgtcggtggtggacgtgccgcgccgcgccgacttctccatcgacgaggaggccgtgctggcgcgcgtcgccgagggcggtatcgactacctggtggtgaccagcccgaacaaccccacggggcagcttgccagcgagacgttcatcctccggctgctcgacgccaccgatgcgctcgtgatggtggacgaggcttacttcgagttctcgcgccagacgatgcgcccgtatctggcgcagcacaagaacctcgtcatcctgcgcacgttctcgaaggcgttcagcctggccggggcgcgtatgggctacatcctgggagacgccgaggtcgtgcgcgagttcgtcaaggtgcgccagccgtattcggtggacgccgtctcgcaggccgttgcgcgcgtggtgtacgcgaaccgcgcgaagttcgagcgcggcatcctggccgtcatcgaggagcgcgcccgcctgatcgagggactgaagaggattcccggcgtgaagcccttcccgtcggatgcgaactacgtgctgttccgcgtggagaacgcgcccgtcatctgggaggcgctgtacgagcgcggtgtgcttgtgcgcgatttctcgcgtgcggcgcatctggagaactgcctgcgcgtgaccgtgggcgcctccgaggagaacgacgcgtttttgcgcgcgctgcgcgatgcggtgatgggcaagtgcgatttgaaggttccgtcgacctgacggccgacggaacgagccgacggctgcgacgcgaagctagtccccgtagggggcggcttcccgtggtgcccgatctcgcggcgaggtcgaggactcgcgtaccgaagtatcccctacggggacttccttcggggcgcgcttcgtcctcgccctccccacgatctcgggcaccacggaaaccctcgctgacgttgctggaccagcgataaagaaaggccaaccatgaaccagagaaccgccgaaatcgtccgcacgacgaacgagacggacatccgcgtcgcggtgaacctcgacggcgcgggtgcgaccgacatcgagacgggcgtgccgttcttcgaccatatgctgacggccttcggaaggcatagcctgatcgacctcgacgtgcgcgcaaaaggcgatatcgaggtggacgcgcaccacaccgtggaggacgcgggcatcgtgctgggccaagccgttgcgcgtgcgctcggcgacaagcgcggcatcgcgcggttcgggtcgctttcgcttcccatggacgaggctctcgtgctggcggccgtggacatatcggggcgcggccagctgcactgggccgtggacgtgccctgcgtcatgctgggcacgttcgacgcgtcgctggccaaggaattcttcatcgccttcgccgcgaacgcgggacttacgctgcacgtgcgcagcctggctggcgagaacgcgcaccatatcgtggaggcgtcgttcaaggccgcagcgcgcgccttgcgccaggccgtcgagctcgacccccgcatcggcgatgcgctgccttcgacgaagggcgcgctatgatcgccgtggtcgactatcataagggcaacctcaaaagcgtcgagcgcggtctggtcgcggcgggcgccgaggtgctcgtcacgagcgatcccgccgccatcgccaaagccgatgccatcgtgctgcccggcgttggcgcgttcgccgacgcggccgccaccatgcgcgagctcggccagatggacgccatccgcgagcgcatagccgccggcgtgccgttcctcggcatctgcctgggaatgcacctcctgttcgaagaaggcgtcgaaggcgcgccgcgcgaggacgacgaaacctcgacccacaacgcccgcggcctggcagtgctgccgggcgtggtaaccaagatgccgaaacaggatgaacactccctctcctacaaggtgccacatgtaggttggaacaccgtgcatttcggagacggcagcgaggggttcggcggcgcccaccaagcgagttccgcacgagccggacagtcctgtggactgtccgagcgagcaggactgtctgagcgactgggcgttgccgagctcctcgcggacaggtttcaggaatgccccctgttcgaaggcataccgtcgggcacttacttctacttcacgcatggctacatcgcgccgtcgggtcccttcgtcgtcggcgagacgacgcacagcgtgacgttcccgagcgccgtccagtacggcgaggcggcgtacggcgtgcagttccatcccgagaaaagctcggatgcgggcgcgcgtctgctgcagaacttcgtgtccatcgtgaaaggggcgtgagcgccatgtacctgcttccagccatcgacattctgggcggcaaggccgtccgcctcgccaaaggcgactacgaccgcgtgaccgtgtaccacgacgaccccgccgcgcaggcgcagctgttcgaagagcagggcgcgacgtggctgcacgtggtggacctcgacggcgcgcgttcgggcatccctgagaatatcgccatcgtcgagcgcatcatgcgcaagaccctgctcaaggtggaggtgggcggcggcgtgcgctcgctcgacaccatcgcgcgcctggcggacgcgggcgtgtcgcgcgtggtgctgggcacgtcgctcgtggccgaccccgacttcgccgaggccgccatcgcgcagtacggcaagctgctgtgcgcgggcatcgacgcgaagggcggcgaggtggccgtggccgggtggcgcgagggcgctggcgtggccgccgaggagctggcgcgcgacatgtcggcgctcgggttccggcacctcgtgtacaccgatatcgcgcgcgacggcatgcagaccggcatcgaggccgcggcgtacgtgcgcatggccgaggcgttcggacatccggtgatcgcatcgggcggcgtggccggcgtggacgacatcgtgcgtttgggcgaggtggccggcagcatcgagggcgtcatcgcgggacgcgccgtgtacgagggcgcgctgtcggtgcaggagggcgtgcgcgcctgcgacgaggccacgcgccgagccgaggccgccgccgtccaggcgaacccttgtggaatgtgagtccaacatgtttggtaaggtcagcgagcgggttcttcgcgagcgcgattgccgcgaaggctcgacgaagcgtgccttgggcacgtgaggagaacctggagcggcaagcgtgccgcgaagtacccgcgcagcgtcggcacgtccgtcgttgcgttagcaacgacggaaggagcgagatgctagcgaaacgcgtgataccttgcatggacgtgaaggacggtcgcgtggtcaagggcgtgaacttcgtgaacctgcgcgacgcgggcgatcccatcgagctcgcgcagcgctacgacgaggagcgcgccgacgaggtgatcttcctcgacatcacggccacgagcgacgaccgcgccaccacggtcgaccttgccagccgcgccagcgagcaactgcatctgccgtactgcgtgggcggtggtttccgcagcgtggccgacattcgcacgatgatcgcggccggcgctgacaaggtgtcggtgaactcggccgccgtggccgatccgtcgctcatcacgagcgccgccgcggcgttcggctcgcaggccatcctctgcgccatcgacgcgaagcaggtgacgggcaacccgaacaaatgggaggtctacgttgcgggcgggcgcaaggccacgggcatcgacgcggtcgcctgggcgcaggaggcggcccggtgcggggcgggggagatcctgctcaccagcatggatcgcgacggcagccgcgacggcttcgactgcgcgctcactcgcgccgtcgcgcgtgcggtggacatcccggtcatcgcctcgggcggggtgggcaagctcgagcacttcgcccaaggcgtcatcgagggcgaggccgatgccgtgctggctgcaagcgtcttccacttcggcgagctttccgtccgtcaagtgaaggagcatatgcgcgcccagggtatccccgtgcggctgtaggggtggggcggccctcgtttccggagcgaacgcgacgacgggtcgctcgaccgcgatcctccatcgcgtcaaggggtcgcacggccgagccttccgtgcagctgaaagcgctgcgactggcgaaaaagcatcgaattcggaagtttctagctgggtcgcaagctcgtcggaggctctttttgcgcatagagcctggttgctggcttgctcctttccgctcccgggcgccgcatgcgcttgaaacgggcgatgtcttccgaattcgatggcttttcgccattcagaacgccgtaggccgcacaggtggaggagcgatccggttttcggacgatccgacggcatggtttgggatcgtcccgaggacgttcacgcgccggccttccgccttcgcaggagagaagcgaggggcggatgcaggctgcggttgcgcaagcagccgcagtacatcgatcgagtgaggattataggtatgaacattcctggcatcgcttacaacgccgacgggctcgttccctgcatcgtgcaggatgcagacacgctcgaggtgctcatgatggcgtggatgagcgaggagtcgcttgcgctcacgctcgagcgcggcgagacggtgttctggagccgcagccgccgggagctatggcacaagggcgccacctcgggcaacgtgcagaagctcgtggagctgcgttacgactgcgatgccgacacgctgctcgcgctcgttcatccggcgggtccggcctgccataccggcgagcgcacctgcttctaccgcgcgttcccccgctagccgcctctcgctcggaacgctcagtgcagcgaggcccgaggattccgcttatgttgagccgttgcatcataggggttgtgaggatgccgatcgtgcctcataatattgcgttcgattacgggatggtttagaaggggacgcgagtgactgacaagtcgacggcaggccgtgacggggaagcgggctcgaccggcttcgctcgggtttccattgaagccccgcgcatcgatgccgctaccgggctgcttggcaaagaagccttcttcgacgaggccgctgcgtatcttaggcattcgggcgcacgcgatgtcagcatcgtctgcttcgatgtcgaccatttcaaactgttcaacgatctgcacggacttgattgcggcgacgagcttctaaggtacctgggtcgcgccctcgccctccgcttctcgcccgacggggcgcaaccgctcgcgcgccttgcggccgatacgttcgccttgtgcgcgaccggcatccgccccgagcgcgtcgagcgcatcctcgtcgacatctcctccgaatgtccgaacggcatcgacgccatcgtgcgcgcgggcgtgtaccgcatcgaggatcctgcttcgccggtcagcatcatgtgcgaccgcgcggtcatcgcgcttcgcacggtgaagggcagctacttcgaccgcgtggctttgtacgaccccggcatgcgcgaggcgctcgtcctcgaacgcgaggtcgtcgccggcatagaatcggcgttgcgcgaggatcgcatcgagctgttcctccagccgaaatgcaatatacgcaccggcaagatcgtgggtgccgaggcgctggcccgttggcgccatcccgagcgcggcatcgtcgccccgggcgagttcatcccgctgatcgagcgcaacggccttgtgtgctcactcgacctgcgcgtgtgggagaagaccgccgcgtggatcaggggcctcatcgacgaaggagtgcagcccgttcccgtgtcggtgaacgtgtcgcgcgccgacatctacctcgtggacgtggccgccgaactgcatgcgctcgtggagcgctacggcatcgaaccgtcgctcatcgaggtggagatcaccgagagcgcctattcggaacgccccgatcgcatcgtggccgcgttcgacgagctggccgagcgcggcttcaccgtgctcatggacgacttcggcagcggctactcgtcgctcaacatgctgaaggacatcaacgtcgacgtgctgaagatcgacatgcgcttcctcgaccgcgacgaccggcgcagcaaggacatcatggaatcggtcatccgcatggcgcgctggctggacctgcccgtcatcgccgaaggcgtggagacgcgcgagcaggtgaacttccttttggacgtggggtgctcgtacgcgcagggctactactacgcgcgcccgatggaggcggcggcgttcgaggcgctgctgaccgacggttcgaaagttcagcacgagcaatgcgctctgcaggatgcgcgccgtcccatcctcgatttcagggatctgctgcatgagaacaccatcagcgaccgcatgctttccagcatcatcggctcggtggcgctgtactcgtatgccgacggcgatctgcgcctgattcggggcaacgaagcgtaccggcgcttgatagcgacgctcggggaaggcgtgaacggcgccgaggagggcggcagcctgcttcctttcgtgcatgacgaagatcgggacgccctcgtggccgcggcggaggagacggtgcgctcctgccccgacgacggggtggaggtggtcgtgcgccgcatgggaacgaacggctgccattggcataagatgcgcctgttccatttgaacacgacgaacggttcggccacggtgtacggctccgtgaccgacgtcacggagcgcatggagtacatggaggcgctgcgcaagagcgagcagcgcttcgagatgaccttggaagccagcggcacggtggtgttcgagctggacatccccacgcgcaccgctcgctattcggagttcttgcagcaggcgttcggcttggccgagaccgtggcgaacgccccggaggggttcatcgagcaggggacggttgccgaggagtccatcgaggattttcgcgccatctaccgagacctctacgccggcgcgcctcgcacgtcggcggttgtgcgcgccatcatgggagacgggtcgcgtgcgtggaaccgcgtgacgcttctggccatgccgaacgaggcgggcgcgcccgtcaaggccgtcggcctcgtggaaaacgtcacgcgcgagacggagatggatcttttgctgaagcgtctcggtcgtttcgagcaagattgaggatcacgccgtccgcaaggcgcgcccgcaccgtttcgtagaccttcctccatcgcttttacacgatacctgccgctttgcgcttgaacgaaggaaacacatgcggtaccatgatgatcagttcttttatctcacagcacacatccaacacacccgcatctcatcacggaatccatgcgcgccgtcgcgcgcgtttcacctgtaatagccattgtataaggaggacctgggtgaagttttttctggacaccgccgatctcgacgaaatagaagaggcggccagctggggcgtgctcgccggcgtcactacgaacccgacgctgtacgcgcgcaccggaggcaagctcgacgatttccacaaccacatcaagcgcatctgcgaaatcgtggacgggcccgtctccgctgaaagcgtcgccatgacgcgcgacgagatcatccgcgacggccgcgagctggccgcgcttgccgacaacgtggtcgtgaagatccccaccatggtggagggtctcgccgccaccaaggcgctctccgaagagggcatccccgtcaacatgacgctgtgcttcagcgtgccgcaggccatcatggccgcccgcgccggcgcccgctacatcagccccttcgtcggccggttcgacgacatcgccgaggacggcatctcgcagttggccgacgtggtggccgcggtgaacaactacgacttcggccacgacgtggagatcatcgccgcgtcggtgcgcagcgcgaaccacgtgacgcaggccgccctcatgggcgccgacatcgccacggtgccgttcgctgcgctcaagaagtgcgtgcaacatccgctgaccgaccgcggcctggatgcgttcatgaaggactgggagaaagttcagcaagcatgagcgaaaccgaagcaaccacggaggctcctgcggccgctcccgtcaagcgacgttccaccagcgtgaaggcgaagacgcagggcaaggccgagggcgcagccactccgggccgcaactcgtcggccacgcgcacgccgcgcaaatcggtgaaggcgggcggcgcgcagcagcaacagccgcagggcggttcgaacaaccgccgccagaacgcctcgaacgccggcaagcagaacaacggcggcagcaatcgccagaagcagggcggcggccagaaccggcagaacaacagccagaaccagcgtcgtcagcgtcgccagcacgacaacaaccgcggcaaccgcgaagtgcagcccagcgtgtcgcgcgaggagctggcgaagctcaaggtggccgagctgcgcgagaaggccgccgagctcaacctcgacgtgacgggcctcaagaaggccgagctggtggaggccgtgttcgaagccagtgtcaaggccgagggcttcatcgaggtgtcgggcatcctcgacatcctggccgacggctacggcttcctccgcacgcagggctacctgcccagcgagacggattgctacgtgggtctttccaccatccgccgcaacggcctgcgcaagggcgatctcgtgtccggtcagacgcgcccggcgcgcgagaacgagaagtacgccgccatccagaaggtcacggccgtcaacggcacgcccgtcgaggagctgggcagccgcgtgcgcttcggcgacctcacgccggtctacccggacgaatgcctcgtcatggagcacggcaagaacaccgtcaccgcccgcgtcatcgacctcgtgtcgcccatcggcaagggccagcgcggactgatcgtcagccccccgaaggcgggcaagaccaccatcctcaaggacatcgccgccgccatcagcgcgaacaaccccgaagtgcacctcatgtgcctgctcgtggacgagcgtcccgaggaagtcaccgacatggagcgctccatcaagggcgaggtcatctcctccacgttcgatatgcccaccgagaaccacatcgccgtgtccgagctggtcatcgagcgcgcgaagcgcctcgtggaatgcggcaaggacgttgtcgtgctgctggactcgctcacgcgcctcgcgcgcgcctacaacctggcgcagccggcatcgggccgcatcctgtcgggcggcgtggactccacggcgctctacccgccgaagcgattcctgggcgctgcgcgcaacatcgagcacggcggtagcctgaccatcctggcctcagccctggtggacacgggctcgaagatggacgaggtcatcttcgaggagttcaagggcaccggcaacatggagctcaagctggatcgcaacctggccgaccgccgcatcttcccggccatcgacccggtggcgtcgggcacccgcaaggaggatctgctgctggagccgcaggaggcgccgctcatctgggccgtgcgccgcatcctcgcgaacacgaacagcaccgaacgcgccatggacatgctgatcaagtcgctcaagcagaccgagacgaaccaggagttcctcgtgcgcacggcgaagaaggcccagcacacaaaggccgacggctcgctggagttctaggcgcgcccatccgtcatccggccgacaccgtgcgcgccggtcgcggtcttataatggaaaccaccagggaaccgcatccgttgggtgcggttccctgtcgcatacggtagtatggtcagacgcatgaaccaaggagggaccatgtctcaagacaacaactggcagcagcaggtgtggcagcagcctgccgcgccgcagcagcctgtcgcgccggccgcgccgtacggctacgccgtgcagcccccgaagaaaagccgcggctggatcgtcgccctcgtggccgtcgtgctcgtgttcgcgctgctggcgctgggcatgtggtcgtgcacgtcggtcatgtcctcgtcgttcgggtccttcggcacgggctccacggtcgacgacgtggactacctcacgggcgacgcggtcggcgtcatcgacatcgacggcaccatccagtacgacaacaccacctccagccccgaaggcctgaaggcccagctcgatcgcgccgagaagaacagccatatcaaggccgtcgtactgcgtgtgaactccggcggcggcacggctacggcgggcgaggagatggccgactacgtgcgcgggttctccgagcgcaccggcaagcctgtcgtggtgtccagcgcgtccgtcaatgcgagcgccgcctatgagatatcctcgcaggccgactatatctacacggccaagaccacggccatcggcgccatcggcacggtcatgcaggttaccgacctgtccggcctcatggagaagctgggcatctcggtggacaacgtcaccagcgccgacagcaaggattccagctacggcacgcgcccgctcaccgaggaggagcgcgcctactaccaggatcaggtcgaccagatcaacgagacattcatccagaccgtggccgagggtcgcgacatgcccgtcgaagacgtgcgcgcgctggccacgggtctcacgttcaccggcatgacggcagtcgagaacggccttgccgacgagatcggcaccaaggacgacgccgtggcgaaggcagccgagctggcgaacatcgcgcactacaccaccgtcacgctcaagaatcccacgagcagcctgtcgagcctgctcgacctcatgtcaaagagcaacgtttccaccgacgatatcgcccgagcgctgaaggagctggacaccgatggcagcatcgcccaatagcaacgaacgaatctcgtggcccaagcgcgccgtcgtcacggcgggcatgccctacggcaacaagccgctgcacttcggccacatcgccggggtgttcgtgccggccgacgccttcgcgcgcttcctgcgcgaccgcatcggcgcggccaacgtgcgcttcatcagcggcaccgactgcttcggctcgcccatcaacgagggctaccgcaagctggtggaggccggcgagttcgacggcaccatcgccgagtacgtcgagcgcaaccacgaggcgcagaagaacacgctggacgcctacggcatcagcctgtccatctacgaaggctccggcatggggcattcgggcgacgtgcatcagctgatcaccgagaagttcatcgagaagctgcacgagaacgggcacttgcagcgccgaagcacgctgcagttctacgatgcggaagcgggcacgttcctcaacggccgccaggtggtcgggcgctgccccgtgcagggctgcaagtccgagcacgcctacgccgacgagtgcgacctggggcacagctacgcccccgaggacctcatcgcgccgaagtcgtcgctgacgggcacgactcccgagatgcgcccggtggagaactggtacttcgatttgcccgcgttcgccgacttcctgcgcggccacgtggcggcgctcgaggccgaccccgaggtgcgcgccatcgtgccgcagaccgtcaaggagttcctcagcgcccccgtcgtctacatcaagaacgacgcccgcgaggcctacgacgccgtggcgggcgagctgccggcccatcagctgcgcgaggccgagaagggcaagcagagcttcgagatcgagttcgcctccatcgacgaccgcgacgcggcgcgcgaggtgctggggcgggcgggcatccgcttccgcacgggcaaggcgctcgtgccgttccgcatcacgggcaacatcgagtggggcgtgaaggcgccggtcatcgacgggctggaaggcctcacggtgtggtgctggcccgagagcctgtgggcgcccatgtcgttcaccatggccgtcaacgacaagatgggcctgccgcgcggcagctggcgcgatttctggtgctcggaggacgccgaggtgtaccagttcatcggccaggacaacctgtacttctacggggttgcgcagcccgcgctcatcgaggcgctgcgccctggcgacatcctgacgcccggcgtgaccgagcatcccatccgccagaccaccctcgtggcgaaccatcacatcctgttcggcgacaagaaggcctcgtcgtcgggctcggtgaagccgcccacggccgacgagctgctggactactacaccgtcgagcagctgcgcgcgcacttcctggcgctcggcctcgaccagaagtcggtgggcttcaagcccaagccgtttttggccacccccgaggagcttgcggacacgcgcgtggccgacccggtgctgaaagagggcgcgctgctgacgaacgtgttcaaccgcttggcccgcagctgcttctacgaggcgcagaagaacttcgagggctatatgccgctgggcgatgcgtccgaggacgtggtagcgaaggtgcacgaggtgctgcgcgcctacgacgagacgatgcaccgcgtggaactgcacaccatcatgtccatcatggacgagttcatccgctgggcgaacaagcgctggtcggacggcatccgcgaggtcgagaacacgggcgacgacgagctgcgccgccaggtgctcgtggactcgttcttcctgctgcgcatggcgacgctgctcatgcaccccgtggtgccggcgggcgccgagaagatctgcgactacctcagcttcgagttcgacgacttcttcagctggaactacgacttcgagaacatggacgagctgtgcagcgccggcgagatcactgaagcccgccaccgcatccgcgagctgcccccgcgcttcgacttcttcgcgaagcacccgagccagtacaagtaacgtcccgacagggggcgggccttcaacggggatgttttcgggatgaagagcgcccgtccgcggaatgcgggcgggcgctttcggttgacgtgcgttagggagggacgggtggttcgacgcgtgcgcagctatgggtggattgcgtgcagcaaaaacgccggtttggcagcaccggcccgttcggacgccttcttctcgggttcgggagcgttgttttgcggaatgcgaccgagcgccatctggagttttgtcgctgctcttcaccagtcgcggagtcgaggctgccaaaccggcgtttttgctgcacgcgagccggcgaaaacgtgcgcggccgttgcgtggtccgacagccgaggggcggagcaggttgccgggctgggcgcaaagagggttccatgacaatctcgaagcagtttcgacgtgccggtaggcttcgccaaaccgtataatcccaggtggtgaaaatcttgcgtcgccgccgacgtccgatccggccgccgaatttgtcatgggacccgttttgcgcccagctccgcctcgctctatgtcggatttgacacgtcagggttccaacgtgtcaaagcacccgtcctcttgacgcactgggtgctgccgttcgcccgcatggacgctcgcgacggtgtgggacgcaacatgaaaacgcccgcccgcatttcgcggacgggcgttttcggttggctcgaggttgcgtgctgcgaagggtttaggccacttcgaacagcagcgtcgccgcaagcggggacaccatgccgtcggcggttttcgcgcgcacggtcatgcggtagtcgcccttttcctcgaacgacgtggtgaactgccagttcacccacttgtcggccgtggcgccgtcggtgtcgcacgacgtccatgtgcggccgttgtcgaatgagaactcgatggcggcgatggggcttcccagatcgtcggccacgccttcgaacgtgatctcgtcgcctgccttgaacacgcagtcgtcggagtagttcatgatgttgatcttgttgcggtagcacgggtccacctgctgcacgtcgggctccgcatcctcctgcgtcagctcgatgttcacgatgtcgcgcgtgaagtagcgcgccacggtctcgggcatccacagctgcaggctcgacccggtggccgcctccagctcctggccgttcacctggtacgccagaagcgcgttcttctccagcgcgtagcgcaagggcagcggctggccgaagccgtcggcgccgtaggcggtgatggtgttcacgccgtcttccaggtcggccatctccaccacggccgacagcggcacgcccatgacggccgcctggccgaagggcgatccggtggcgcacgagcacgccatcatcgtctcctggttggcatcttcggccaggtcgcgcacgtcgatggtgaagttcttcttgatgttgccgcccacgttcacgtagaagttggccacgccgccctccacgtcgacgagctcggtggcaggcttcgagcacatgctggtcagcgctgttccgaacacgttgaacagctcgtcgttgggggtgacgccttcctggttgaaggtgaacgctccctgggcgttggccacggagacgtaggacacgtcgtcctcgttgaaccattgtgcggtcacgacgttgtctcccacggcatgcgtcgtggcgatcgggtccgcgtcggcggtctgcggtagtccggccgtagcgccgataccgcccactgctccgaacatcagcagcgcgccgccggccacgccgcccgcgatcttcttggggttgtaagccatggcgtcctcctactcgctcttctcgtcagatgccgccgcgaccttcggagggatcagcgatgcgctttccagcacggtcgtgtcctcggggttgggcatcttgtccttcgcgttgaacatgacggtctgggtctcgaagctcgtcatgccgctttcggtggtggcgcgaacggtcaggcagtacgcgccttccagttcgggcttgtaggtgaagctccaccacaccatcttgttgcgatccatgtcgccgatatcgtacttcgtccacgtttctccgcggtcaagggagaactcgacgcttgcgatcttctcgtcgtagccgtccacgtagccggtgaattcgtagggctggccgttctgcacgagcaggccgtcgggcacgccgaggatggtggcgttgggcttgttcatgggaacgtcgtcctcgttctgccatccgttcgggttgccggcccacttgtcggtgtagtcgatgtcctcgtcggtgacgtggtaggtgtcgatctgcttcgagttgatctgcgcgtccacgccttccacccagttcgtgcacggatagccgcgcgtcgcgtcgaggtactcgccgccgatcttgtacaccagcagcgcctcgtcggagtcgaccttgtccacggggaaggcgcgtttggagctgccgtcggcgcgcagcgccttcacgcccgtcgtgccgtccttgtagccgcccgccttttcgacgagccagctcacgggaatgccggttatctcggtgttcgtgactccgccgcctcccaccgggttccagttgcacaccatcttcgaggtcttcgtgatcacggcgccgtcggcctcggcttctttgatgagctcgggcagcgtggccgtgtactcggcgttcacgttgccgtcaacggtgatggtccattcgtcgaacaggctttgcggcatctccaggtcgaggccgttcacgcccgcgccgtggcgcatgttgtcgtagtaggcgtgcatccagtcgtacgagaacacgccgctctggccctgcgtcctctcttgatcgatcttgaaatcgccctgcacgttctcgacgtcgttgattccccacaggcgatcgtatttcgtgagatcccacagctccaggcccgcaccgttctcggtggcgttgtggcaggacatgcagtcgccctgatactggttgacgaagtcgctcttcgtgcgcgatccgtagtgaacggcgtgcatgagcgtgccgaactcgtactgcttcgcgatgtagcccggagcgtaggagtggcagaacaggcactgctgcagcgtggtcttgttgtccaactcgtcgttccaggcaaccgggtgctcgtagggcaggtgcttcagcagcgagttcatgtcggcatggcacgattcgcagccgcggttgtcggcgtccagccagtaggtgttgtacgagttggaaccggcttggatctgccaagcgtcggggttcacctcgtactcggtgggcgtgcgctgcaccatctgcccgttcggcagggtgcgcacttcgggagcgtattcggtcgcaacctggtcccagcggtcccataggttgtcgaggtattccttgccgggatagtagttctcgtcgatgtcctcgttcgtggtgccttcggcgccgtcgatgacggcctgctgctcgggcgtgagcttctgctcctgcgggacggcgcctccggccccggacggagcggcggcgcctgcgttctccgactgctgcggcgcgcatcctgccgccaggccgagcgtgcaggccgcgcaggttgccacgatgatggccttcttgttgagcctcatgcatccccctttccttgtcttggttcccgtcgtccgccatgcgcgctcgcgcttcgccgtttgcgtccctcccttcttcctcttgcgtcgtcgatgcgcgcggaccgtcccatcgtaggatgcgggctgccgtgcgcgccatcgcccaagtatccgattcgcgggtcgtccgatgatttccgcatcggacactttggccgatgcccgtgcagagcggggtgattctgccggttcgggccgaacgcgccgttttttgagggtgcgggcgtgcgaagggcgtgcgataatgagaggcggtcgccgagcggtggcctgatgttggggaggcttggggaatcaccgatcatgggcaaccgcggtctgcaaatcaatccggtgggcgtgctcgcttcgtgcgggctggggctcaatctggtctggtgcacgttgatgggccacacgctgggcttcatgtcgtcaacagccggcatggatgcgtgggcgaatccgcgcctgttcttccttgccggcatccttctatgcacggcggcgttcgcgacggctccgcgtgcgctcaagcgcgccgacggcatgctgcgcttcgtgctgccgctgttgtcggccttcggcacggcatgcttcggcatgtcgttccaccagaccttcttcgatcccggggcgctggccgtgggcggcctgttcgtggccggcgtgggctacttctggctggcggcgcgctatatgctgctgctcgcgcgcacgcagggctacgtgtgcgccgtcgccagcatagcgggcagtctggtgctcaagcttcccgtcttgctcgtgctcagcgcgttcgcaagccccgcagtgcaggtgatcgtcgccatcgccatgcctgtggccacggcgcttctgttcgaaacggcatgcactcttgcgcgcgatcgtgccgatctcgcggcaggggagggcgtttcggatgccgttgcgccttcgagggcggcttccgcctcggagggctctcgcgctcgtacggtgttcggcgtgccggccgtcccgcgcacgcgcgagcgcacgtcagctgccgaacgccgcaccatgctcgtgctgttggctattgcggcggtggtgctggctgttatccgctcggtgagctacctggggatgtggggcgatacgaacgcgaacatctccacggcgctgccgtggctcaccgccatgatcgttccggccgtctgcgtcgtggtgttcgcctacgccgcgctcgcgcgcctggccgatgccgcgttgccgatccgattccagcctgcgctgctgctcatcttggtgggtttgttcgtcgtagccatccaggcgaaccccacgggagcgtcgctcgggttcctcaccgtggtcatacagatcgacgagctgttcgcgcacctcttgttctggaccgtcgtggtaacggcgctcgacgtgctcgacgtgccgtcgtaccgcgtcatgggggtggccggcgtggtctatgcgggagcgtccatcgcctgggtgctgttgttgggacgcgcggccatcgtggacacgttgctcgtgatgctggcaacctacgctttcgtggtcgttgcgctgtgcgccgtttggttcgtgccgagtcgaaaggatgccgcttcgggcgaggtcgctgctccgctcgtgcagacggtgtcggacacgtgtctcgagctggcgggacgttatgcgctgtcgccgcgcgagaccgaggtgttcgtgcttctggcccagggccgcacgcgcgccttcatccaggacgagctggtgctgtcaggcagcaccgtgaagacccacgtctcccatatctacgccaagatgggcgtccacgaccgccaggagatgatggacctcatctggggctgacgcgtagaattcgatggcgaccgctctctcgtggtatgatacccatccggttttgcccctccgacgcgaaaggccctccacatgcatgtagatatatacaccgacggtgcggcgcgggggaatccggggccggggggctacggcacggtgctgcgcttcgtcgattcgaagggcgccgtccacgagaaggagctgtcgcagggctacgagcgcaccacgaacaaccgcatggagctcatggccgtggtggcgggtctcgaagtgctcaagcgcccgtgctccatcacgttgtactccgactcgcagtacgtggtgaacgccttcaaccagcattgggttgacggctggctcaagcgcggctggaagaacgcgcagaagcagcccgtgaagaacgacgatctgtggaagcgtctgctggcggccaaggagcctcacgacgtgacgttcgtgtgggtgaaggggcatgcgggccatcccgagaacgagcgctgcgacgagctggccacgacggccgccgacggcgcggggcgcattcgcgacgagggcttcaacggataagcgaggattccgaagctgcacccggctcacccgaggttcgtatgatgttcctgttcgatttccaagctgtttcgtaggcgagccatgcgatctgatacactagctcgcaatgtatacgagcatctgagcgcaggtggaggttcccacatgcaacagcaagcaatgcgcgcccgcaagggcgtgttcgcgggagcagtggctgcggccctcgcggcgactctcatgatcccttcgttggcgtacgccgatccgactgccagcgaaaagcaggctgaagctcaggccgcgctcgcatcgctcaacagcatgcagagtacgctcaaccgaacctccgtcgtctacgatgaggccttggccgcgcagagagaagccgaggccaagcgcgacgaggcgcaggcgcgcatcgacgaggcgaacggccagatcgccgaccttcaaacccgattgggatctcgtgcgcgcagcatgtaccgcacgggcggaagctcgttcctcgacctgctgctgggcgccaccaccttccaggagttctcgacgggttgggatatgctcaacaccttgaacgagaacgatgccgatctcgttcagcagacgaaagatctgcgtgccgaagtgcaggagcagcaggccgcctatgcagagcagcagcgcgtagccgccgagaaggccgatgaggcgctgcgctccaagcaggaggcggcgtccacgatgtccgccatgcaggctacctacgacagcctgagcgccgaagcggccgagctgctggagcaggagcgcgctgcgcaggcagccgccgatgcagctcaggcccaagccgtggtggaagcgtctgcgcgtcaggcccaagagaacgcgaacgcttcgggcaatgttgctccgggcaacgatccctcgccttctccgtcgccttcgccctctccgtcgcccgctccgagcgagccttccggaccctcctacaatcctgtgacgggcaatgctatcgtcgaccgggcgtacggttgcataggattgccatattcgtggggtggggtaggaccgagctcgttcgattgctccggcctggtaagctatgccgtgactggaagcttctcccgatggggaaccacgaacacgttcatgggcatgtcgcaggtaggtgatcctcaacctggcgatatcgccaccagctggggccactgcggtatctacatcggcaacggccagatgatccatgctccaaccttcggccagacggtgtgcatcagcccggtgcagggtgacatgatcatcgttcgcccgtagccccggattcctcaagcgaaagaaaacggcccttcggggccgttttctttcgggtgcatgctgtggcagcgcctaccgcacgctgttcttgatgagcgagcgcagttcgtcgatgccggtgcccttctccgacgagcacaccacgagcggcacgtcggcccccagcttcagctgcttcttcagggcggccttctgcttcatctgctgctgacggctgagcttgtcggccttcgtcagcaccacggcgaacggcagctcggcctcctgcaaaaagccgatcatgttcacgtcgaggtcggacgcctcgtggcggatgtccacgagcgaaaccacgagcgcgaggtcgcgatcctggttgaagtagccctcgatgagctccgaccagcggctcttgtccgacttcgacaccttcgcgtagccgtagcccggcaggtcgacgaagcgcacgccgtcgcaggagaagaagttgatggtggccgtcttgcccggcgtctgcgacaccttcgccagccctttgcggttgaacagcttgttcagcagcgacgacttgcccacgttcgagcgtcccgcaaacgcgatctcgggcatggtcgaaggcgtgagctgagacgatacgccgaatgatcgctcgaataccacgttgttgatgttcatgggacgctccttgcggccgtgctgttcgtcatgctcctcatggtacccgaaccgcgtcggggatgcgggcggaacccggcaaccccctcgcattccccacgggatgcgtcagacgcgcttgcgtcccgtgtacagcgccagcgccatgcaggcgaggctcgcccatgcccagaatcgatgctgcttcatgtccgacctccttcgcttcgatgtcgacgatactagttaatcatgattgactttatccgacaaccgcattatccttgataagttagattcgtgcaacttcaaatcgaagcgcgcggatggggaaccaacgagagagaggcgaagcgatgggattcaagaagaagagcgggctgctggtgggcgcgggctttctgctgggcacggtgggcgtgaaggcgctgaccagcaccaccgccaagaaatgctacgtgcagggcgtcgcgcaggggctgcgcgcgaaggcgacgtacgagaacatcgtcgaacaggcgaaggccgaggttgacgacatcgtggccgaggccacctacatcagcgtcgtcggcaaggacggggagcgccctgccgagcccgccgtcgaggccgacgaccagccggcgaagtagaacgcgatggactacgtcatcgcgagcgaggttcccggccgcttgcgcgtgcggctggtcggtcccgtgcccgccgacgatctcgacgcgctctaccgcgtgctgggcgcgtgcccggcggtggagcgcgcgaacgtctaccctcgcatcggcagcatcgccgtgcgctaccgtgcggcggacggcgcgcggcagcgggtgctcgatcacctggacgccatcgacgccgaggccatcgccgaagcccgttcgagctgcgggctcgaactggcaccgcgcacccagtcgctgctcatggacatcgcggtgctcgtggggtcgtacttcgcgcgccggtggttcctgccgaagcccgtcgcggccctcgtcaccgcctggcgctaccgcggcttcctggcggcggcggtccgctcgctcgggcgggcgcggctcgacgtgcccgtgctggacgctgccgccatcggcatgtcgttcgtcaagcgcgacccgcgcacggcgggtgagacgatgctgctgctgaacctgggcgagacgctggaggagtacacgcgctcgcggtcggagggggcgctcgtgaacgcgttgctcgacctcccggaaaccgcgcagctcgtcgagggcgaccaggaggtccaggtggctgcgtcggacctcaagccgggcgactgcatcgccgtgcgcaccggcatgcccgtgtgcgtcgatggcgaggtggtgcgcggcacggccatggtgaaccaggccgccctcaccggcgagccgctggcggtcgagcgcggcgtgggcgacaacgtgttctcgggcaccgcggtcgaggacggcgagatcatcgtgcgcgtgacggcggacgcgggcgagacgaagctgcgctccatcgtggcgctcgtggagcaggcggaatccttcaaatcggaaacccagtcgcgcatggagcagctggccgaccgcatcgtgccctggaacttcctgctggcaggcgccgtggcgctcaccacgcgcagcctcgtgaagacgtcggcggcgctcatggtggactactcctgcgccctcaagctcaccggctccatcgccgtgctggcggccatgagccaaagcgcgcaggcgggcttcaccgtgaagggctcgaagcacttcgaggccatggcggcggccgacaccatcgtgttcgacaagaccgggacgttgaccgaggccacgcccaacgtggcctgcgtgctggcgctcgacgggtggaaccgtcgcgaggtgctgcggctggccgcttgcctggaggagcatttcccgcacccggtggcccgcgccgtggtgcgcgcggccgcggagaagaaccttcggcaccgcgagcgccacgccgacgtggagtacctcgtggcgcacggcatcgcgtcgtcgctcgacggcaagcgcgtggtcatcggctcggagcatttcgtcgtggaggacgaaggcgtgtccctcaccgaggagcagaagcgccgcgtggccgacgaaacggaggggctgtcgccgctgtacctggcggtggacggcgagctgatcggcgtcatcggcatcgaggacccgctgaaggccggggtgcgcgaggccatcgccgacctgaggatgctcgggttcaagcgcgtcgtcatgctcacgggcgacggcgagcgcacggcggcgcgcatcgcggacgccgccggcgtgacggagtaccgcgccaacctgctgcccgaggacaagtacgccttcgtggagcggctgaaggcggaggggagcaaggtggtcatggtgggcgacggcgtgaacgacgccccggcgctctcgctggccgacgtgggcatcgccatggggcagggcaccgccgtggcgaaggaggtggccgacatcacgctgacgggagggcacctgagcgcgctcgtgacgctgcggacgctgagcgcggggctgaccgcgcgcctgaacgcatcgttcaaggaggtcatcgccatcaactcggcgctgctggcggcgggcatcggcggcctcatcacgccgcagacctcgtcgctgctgcacaacgcgtccacggtggcgctcagcgtgaggaacggcgggacgtaccgcgcctagcgtcaggccgtcggcggcgctgcgaacgcctcctcgaaggcatcgccgatcgacgcgaagccgtgcagcgcgggctcgtccgagaacaggtcgagcagcagggagcgctgggcagccgggaggtcgaggtcgtcgaaccagggaagcttcgcgtgccgcctgctgcgcactgcggcggggctcgcgtacagcaggaacagcagcacgtcggcgagcccggcgcgatcggatgcggtcgcggccgggctcgccgcgttccggtcgaagaagccggccagcccgaagtcgacgagcgacaccgttccctcggcgtcgatcagcaggttcgccggccgcacgtcgccgtgcgccacgccgcggccctccaggtgcgcgagcgcgtcgatgacctggcggccgatggaggcgatcgccgcttggtcgaacgaccgccgttgccggaacagcaggcggtcgagggaggtgccgggcatgaggctttgcgccatgaagcagcgcccgcggtcgcgcgcgtcgtcgcgctcgcgcacgatgccgagccagcgggggacggcggggtgcgcgcacagcgacagcgccttcgcctcgttccagagggcgtcgcggtcgagggacccctgctcgggtttgatcagcttgagggccgcgctgcggggctcgccgcttgcgcgcgaggcgcgaaagcacgtgccgaaccggccttggcccagcacggcgtcgagccgccatgcgccgaacgtgcggccgacgagcctgcggtcgccggccgcggtggcgaagcgcgctagccgcgcggcgtgccgcattcggggcagaacttcgcgctgggaggcagcgtcgcgccgcactgcgcgcagaacccgccgcccagcttctcgccgcattcgaggcagaacttggagcccgccggcacctgcgcgctgcacttcgggcaggaaagggcgcctgcggccgaggcggcacgcggagcctgcgcctgcgcttggggtgcggcctgcgcctggccggggatgggctgcgcgttctgctgggggtagccgtggccgtagcgcttgcggtccgagctgctgaacgagcccacgaagccgccgagcttgcccatgaatccttgcggttgatagtagccgctgccttggttggtgcggtgctttttgcgaccgctcatggagaagagccccatcgggtggtcctttcgatcaggtgggtagctgcgccccaggataccggatgcgatcgggctccgccgcttccgccgccgactcccggaaaaaaccaaggggcaccgcttcgcttgccccaagcccgtccccaagctccaactctcaatgcaacc

SEQ ID NO: 9757 - DNA, 121 bp, Unknown
  gut microbiota DNA sequence
cgagcctgcggccgaggcggcacgcggagcctgcgcctgcgcttggggcgcggcctgcgcctggccggggatgggctgcgcgttctgctgggggtagccgtggccgtagcgcttgcggtcc

SEQ ID NO: 9758 - DNA, 523 bp, Unknown
  gut microbiota DNA sequence
gttcgcgcggccaaattctgcagatacgccgaaatagcttggggcgcgaggcgaagctgcggctgcaagctctacactggttggcaacgaagtacctctatttgaaaggacaaggctatggccgatcgcgaagttgagagctctgacgtggaagttcccgagatccccgagattctggagaaagtgctcctgttctcgctcgatgaagccaaggaaaagatgacgcagggttccgacgttgtgccgttcacggcactggtggtgaaggagaacctgttcatcgagaaccatcctgccgactcggctgaggaatgcttcaacctggctcgtcatacggtggagcatgctcgcggtgccgcggcgtacgcgctgtgctacgacggctacatcgaaatcgacgatggcgtgaaggacgcgctcatcgccgagggcggcgtaccgggcgaagataccggctacgcggtgagctacctctacgaaatggacgaagagggcaacgtgacgttcgaggaagagcctgcct

SEQ ID NO: 9759 - DNA, 2724 bp, Unknown
  gut microbiota DNA sequence
cgccgcggcgtacgcgctgtgctacgacggctacatcgaaatcgacgacggcgtgaaggacgcgctcatcgccgagggcggcgtaccgggcgaagatgccggctacgcggtgagctacctctacgaaatggacgaagagggcaacgtgacgttcgaggaagagcctgcctatgtgggcgaggcgccgaacttcatgatcgcgctgaacgacgccgattcgtacgccgaagaggatatcgacgagaagtacctcgaagaggatgcggtggacgacgaggagtagcctcgcccatccgaacgaatgtttcacgtgaaacattcgcacaaacgcaagtttctccgaaccggccgcatcctgcaaaggtgcggccgattcgcatgtgcggcttcttcggccgccaggggcgccgcctcagctttcggggacgccgctcacctgtcggggacgctacctcacctggcgggggcgctgtctcgggtgccgggagaccgccggcgtttcgcgtccgcgaagcgccaaatggtttccactgcggcgaaagcgtcgcccgctgcagctgcgcgtgcagctgcagcggggttttccacaacccgcgaccatcccatcgtcgcttgtgtcgcaagctccccacctgcgtcgttggtcttcaccgcgctgattcagctcgccgactctcccgcagcgttggattcgcgctggaaaagatggcaaacggcgggtaatccgcgttggaaaacgtggcaagaaacgtggaatccgcgtgagatcggtgtgagaaacgggcaaggttgaggaagctgcgcgctggatctgcgccatataaacgtgagatgagcttggtatcatgtatgcaagatgttcggcacgttgctggaacatggtaagtatggcgaaaccatgctgaaacgatgatcgggaagattgtgttggtcgtttcggcccctgtttgctagaatagtcgggctaatcctgccccggcaatcttgccttctcagcaccggggccgtaaagaccaaaggaggtgagctgatgaaggcttatgaattgctgttttttgtcgctccgtctatcgacgaggaaacccgcgcagccgttatgaagcgtatcgacaccacgatcgctgagggcaaaggcacggttgacaacgtcgacaactggggcaagcgtaaactcgcttacgagatcaacggattgaccgatggtgactacactctcatcgatttccacgccgatcccgctgacgttgccgaactcgatcgtgttctgcgcatcaccgacgctgtggagcgccacatgatcgtcaagcgcacggaccgcgactaggagacgagcggggacctgggcaccacccagcgtccggcatgagaagaggtagacacacatgagcatcaaccgagttatcatcagcggaaaccttacccgcgatcccgagcttcgctccaccgcgagtgggtttcccgtgctgggcttcggcgtggcggtcaacgaccgccgcaagaaccagcagacgggcgagtgggaggattatccgaacttcatcgactgcacgatgttcggcgcgcgcgccgaaagcctctcgcgctacctcggcaagggcaccaaagtggccatcgagggcaagctccgctggagccagtgggagcgcgaaggccagaagcgcagcaagatcgaagtgatcgtcgacgagcttgaattcatgtcgagccgtaacagcgattcgtcgtcgtacggtggcggtatgggcggcggttattccgctcccgcagcagcccccgtggttgccgcgccggtggttgatgcctcttcttcggtttatgacgaagatatcccgttttaagcgaaacgaaagaggttagaaatgtccgattacgcgaagcagccgcgtcgcaagttctgccagttctgcaaagaggacacgcagtacatcgactacaaagacacgcaaatgctgcgcaagtacgttaccgatcgcggaaagatcaagccgcgccgcgtgacgggtgcctgcacccagcatcagcgcgacatcgcgaacgccgtgaagcgcgcccgcgagatggctttgatgccctacgcggtgcccgccatcagcggtcgcggcgaccgtcgcagccgctaggcgcaaggaggaaccatgaaagtcatcctgctccaagaattgaagggcaagggcggtgaaggcgacgtcgtggacgtggcccccggttttgccaacaactacctgctcccgcagaaggttgccatcctcgctacgaagggcaacctgaagcagctcgagcagcgcaagcacaacatcgccaagcgtgaagagaaccgtcttgccgacgccggcaagatcaaggaaacgctcgacggcgcgctggtcaaggtcgaggccaaggtgggcgaagagggtcagctgttcggttccgttaccgctcagatgatcgccgacgccatcaaggccgccaccgacgtggacgtcgaccgtcgtcgcatcgagctgggtcacgccatcaagacggccggccagcacgaggtgaccatctcgctgtaccgcgacatcaagacgacggtgaagctgttcgtcggcggcgcgggcgacgaggtcgctcctgccgaggctgaggccgaggtcgtcgaggagacgatcgaggaagtcgccgaggctcccgccgaggccgctgaatagcagctcgggaggtatccgaagtatttcgcggcagcggccgaacggtcgcagc

SEQ ID NO: 9760 - DNA, 1289 bp, Unknown
  gut microbiota DNA sequence
cgaagagaaccgccttgccgacgccggcaagatcaaggaaacgctcgacggcgcgctcgtcaaggtcgaagccaaggtgggcgaagagggtcagctgttcggttccgttaccgctcagatgatcgccgatgccatcaaggccgtgacggacgtcgacgtcgatcgtcgccgcatcgagctgggccacgccatcaagacggccggccagcacgaggtgaccatctcgctgtaccgcgacatcaagacgacggtgaagctgttcgtcggcggcgcggacgacgaggtcgctcctgccgaggccgaggttgtcgaggagacgatcgaggaagtcgtcgaggctcccgccgaggagaccgccgaggccgctgaatagcagctcgggaggtatccgaagtatttcgcggcagcggccgaacggtcgcagccgtagcgagacccccttcgccctttacggcgcgcgaagggggtctcttcgtttcgcaaggacggcgctgttctttccgggatgtttcatgtgagacatccctccgtgcggcggcgaaccgccgaggctgttgcgcgtggagtgtcggttgctcttcgatacgcggccgaggcttccggtaacagtagccggccccgcgcgacaagtgttgtatcatagggactcacgctattcgagagggagttcgagcatgtcttcacccgcgccgtacagcgccgacttcgcaccggaagaaaccaccgtatcggatcggcgaaagatcgatccgcagaacatcgaggcggagaaatccgtcctggccgcctgcatgctcaaccaggaagctatcgaggaagtggctccgaagctggtcaaggagaacttctaccgcatcgcccaccagcgcatctacgagtccatgatggatctgtacgtgcgccacatccccatcgaccacatctcgctggccgacaacctgaaggccatgggtcagctggaggccgtgggcggcaaagcgtacctcatcgagctggcagacaacacgttcgccctcaccaactggcagaaccacctggaaatcgtcaagcgcacctccatcctgcgcgacctcatccgcgcgtcgggcgagatcgaggcgctggcctatgacgcccccgacgatttgggcgtggtggtggaagaggccgagaaaacactgttccacgtcaccgagaagcgcgtgtcctcggcgttcaagcgcatggacgtgctgctaaccgaggcgttcgaggagctgacgaagctggccgagcagaaggacgccatggccggcatccccagcgggttc

SEQ ID NO: 9761 - DNA, 133 bp, Unknown
  gut microbiota DNA sequence
gctgttccacgtcaccgagaagcgcgtgtcctcggcgttcaagcgcatggacgtgctgctgaccgaggcgttcgaggagctgacgaagctggccgagcagaaggacgccatggccggcatccccagcgggttc

SEQ ID NO: 9762 - DNA, 109 bp, Unknown
  gut microbiota DNA sequence
cctgtacgtgcgccacatccccatcgaccacatctcactggccgacaacctgaaggccatgggtcagctggaggccgtgggcggcaaagcgtacctcatcgagctggca

SEQ ID NO: 9763 - DNA, 279 bp, Unknown
  gut microbiota DNA sequence
tacggcacgcgctcgcagctggagcacgtgtccgacatcatccatcgcaccatgtgtgcgagcggcctcaacgagacgatgacctactcgttcgccgagccgggcgacctcgaccgcctgcgcatgagccacgaggggctggggcgtccggtggagctcatcaacccgctgaacgccgaccagtccgtcatgcgccagagcatcgttcccggcctcatgcgcagcgtcgcctacaaccagagccgcggcgtgaagaacgtgcagctttacgagatgggc

SEQ ID NO: 9764 - DNA, 8345 bp, Unknown
  gut microbiota DNA sequence
gtcgacatcctcagccgcctgggctgcgaggtggccgatgccgacgacgccgacgtgctgtccgtgacggcgccgacgttccgcccggacctggagcgcgagatcgacctgtacgaggaagtggtgcgcctctggggcatggaccgcatcccggccacgctgccgggcggccgcggccgctacggcacgcgctcgcagctggagcacgtgtccgacatcatccatcgcaccatgtgcgcgagcggcctcaacgagacgatgacctactcgttcgccgagccgggcgacctcgaccgcctgcgcatgggccacgaggggctgggatgtccggtggagctcatcaatccgctgaacgccgaccagtccgtcatgcgccagagcatcgtccccggcctcatgcgcagcgtcgcctacaaccagagccgcggcgtgaagaacgtgcagctttacgagatgggcgccgtgttcttcgcgcacgagggcaagagccagccgaaggagcgccgccgtctggccggcgtcatggcgggcgccatgggcgatgccggttggaacagcgctccggccgcgttcgacttcttcgacggcaagggcgcgattgagaacctcgcgcgcgagctggcgctgccgaagctgcgcttcaaggcgctctcggccgacgaggccccgcatttgcagccgggccgcgcggccgcggtgctgtcgggcggcaccgagctgggctgggtgggcgagctgcacccgctggccgtggacgccttcgacgcgacggcgcccgtcgtggcgttcgagcttgacgtggacgctctcgcgaagtcggcgcgccccgcacgcgactacgtggacgtgcccacgttcccggccgtgtccatggacgtggcgttcgtcgtggacgagggcgtcacccacgagcgcctcgtgcagtgcatgacctcggcgggcggcaagctcttggaggacgtgcgcctgttcgacgtgtaccgcgacgaggcgcgcgtgggcgcgggcaagaagtccatggcctacgcgctcacgtaccgcgccgccgaccgcacgctcaccagcgaggaggtcgacaaggctcacgagcgcctggtcaagaaggtgtccagcgccaccggcgccgaagtccgcgggtaggtccgccctccaggcgcggctggcgctcgggttgccatcccgagcgcaggcccgcccgtgctgtccccgcgttcccttccagcaacgacaggaacgcagggggccggcgggtggtcggcatgccgatggcggtggtatactgacgtcatgaagacgctcgaccaacataccatcgcttcggcagtgcgctctattgctcctggctacggagttgtgaaagcgtacctgttcggttcgcacgcacgcggcgatgcggatgccgcatctgacgtggatctgtgcattgagcctgacgacgggttcacgctcttttcccttggaggcttcggcagccatcttgaagaggcgttgggggtgccggtcgacgtggtgtgcggggacgattcgttttacccgcgcgcccgcgaacgctacgagcgagacagaaagctcatttatgagaaatcctgaagcgatcgaatgcattgaactcatggtgccgctttgcgatatcgtatccgaccgaatcgcgcgctactcgatgtccagagaaagcgtgtgcctgaacgacgaccatctcgatcttttgctgatgccgatatttcagatcggggaactgatcggcggaggcggatacctcgatgctttgcaggaactctatccttcggatatgtgggttcaggcatatggcatgcgcaatcgaatcgcccatggttatgcaaaattgaagcctgcgattgtttgggaaacagctataacaagcattcccgccctgcgggaattgtgcctgcggttgctcgaagactagcgcggtatctgccttacatccccatgattgcaagcgcttcgatcagggttcgtgcgtttcaggctcgacggggagatcgctcccgctgcatccggaaaacgatgctataccgagcgcgaacgcgaaggcgaggctagtcgtcagaagggacgttcggttggattggcgcatgggggcgtcctttcctcgtcggttccgtttccccagtatagcgcaatcccgttaccggttcgtcaacggacgcacacctgcgtgcggcgccgccgtacgacaattatgcggacggcgaaagggacggcatggcgaaatcggtgggcacgcaggatagggtgttgcgcaagcggcgcatggccgtggcggcggcgctgcttgcgttcgccggcatcgtcggggtgctggcgctactgttcggccgcgacgcgctggctttcctgaccgacggacatcgcgtgcagcagcaggtggaacgcttggggccgcttgcgcccgtggtgttcggcctgctggtcgttctgcaagaggtgacggtgatcgttcccagcgagccgctggagcttgccgcgggctacgcgttcgggttctgggagggcgcgttcgtgtaccttgccgccagcgtggtcggctgtttcgccatcatcgcggtagtgcgcttcggcggcgatcgcgtgctcgagctcgtcctcacgagaaagggtcgcgagtggctggcccgcttgcgcggggcgcagaggttcgacttcgctattctcgcggcgttcttcatccccggcctgccgaaggatctcatggcctatctcgccgcgttcgccggcatgcgccccgtgcacctggccgttgtcaccacggccggtcggctgccgtcggtgctggccatcacgctgggatcgtcgttcgccgccgcaggcgattggcgggcgaccgccatcgtgttcagcgtcaccgccgcggccgtggtgatcggcgcgctcgcataccatcgcttcaagcgccagcgcgacgggggtgcgggaggagcggcgaagtaggcggacgatgcgcttagcggggcggtgcgacggtcttcagaatctagagaaaactccccattttgtccataggtgttttggtcataattacgaatgtcctccaggggtatggcgcgggatttgctggcgaacggagcgggcgggacgggcagagtgggatgcgatctcccgatcttccttctctttccgatgttcgcgatgtctaacaagcggtacaatagccggcaaaacgaaaggatacgcgtatgtacgacggacgaaccaacccgggccgcaacgacgaatgctggtgcggcagcggcaagaagtacaagaagtgccacctcgatttcgacgagcgcctgcagagcatgtacgagcagggcttcgaactgcccgaccgcgcctcgctgaaaagcgcggccgacatcgagggcatcaagcgcagcgcggccatcaacatcggggtgctggactacgtggccgagcgcatcggaccgggcacgaccaccgaggaagtcgaccgctgggtgcacgactacacggtggagcacggcggcatcccggccgacttgaactacgagggctacccgaaaagcgtgtgcacctccatcaacgacgtggtgtgccacggcatcccgtccgaggacgacgtgctgcgcgaaggcgacatcgtgaacgtggactgctccaccatcctcgacggctactactcggactcgtcgcgcatgttccgcatcggcgaggtgtcgcccgagcgagcgcgcctcgtggacgagacgaagaaggccatggaagcgggccttgccgccatcgagccgtgggggctgctcggcgacgtgggcgcggcggtgaacgcgtacgcgaaggcgcagggcttctcggtggtgcgcgagttcggcggccacggcatcgggttcgacttccacgaggacccgttcgtcagccacgtgtcggaaccggggacgggcatggtgctggtgccggggctcgtgttcaccatcgagcccatggtgaacgccggcgaggcgcccatcgacatgagcgacccgaacggctggaccgtgcgcactgccgacggcagcgacaccgctcagtgggaagtgcaggtcgccatcacggaagacggccacgagctgctttcctggtagaggacaacagctcggttgtcgttcctcgaggcgcatgcaacgtttcgttcaggtaaaaagacttgtgttttttgaaggcgcccgggacaccatggtatactaactgctgtaaaaggaccaccggatctaggtgttcgcactagtggtgaaggtggcttcggggaaagcgtcccgacactcgatctaggtgttcgcactagtggtgacggtgtccggggcgcttccgtgtttaaggaaatcgtaaatcctgatcagcctctttatttccggacaatcgttgaaaatgcgagggttgttccctatgtccgtcttgagcagcgtctccaagctgtcgatatcgtattcttcgatttcgagaaagcagagctttctgtagaggctgtcgggcttgttctcgcttgtgcgttccatttcgattatcgcactgactgtttttacatcgagttgtttacggaagcttttcttttggctgcgataggcactgtttaaatacgaatcgatggcggtatggtttttcgcgaattcggaaactttgtcgtaaagctccccttcgtacacctccaagtatttgaaaattggcaaaccaccggtattgtgcttgagcaaatcgggcagatattgctcgaccaccagcctcggattgaggttcatattgtcgaacacggcatccagatagatgtcgttagccttgacggggctccctttggatgtggtatccgctccgattccgatgattatcttggcatcttcgggcaaagatgagattccgtcgaagcctcgagtggttacggtgccatgtgttgacagatccatttgaaatatcttctttttcagcgtcctcataagcctaggcggataaagcgtttccgatttcgcgattgcttggtaaataggggtgaaatcgtcggaagtgatcgttgtcatttcgatggaagcttcggatccgaacgattgacgggtatatgtgataccgacgtcgctgccgtgctgcacgaaaatcattcggtcgcgcagtttgccaagcccttcaggcccaaggcattcggcgagtgattctaggatgttgagaatgtttttgtcgttcatggagtagcccatgaacacaatggggtattcgacgaaaacagtaagaattttggcgaccaggtaggcttttctcgtgttgaacgaatcgtagtccgatgaggtgatgacgatgctgtcgggattgtcaaccgacccgtggattttgtatatctcccccacttcgtatatatctgagaggagcagctcgctttggcctgcgtaggttttgaagccggggaacaatccttcgatgaagcggtcgtagttggtggtgatcactcctgagatcttattcgatgctgcacgaaggacagagagttcttcgtgcaaaagagtcggttcgtatgtgtcgagatagcgggcgatgaaaagcttgaaagcggaagtcccggccttcagctggtcgaaatgctcattcctgaacccttcgaacgatggatcggcgagagcagtgcgattgaagtctttctccatcagtgtagcgattgccgggtatcgttcaaatttccctgtgccggacacctcgttgtcgtatctctcgagtgcgaatggattgtcggatattctcgcgcatatccctcgtaagagggattcccaattggggagctctgcatacctcataggaatgcctgagcctacgaacagaaaggggtggcgaccggttttgcgtaggcgagaccccagcttcactctaatctcgtcatacttggtctgttcttccataaggccccttcctctgctgagctttagcttatggtatcacgaaggctttgatataggcgcgaccatcgaagccgttcgcaggagagccggggagggggtcggctctcccgcgtgacctgctacttctcggccaccatgcggccgatgacgtatccttcggtgtagcagcggcccagcgacaggccgaacacggtcagcgggtagtcgatgccgccgtagaagtggcccgaacagttgccgatggcgtacaggttctcgatgacctcgccttcgggcgtgaggcattcatgcttcgcgttcacgtccacgcccgagcagatggcgctcatgcgcacgtgacggtggatgccgtagaagggcggggtgtccacgggaaccaggtagttcgcgggcttgccgaagtcctcgtccttgccagcggcaaccagctcgttgtagcgcttcacgctatcgacgaacgcggccttgtcggtgatctccagcttgtcggccagctcctccagggtgtcggccttgaacgtgttgatctgcccctcgaacacgccctcgcgctcaacgtcctcttcgggcatgtacaccttgaggccctcggggtccaccagcttgccgggccactcggccgccgcttccatgtagttgctgtcgaacacctggcagtagtgccccgaatcctccttcgagcgcaggtagcagttcatgagcgacatctccaccgtctcgttgacgaagcgcgtgccgtccatcttcacggccagaaacggcatgtcgcacatggaggccgggcctgcgtcgaagtcgtgcagcatcttcgtgtgcgccaggtcctcgatcttgccgccggcccacactaccatcttgtggccgtcgccggtcttgttcgtctgcttgggctcgaagttcgtcatgtcgggttggtagtagtgcagcatctcctcgtcgttctggtagtcgccgcacgccacgatcacgcccttcgaggcgttgaactgcatgtagccgtccttgcccttcgcgatgacgccggtcaccttgccaccgtcgcccgtgaccagctgctcggcgggggtggagtagaagatctcgacgccttccttctcggccgtggaggccagcgcgcgcatgccgtcgccggtgttgtagggcttggggccgaagaacgaggtgacgaaattgatgttgtaccccttcttgttgatgaggggcatatgctgcaggttgccctggtcgatcacctgggcgccgccttcgagcgatttctcgatgacccacttcacagcctcgccggagttctgcgcccacagctctaccagttcgcgattcggacggtgctggctgtcggcgatcagctgcgatacgaggttggcgatgtcggccgggtcgctcgtggccaggtcgatgccgctgcccgagttgccctgcgcgatggcctgcgattccttctgaagcagcgccaccttcgcgcccgcctcgaaggccgacagcgcggccggcacgcctgacgcgccggcgccgatgaccaccacgtcgtagtcctttgtctccttgacgtcggcgatggcctcgggtgcggtcaggaagctgggcatgccggtgcgcaagtgccctgccgccgtggtggcctcgtcggtcgtgctcgctgcgctggccgagcctgcggcgcccgccccttgcggcgcgcatgacgccagcgccccggcgcccacgacgcccgctgccgcgatgcctccgaatttgaacagatcgcgcctgctgattccgttgacgtgctcgtgcatgatgccctcctagcgtgtcggtccttcgcgttcgcccgatccgtttcaggcgaacccctcgagacgcaccatagcctcgtggcgcgcgcctgtcgttcgtccacgtgtcgggaaccggggattattttcatcatccttacctatcatcccatcgttgagcaggcataatgagggatcgaggctctggtcgaggtgcggagctccctgggcatagggcgatagtttcgctagaatggtgaaccatcgaaacactggggagggggtgccgacgagggcagcgcgtcggttcgatgctatggaaaacggcgaaacgaagggatccggggagttcgatcgaccccgagagagcgcggagcttcgcttcgcggacgacgaagcggtcggcgtgcgggaggccgacgcgcccgcgtgtgaggacggcaccgttgcgggcgcacgggcgccgggcccgctgctgccgtggctgccgtccatcccgctgttcttcctcgggctgggcgtgtaccgtgcgtggatcgagatcgtgttcgtgggctcgttcgtccggttccccgcggcctccgtcgcgggccacgatgcgttcgacctcgtgatgatagccacgatgtttctgtgcgccgcccttgctaagcgtatcggcccgctgttcggaaagcgctcgttgtacgccgtgtccggcgttgcgcttacggtgtccacg

SEQ ID NO: 9765 - DNA, 136 bp, Unknown
  gut microbiota DNA sequence
ttggataccgaggtcagcggatgcgcttgccgtgccggcggtgctgctgggcgggtttggcattgcgctcgtcattctgctgtggtcggaactgtacggctgtctcaatccgtttcgcgtcgcgctgtactattcg

SEQ ID NO: 9766 - DNA, 1024 bp, Unknown
  gut microbiota DNA sequence
ctcgtgcttcgcattcacgtccacgcccgagcagatggcgctcatgcgcacgtggcgatggatgccgtagaagggcggggtgtccaagggaaccaggtagttcgccggcttgccgaagtcctcgtccttgccggctgccgccaactcgttgtagcgcttcacgctggcgacgaacgcggccttatcggcgatttccagcttgtcggccagctcctcaagcgtgtcggccttgaacgtgttgatctgcccctcgaacacgccctcgcgctccacgtcctcctcgggcatgtacactttcaggccctcgggatccaccagcttgccgggccactcggccgccgcttccatgtagttgctgtcgaacacctggcagtagtgccccgaatcctccttcgagcgcaggtagcagttcagaagcgacatctccacggtctcgttcacgaagcgcgttccgtccatcttcacggccaggaacggcatgtcgcacatggaggccgggcccgcgtcgaagtcgtgcagcatcttcgtgtgcgccaggtcctcgatcttgccgcctgcccacaccaccatcttgtggccgtcgccggtcttgttcgtctgcttgggctcgaagttcgtcatgtcgggctggtagtaatgcagcatctcctcgtcgttctggtagtcgccgcacgccacgatcacgcccttcgaggcgttgaactgcacatgtccgtccttgcccttcgcgatgacgccggtcactttgccgccgtcgcccgtgaccagctgctcggcgggggtggagtagaagatctcgacgccttccttctcggccgtggcggccagcgcgcgcatgccgtcgccggtgttgtagggcttggggccgaagaacgaggtgacgaaattgatgtcgtaccccttcttgttgatgaggggcatatgctgttgattgccctggtcgatcacctgtgcgccgccttcgagcgatttctcgatgacccacttcacagcctcgccggagttctgcgcccacagctctacc

SEQ ID NO: 9767 - DNA, 517 bp, Unknown
  gut microbiota DNA sequence
cgatgcgccggcgccgatgaccaccacgtcgtagtcctttgtctccttgacatcggtgatggcctcgggcgcggtcaggaagctgggcatgccggtgcgcaggtgcccggcagccgtggtggtctcgtcggtcgtgcttgtcgtgctggccgagcctgcggagcccgtcccttgcggcgcgcatgacgccagcgccccggcgcccacgacgcccgctgctgcgatgcctccaaatttgaacagatcgcgcctgctgattccattgttatgctcgtgcatgatgccctcctagcgtgtcgatccttcgcgttcgcccggttttttcgggcgaatccctcgagatgcaccatagccccgcggcgcgcgcctgtcgttcgtccacgtgccgggaaacggggattattttcatcatccttgcctatcatcccatcgttgagcaggcagtatgagggatcgaggctctggtcgaggtgcggagctccctgggcatagggcgatagtttcgctagaatggtga

SEQ ID NO: 9768 - DNA, 1773 bp, Unknown
  gut microbiota DNA sequence
gagttccccgcagctgctgtcgcgggccacgacgcgttcgatctcgtgatgatagccacgatgtttttgtgcgccgcccttgccaagcgtatcggcccgctgttcggaaagcgctcgttgtacgccgtgtccggcgttgcgcttacggtgtccacgctgtgcatgttcgcgtccatctggataccgaggtcggcggatgcgcttgccgtgccggcggtgctgctgggcgggtttggcatcgcgctcgtcattctgctgtggtcggaactgtacggctgtctcaatccgtttcgcgtcgcgctgtactattcggcgtccatgatcgtggcggcgctcctcatttatttgtgcaggggtttgctgttaccgtggctcggcgccgtcgtgctcgtgctgcccgtcgtgtcgcttgccgcctgcgcggcggggttccgctcgttgccctccggcgagcttccgcgcgccaagccgtcgaagttctcgttcccttggaagatcgtgttgctcatggccatctacgcgttcgcgtacgggctgaaggaatcgtcgatgtaccagtcgacgctcggcccgcattcggcgttcggcacgctggcggtggccgctatcgtgttcgtcggcgtcatagcgcgcggcggcaagttcgacttcggcgtgatctaccgcatcgcgctgccgctcatggtggcggctttcctcatcttgccgaacgtgggcgtcctggggcaggccgcgtccgatttctgcacgagtgcgtcctacaccgcgttctccatcctcatcatgctcatcatggcgaacctgtgctatcgctacgggatgtcggccgtgtggctgttcggcatcgagcgcggcgtgcgtgcgttgtttaccctgttcggacgccagaccgagcagctgttgggcgcgccgtcgttcggactggccggatcggatgccgttgtcagcgggctcgtggtcatcctcgtggtggcagccacgatgatcctcttctcggaaaaggagctgtccagccgctggggcgtgtcgtttctgggcgaggatggcgcggcgggcgaccgggccatcgtcaagaagcaagagctggcgaaccgatgccaggagctggcgcgttcgtacggcctgtcgccgcgcgaggaagaggtgctgctgttgctggcgcagcgcaagaccgtgggatccatcgagcgcgagctgttcattgcgaacggcacggccaaaacgcacatccgccatatctaccgcaagctcgacatccattcgcgcgacgagctgtccgatctgctgggattattcgaataatttaacaaacaaatgttcgtatcatatgctatactgttctcgaacgaaagaaccagtgcaagcgctgaacccgacgcctcccgaaggacgggcagcccattgatgaccgcggtgttccacgcgatccgtaccacgcttgcaggatcgagcatcctcccacgacctggaacacggtaaacgaggtgtcgtactatgcctgcattcggaaatcaaacgtcgtgctcctaccctgaaacgctcgtgctcgtcgaggcgctgcctttgtgccgcatcctcgcgtctgattggccgggagaggaggttccggccgagtttcccctgttcgacgaggaggttgaagcggaaagcatgctcgcgcgcccgttgcgatgcgccgcggtcatgccgtgcgccgaagcattcgcgcttctggaagaggtcggtcatgtcggatggtagcgcctgggaacgcgaggcgctttccatcaagca

SEQ ID NO: 9769 - DNA, 292 bp, Unknown
  gut microbiota DNA sequence
accgagtttcccctgttcgacgaggaggttgaagcggaaagcgtgttcgcgcgcccgttgcgatgcgccgcggtcatgccgtgcgccgaagcgttcgcgcttctggaagaggtcggtcatgtcggatggtagcgcctgggaacgcgaggcgctttccatcaagcaggttccttcgctgcaagccctgctgcgctgctgcgacgagcggctgctcgtccgtgctatcgtcgaagagcatgcggttctggccggcgattgggatgcgcttccggcgaagcgcaagcgggcggcc

SEQ ID NO: 9770 - DNA, 727 bp, Unknown
  gut microbiota DNA sequence
ggccctgctgcgctgctgcgacgagcggctgctcgtccgcgctatcgtcgaagagcatgcggttctggccggcgattgggatgcgcttccggcgaagcgcaagcgggcggccgagaagcggctggcggccacgttggccacgatgcggggcctgccgctcgacaaaaagggcgcgcggggcagcctgctgctgccgcatgagtcgttcgtgctgcacgcgcgcagcggcttgatcgagcgccacgtgtccgcggcgctgctttcgctcgacgacgtgccgctcgcgcgcagggccgtccagcgctccgacgccgcgccgcccggagaagccgaggggccgcagccgcgtccctacacgctcgatccgtgggagcggacgcttgcgagccgcgtgtggctgggcggttctcggtgctgccgcgagcgctacctcgtgctggcggcagcgttctgggagatgacgtacttcgggttcgagtacgagcgcgtctgcgcgcgccgtgcagaggagaaggcgcgccgtctggtggggaaggacgtgcctggcgagcgtccctcggagcctccgcgcaccgtgtccgacgagcggcgccgacaggcggaggggttcgggctcgtggagcccgaccgcttcgagctcgactaccgcgatagcatgatcgtgcgagtcgcgcagctcaacgacgacagccgcaaagccctttggctgctgctgctcgacgtggcg

SEQ ID NO: 9771 - DNA, 472 bp, Unknown
  gut microbiota DNA sequence
cgcgggcgggcttgcgcagctggaggccgcgctgcgcttcggtgcggacgccgtgtacctggccgccgatcgtttcgggctgcggcagcgcgcggcgaacttcgcgctggacgacgttcccgctgcggcagctcgcgcgcacgatgcgggcgcgaaggcgtacgcgacgctgaacgccctcatggacgccgacgacctcaaggcgcttcccgcgtacctcgaagcgctggccgcggccggcgtcgacgcgttcatcgtgagcgacctgggcgcgctgcgcctggcacagcggcacgcgccgaacgtcgagctgcacgtgagcacccaggcctcggtatgcaacgccgaggcggcgcgcgtatggcacgagctgggcgcgagccgcgtggtgtgcgcgcgagagatgagcgtggaggacatcgcgcgactgcgcgccggcgccccgcgcgagctggagctggaggcgttcgtg

SEQ ID NO: 9772 - DNA, 184 bp, Unknown
  gut microbiota DNA sequence
ggtgatggccatcatcaatcagaagggcggcgttggaaaatccacgactgcgatcaacctttccgccgcattaggggagttgggcaagcaagttttgttggtcgatcttgacccgcagggcaactcctcgagtggtttaggtatcgagaagagccaagtgcataattgcgtgtacgacgtttta

SEQ ID NO: 9773 - DNA, 670 bp, Unknown
  gut microbiota DNA sequence
agtgatacgcccgccggcaacaaccattgaaagccttttcatcgccatatactcatttcctcccgcttaattatgtgcggtgatatcatcaaattaaggaacggctcaataagatctcgacaaaaggagtgatcgccatgtcctcaggattcagaccccgttggatggactgcgacgagccgggatggaaccccgacagccgtagggattccactgccgaacccgaacaagccagcgaccgcatggctctggcactgccgtccgaatgcatcgtctatcccatccgctacacgatgcacgtcaacgcggagggctccgaaagagacaggaagagcgccagcttgctggacggcaaaaccgagtccgacaccccgctggtgctgactacgatgacggaagaaagctccacgtttatcctggtttctttcgacgacgacagctatctgatcatcgacgagcggtcgtcgggagttttgcagatcgagcacgcatcggacgacgcatacgcccgcatcgtgctaggcgcatacgaagaaggggctacccaccagctttggcgtttcgagccaaccggccacggatcgtattatctcgtgtctaagagaaacgggctggttgtcgatctgtgcaacttccagctggcggatggaagcccccttatcgcctaccc

SEQ ID NO: 9774 - DNA, 1650 bp, Unknown
  gut microbiota DNA sequence
cgacgcgctgttcatgagagagcgcgtgtcggtggatgtcatgggcgttcctgtgctgagacgcggagcgctatgccccttcgacgagcaacggctgctgcgcgaagcgggcgatcgggagatcgttatccgcgtggaccttggggcgggcggtgcgcaaacgacgtactggactggcgatctgccgccgggctaggcgtccggacgacgggatgcgggccgtgcgaagaccgtgcggttcgcggcgcggcgtcgcggacggcgcacgcgcgaatcgacggcgcgatggaaggtgatttcggtgacggtcgaaatggtggaaattttccttcagattctgatcctgttggcgttcggcttcttgttctccaagcgcggcatcatcacggagtcgatgaagaacggcttgtcgaccttgctcttgaaggccgtgttgccgctggtcatcctgtcgtcgtcccaggttgctttcgatggatcggtgctgcaggggttcgtggtcaccatggcggtgtcgttggtcttctacgtggtggttgtcggcggcttggggcttgtccggaagcgcattcccatccctgacggcggcaaccgcatcttcgtgcttttgtgcgcatacggcaacgacgggttcatcggcatcccgttggccatgcaattcttcggctcgtccggcatgttgtacgccatcgcggcgaacatcgtgttcaacatcacccttttcagcttcggcatcgcggttttgcaggacaaggcgaagcccgatatcaagggcattctgctgaacccttgtctgatctgcaccgtcgtcgcgcttgtgctgtacgcgcttccgttcaggttcccgacccccatcgcggacgcgttcaatatggccggttctatgatgacgccgctggccatgttcataatcggctacgaaatgtcgcgcatgaagctgtcggatgtggtgagagacaaatgggcttacatcgtttcctttatgcgcctcctggccttgcccgctctggctgcggtcgtcctctcgttcgtgcccgggatcgacccgctggtggcttcggtcagcgtcttcctgcttgccatgccgtgcggcacgctcaacgtcattctgtcccagcaatacggtgcgaacccgaagttcgccgcccgggccacgacgcaaagcatgttcctgttcctgctcaccgtgcctcttatcctgatcctggtgaaggtgctgttctgactgatggggcggctcttcccgcgcgccgagccttctctcggctcgaattgtttcacgtgaaacatttgaggtccgacgcggattgtttcccgtgacacaatccgggcgcgacacgagatgctcttcgtgggacattcgaggttgcgatgtgggatgtttcgcgtgaaacattccggatgccgcgggatgctctcgcaggctctttctgcgatgggcgcagcattcgatgccctgggcgagccgtgccgataccggttttccgaccgcttgcgaccgcgttgcccgatcccttcctctgcctgccgcgtcggtgggctctctgcgtgaacgcctcacccgttgccgctgtgcgcctttggcgtcggcgccctccccgccgtccggcgatcgaaccctccggaactcatgtggagacctcgaaaaga

SEQ ID NO: 9775 - DNA, 234 bp, Unknown
  gut microbiota DNA sequence
ggctcgggggtagggccgcattcgcacagcaaggctttcgccagcagacgagccgtggtggtcttgccggtgccgcgcggacccgtgaacaggtaggcgtggctcaccttgtcctgttcgatcgcgtttttgatcgtgcgttctatgtgctcctggccgacgacgtcttcgaagatctgcggccggtatttacggtaaagtgcctctgccatcgcgtacgccctcttccctgct

SEQ ID NO: 9776 - DNA, 309 bp, Unknown
  gut microbiota DNA sequence
aaaggaattgatgattatacaggaagctatacagccaactatgaggatttttcaggtacagagtatttgttcggaggaacttccataaagagagaagccggtaaggagctgtccattgattgcaccttggagattacggaaggtactgcaaaagtattttggatttctggatctgatgaagcagtcacgttgattgaagcaaccggaacttatagtgacacaattacacttcctgatggtggaaattatattggcattgaatgtgagaatttcactggaaacattgaattaaatattgaataatactct

SEQ ID NO: 9777 - DNA, 1633 bp, Unknown
  gut microbiota DNA sequence
ggctcgccgcgctccccggcccgccgaatccctccggcccgccgcgtccccgctgacccgccgcccctccgggccgccgtgtcccgccgggccgctttcttgtccgtgtttcactacccgctgccggcggccaatgcgcaaaattcgcgcaggattgcacaaaaagcggcgacgttcgatggtgaaagggccgttcgagcgggacggagggcttcgcatctcggacgggttccgggctcgagtttcccacctgcggttttgtcgagatccctcgatcggcgctccctcggctttcttcaaggaatcaaacgtcgcggttttttgtgcgaatcgcagcctggaagatgcatcgaaggtcagtcgtaccctattgggaggccgagctgtctgcggagtttcagcttcctcgagtggtagtttgccacgcgcacctgcgatcgctttccgaggtgcttgcggatcctgtccgcgatcgcatcggtggcgactaggctgtccagctcgtcattggtgacggagacgacggtccatcccatggaagcgagcgcattggttcttcgggagtcctcgatgcgcttctcttccccggagtgcgattcccgactttggtactccacatcaagcttcgcttccggccagcatagatcgcaccggaaacacgatttgcccgtgagcgcttgtgcggccgggttggctttcacctcgtagttcatgcggggaatgcccagcccgtatccgccgtacatcatgggcaggccgaggagaatggctttcttggtctcgcgcggggaggccgagttgtcggcaaggtagcgcaaggttttcgcggctttggttgcgccgcgaagcgacgggtttcgtgtggcgaagtctgcaagggcgtgaatcgatgacaggggttcgacctggtaggcggatgatgtgccggttcgtctggtttgataggagccgcacagttcgtagccgagttcgagcagtgcgatcatgctggtctcttgagctgctatatgcacgaaggcgaggggtgcagcgcttacgtatgcgccgttgccaagtcggtgaagcgggcgtccctgcacgatcgttttgcatgcgcgcaccgtgaaagcgcttgtagatcggcattgggatacgcgagacaccagaagatgcacaggttgttcgagcatcatggatgggtgcaacgtttcgagcgattcgagggcctgccgaaaggcgcacatgctgggcgctcgatccggcatcgtgtgcgctccgctgcgcaaaagggttcgctctcgcgggtcggtcgtgcgcaggatctgcaaagcggtttcgtatccgaagcatatcgagggtgaagccaccgcgcctcctcagtgcccttgggttgagaggatcttacgggcgtggtaggggaaacgagggcacggtttccgcaatgggccgcctcgtgaggaggggcgctcgcactggctctttgttgccgatattctagcacgcgaaaggcggtgcgggaatgcgagtgcagcaagatgcaagcgaccgacggccaggccgacagccggttccatcttgccgccacgatcgggtgcgcgcctattcggccgcatcggcgtttagcgcatccccctcttcctcgatggcctgcacc

SEQ ID NO: 9778 - DNA, 1038 bp, Unknown
  gut microbiota DNA sequence
gaggcggtgcgggaatgcgagtgcagcaagatgcaagcgaccgacggccaggccgacagccggttccatctcgtcgtcacgatcgggtgcgcgcctattcggccgcatcggcgtttagcgcatccccctcttcctcgatggcctgcacctcgatcacttccatgatgaggcgaccgaaatcgggcgcggtggccgaggtgatgacgggcccgccgatcttcttctcggctgctttgcgcgcgatgcccgccacctcgccgcctgagcgtgcgacctcgcggtgctcggggaggctttcagggtcggtcgctcgctcgacctcggccgtggtggcttccgccagcgtgctcaaagctagctctaggtcgctcatgttgtcgcgcaggctttcgttggcgaggcctttgaaggttttgtactcgcgggcggtcagatccgaccaggcgtgatatatgtcgttggtcaggatggcgtattcggaattggttttcacgccgcgttctcgccattcgaacgtcaggttcttcctcacgcgaatggagaacaggcgctggctgatccagtcctcggtgtagcctttgcggcggtagtactcgatggcgcgttcgatggcgagctcggggtcgaacatttcgtcgatgcgctctttgccgacctgtgcgagccacagcttgaacggctcggccttgggcgaggggatggaccggacgaggcgcaggatctgctcggtggtgccggcatcggtgcggtagaactattgtcttccgcagactgcgttttcagttggctgcattctgcaaccaaccgaccgccttcctcttcgaggcgatgcttgagcgctctccgataggtgcgagcttcggggctttccgtcaacatcgccatcgcgtccatgatggaaaagttcccgacttatgcgctgctctgccatgaaaaaggccgaaaaaggcaatgtccgtgacttatgtgcgctccgaaaggctccaaccttctcttttttgcggctctcgcaattcaaaagattctgtgaccaggtat

SEQ ID NO: 9779 - DNA, 977 bp, Unknown
  gut microbiota DNA sequence
cgatggaaaagttcccgacttatgcgctgctctgccatgaaaaaggccgaaaaaggcaatgtccgtgacttacgtgcgctccgaaaggctccaaccttctcttttttgcggctctcgcaattcaaaagattctgtgaccaggtatttccctgatcacgttcacgatgaggcgcgcagaagtctaagacttgcttggcggaagtgcgcataagtaggggacattgccgttttcggccttttccatggcagagcgcgtttcactgccggttttgccgtttgggcttggagcgaaaagagggtgcgtgcggttgcggctctcgaaatgcgggttcccgcgtttgccttgcggtacaataccctctatgagcgaaccggcatccatagtgatcatcgaggacgacgccgacatcaacgaggtggtggcggtgcatttgcgccgcaacgggttcgcttgcacgcaggccttctcgggcagcgaggggcggctgctgctttccggctccgagccgttcgacctcgtgatcaccgatctcatgctgccgggcatggcgggcgaggacgtggtgcgcctcgtgcgcgcccgcggcgacatgcccgtcatcgtgatgtcggcgcgcacgaccgccgccgacaaggtggcgctgctgaagctgggcgccgacgattacctgaccaagcccttcgacctcgacgagctgctggctcgcgtgcaggtgcagctgcgccacgccgacgttcgccgcgcatccgcgtccggcgcgccttccgacgagcgcctccccgagcccgccgccgcagccgcgatgcgctacaaagactggacgctcgacgtcgacgcccgcacgctttcggtgcagggcgagcccgtgcgcctcacgcgcctggagttcaacatcctcgaagctctcgtgcgacgtccgcgcaaggtgttcacgaagcgcgagctgttcgagatcgcatggaacgaggaaagcgcg

SEQ ID NO: 9780 - DNA, 9908 bp, Unknown
  gut microbiota DNA sequence
acccgccgccgcaaccgcgatgcgctacaaagactggacgctcgacgtcgacgcccgcacgctttcggtgcgggaagaacccgtgcgcctcacgcgccttgagttcaacatcctcgaagccctcgtgcgacgtccgcgcaaggtgttcacgaagcgcgagctgttcgagatcgcatggaacgaggaaagcgcggtcgaggagaaggccatcaacgtgcacgtcagcaacatccgcagcaagctgcgcgccgcgcattcggccggcgagatagaaacggtatggggcatcggcttcaagctggccgaatgagcggttcgcttgtcttcgcgcgcgttcttacaactttcttaacgttttcgggaaggttccctaacgccttctccgtatcgtggatggcagagcgttcacggcaggagtaggcgggcttgctgcagcgagccgcataaccttgaaggttctgagggtttgagctaagaggcctgatgcgcctgtgcgaaaactctcagcttctgaaaggctaagcggacgttgcggcaagccgtcaggaaggagaatcgcgtgctggcaattgaaacgcgtggcctgagcaaggcgtatcgcgggcgcaacgtcgtcgacgggctggacatgcacgtcgcccgcggcgatatctacggcttcgtcggccgaaacggcgcaggaaaatcgaccacgatgaagatgatctgcgggatgatccgtcccacggcgggtgaggtgcgtctgttcgaccgcctggccgcgacccgtcgggcagcgctgagtacagcgaggccgtccgcatcggcgcgttggtggaaagccctggactgtaccccaacatgaccgcgttcgataatatgcgctgcaaggctatcgcgctgggcatcgtggacgatgtgggggaaatcgagcagctgctgagcgtcgtggggctgggtactgcgggcgggaagcgaacggagaactactctatgggcatgaagcagcgcctcggattggcgctggcgatgctaggctcgcccgacgtgctgctgctggacgagccgatgaacgggctcgatcccgagggcgtgcgcgagatgcgcaacctcatcatccgcttgaacgagcagcgtggcgtcaccgtggtggtgagctcgcatgtgctggaccagctggggcgcatcgccacgcgctacggcgtgatcgacgcgggtcggatggtatgcgagatgacggcgaacgaagtgacccaggcgtgcggcgattacctggtcgtgcgcacggctgagccggagcgcacgctggcgctgctggccgaggcatatcctggtatcgcctgcacggtgttgccggacgggacgctgcgcttgcggggcgtgtcggaggagcgcgcagcgctcgacgcgaccgtgttcggcacgttcctggctgcgaacaatatcccggtgtacgaactgcgtgtccacgagcgtgatttggaagactacttcctcgaactcatgggaggggatgctgctcatgtttaagtacctgcgcatggatgcatatcgcctgatcaagaccaagacgctgtatgtagcgctcggtattatcctcgcggcggtggcgttttcggtgtatatgatgagcacggcggccatgcctgaccttagcgcgacgggcggggaaggcccctcgtcgatggcgatccaaaacggcaaggagcttggaagcttcacgcagacccagtccggtctgtggatctggacgacggtcctcctcgtctccgtggtggtcgcccagttctttgcgcttgatttctcaagcggtttcgtgaagagcctgcccctgtcgcgacgggatcgcttggactactacggcgggaagatcgtgttcgtcgtcatgctctcgacggcgttctcggtgttcggtatcgctgtgttcgaaatccttctcaaggcggcagggttcgcgtacgcccatgcggattcggtcccggaaatcgccgtctggtacgggttgctgctgcttgtcctttggacgtatggaatgctggccgcgacggcaacctggttgacgcggagtaggggtgtgggcattgtcgtcacactgctcgcgagcacttccgttgcatgggagcccctcgctcgcgcagcggaatggcttccgtacggcagctgtgcgctgctggttcagggcggtcaggcgctgctggcgtcgccgggcgacataggccatatcctcgtctcgtgcggcacggtgctggtggcgtgcgtggcggtggcgctgggcgtgtgcgctcgaaaggacgtgtaggaacatgaacgggttcgtgctggccggtgtcgcgattgcggcgttcgccgcgggggcggcgctcgtctccttccgatacgagcgggagctgcggcgcatggcgcgattcctcgaccagcgcgaacctaccggcaatgcccgcatgacggcgttcgtgcgcacgcgcggcgtgctgggcatcgcgcgcggcgtgaatgcggagttggacgagctgcaaaacgagcgcatcgcttcccagcaggcgcgccaggcgttccaagcggggctcacgtgcctgtcgcacgacatccgcacgccgctggccggggcgcagggctacctgcagctggtggaggacgaggccgatcccgcggcgaaggagcgctacttgagcgccgccgcccatcggctggacgacgtgcgggtgctgctggacgacctgttctcgttcgcccaggtgcacgatccgtcgttcgaggtggcgtacgagccggtgcgtccggccgacgtgctgggagacgtgctggccgggctgtacccgcagttccgcgagcggggctgggagccgcgcgtgctgctggacgacgaggcggtcgtgcaggccgatgccgaggcgctcgcgcgcatcttccgcaacttgacggcgaacgcgcttcgccacggtgcggcggcgcccgtcatcgagcagcgcggcgggtgcgtgacgttcgcgaacctcgtggccgatccggcggcgatcgacatcgaccgcctgttcgagcgcttctatcaaggaggcggcgcccgatcgagtgcgggcgccggcctcggcctggccatcgtctcgcagctggctgccgccctgggagccaccgtcgccgcttctctcgaggggggcgtcctccgcgtgaccgtagaactgcagtagccggcgtatcgggtgccccggcgacaccggctcagccggttcgcttgaagctgtcgatgcaggcatccagcacgtcgcgcacgacgcgcggcgcaccgggacggacgtgggctccgtaggcgaggggcggccactccatggggcgcgcttccagcggcgggcatattttcgagatgttggaatggttgaagaacgatacggcgtcgcctcgaaggcagtccatggtgagcttctccctgaaaatggattccttcaccacgttgtctcgcgcgaaaaaggattcgaactcgtgcagctcgggaacgtcgcgatagcccgctcctgcgtacaccgtgatgttttcgagcaggtcggtggatatcgtctcgcgcttcgccaaggggctgtcgggggagaacacgcagtagtatttctcgcgcgacagcggcgtgaacgaggctcccatctgccgtagcgcaagcgagtccgcagagaagaaaagatcgaacagcccctgcgcgaacccttctgccgcgttgccgtacgaggtttccacgaagtcgattttgaggcggggatgcgtttgcgccatctgccggaccgcttccatcatgaaggggtggacctgccaccagactccgatcgtcacgcgctcggccggttgctcctccgcgacggatcgcccttcttccctcgccttgtccaggatgtcgagagcctctttcgcagcccgatagagaacaagcccggcatcggtggggcgcacgccgctcgggcctcgctcaaggatgcggtagccgagctcagcttcgagcgagttgatcctttgggcgaacgagggcacggaaaggaactggcctttcgccgctttgttgaagctccccagctccactgcggctgtgaatgacctcagctggacatcgttcatggcgcctccccgtttcttcccctgtataaggcattgccttatacccagattaccatacttgaaatatgcagggtattgcacggcctgtatgattggtgatgctccgattgaatcggagccgttcgaagacgcgtcggatggggagcttcctgcaatggtttcaccgttgattgcatgtcgggtttcgactcgacggttcaaattattgaaaggaacaaagggatggagcgtatagaaggggatctctctcgccgggggttcgtcggtgccgctttcgccggcgcgatgggcattgctgcctcatcggtgttttcgggatgcagtgcgggcggctcgtcggctgctgacggcgattggacggaaacgttcgacgtggtggtggtcggctcgggcgcaggcgggcatgcggcagccatcgaagctgccaaggcaggcgcgaaggtcgtccttctggagaaggagaacggtctcggcggcgattccgcggtatgcgacggcatcgtttccggatggggcacccgtttggcgaaggcccagggcatcgatgtttcaccggacgagatctacgactggttcatggcgcattccgagtggttcggtgcgatcgatcctgaggtggcccgtttgaacgccgacaagtgcggcgagaccatcgactggctcgaagagctgggcgtcccgttcgaggaagaggtcggcccccgcatgagctacaccgacttgcccgtcgttcaccaggtggtgggcaagggcggcgcgatggtgagtgccatgaccgcggctgccgaaagcgccggcgtctccatcgagacgaaaaccgccgtcaccaagctcgtgaaggacgctgacggccgcgttgtgggcatcgaggctatgaagggccgcgagcctgttcgcatcaaggccgagaagggcgtggtgctggctacgggcggctattcgggcagcaccgacatgctggttgccctgtgccctgcgaacaagaacctgaaggcttcgggtgccgcgggactgaccggcgatggcttgacgatggcgtctgacgccggcgtgttcaccacacgcacctcatggcaaccgctgatgagcccggtggccggcgcggccacgaagtcgcccgtgctcatcgactactccgagcgcctgaacgggcttctgctcgacgagaacggcgagcgcttctgcaacgagggccgtcagtatttcggcagggctcttgcgatcgacgtgctggcgaagcagaacgagcaggatggcgaggaagttgttctcatgattcccacgacgcccgagctggagaagctgctgagcgtgcgcgaaatcgtgtggccttgcggcgacaccgtcgaggaggtcgccgagcaggtgggcctcgatccggcgaaggtgaaggcgacggtggagcgctacaacgggttcgtcgaggcgggtctcgacgaggatttcggtcgaagcggcgagcacctcgttcccatgaccggcccgttctatgcggctccggtgaccgtgagcacgtcgatgaccatcggcggcgtcaagatcaacacgaacggcgaggccctcaagctggcaagctccggcaagggagacgtgaccttggagccggtacccggtctgtacgccacgggcgaagtgtgcgaatggaactgcgcgagcggttggactgtgcttagcgccgtgaccatcggcaggatcgccgggcagaacgctgcggcggaaggttctgcttcgtaaaacgatccgtttcgcaagagcgccagtcggcactcgatcgcgcgggtttcgagaaaagggcgcccaccccctccgggcgcccttttcgctatgctgtgcgacctgcgaggttccgtccgccggcagcattccgttgtgcgattctgtcttcgatgttgcgtttcgagcgccttgggacgacttgttctcttgaggagcgcgtgttctgcagcgtttctcctggtcgcgtaggattagggagccaggcggtgcaagttgaatgcagcattcctgtaaaaatcgagcgctcccgtcggcatccgctgcagcggcgggtttgcggggttccgttcaaccggtgccgccgtcggggtggctcggtgtggggaagttcccgagttatgcgcacttgtgccatcgaaaacagcctgaaagcaccatgtccccgacttatgtgcgcttttgaaacggcttgtggccgcgaagtgaaccatggtgaacttctggcctgggattatgttgcacggcgtgtcgcgaatgggcctgcaaaggccgaatcggcgtggcggaggtgcgcataagtcgggaacatggtcgttttcttccgatttcgctgacggagtgcgattcgcgagccccgcgctccagccgccactccacttgcagccgccagggcggcttgcgacgccctcggcaagaggacccttcctcgaaatatcttactgaaaagatcatgttcgtgcttccggtttgctagaatgaagcgtcggataagacgggtgacgcgcgttttcgcaggacaatgccgtcattcgagggaggcgcgacccttttgcggtgccgcttgggggaaacgcgcccgttggagggaaggatgggaaccatgggggatgagccgatcgagcgtcctgagcgcgaagaagcgcgttcgggtgaggcggagcgtgccgtcaaggaggtgggatccgcgaagtcggcccgcgatgcggatgccgccggcaaagaaggcgcggagccgtacaagcccggctcgttcgaagggggcatcgtcgagtttccctccggggacgagcccgccgtaccgccgcgcaagcgcttgccgcttgtgctggcgatcatcggcctggtcctgtgcttcacgggatcgctcgcgctcgtgggcgcggcgtgcggcgccgtgtcgctcgggctgttcgtgcgcgacaggaaggctacggagggctcgccggccctcgccgccccgaaggcgacgctcgggttggcggcgtgctcgttgctgctgggtatcacgatcatggcgggcatggcctccggcgacgatgcgcaggtgcagcagcccgaccagccggcttcgcagcaacaagaggcgcttctggaagcggccgaggagcacgagctgagcttcgtcgtcgaggccgccggcgaggaggacgtccccgcttccgtgacggtgctggtgaccggcacgcaggccgacggcacaaaagtgagcgattcgcacagggcagccctcggaaagacgtacgtgctggcgtatccggcgggctcgtacacgttcgaggtgtccgcgtcctcgctcgaggcgggcgacgtgctgttcaaagccgagcgcgtcgaatgcgcgttcgacggatccgcggaccgcacggtgcgcatcaaggtgtcgcaagacgccgccgccatgcagaaggcgcaggaggggaaggctgctcaggagaaagccgcgcaggaggaggccgagcgccagagggccgaggaagcggcggctgccgaagaggctgccgccgccgcggccgccgaagagcaggctgctgccgccgcagccgagcaggaggccgttgccgcagccgcggcagccgcgccgagcggcgcgggcgatagcggcggcgacaccgtgtacatcacgaacacgggcaagaagtaccaccgcgacggttgctcctctttgagcaagagcaagattccgaagacgcggtcggaggccgaggccatggggttggaaccctgcaagaattgcaggccttagaaaacgagccgtgaaaggaaggggcgcagttcagtcggggcgccccttcctgtgtcaaatcacccgtccccttgacacacccttggcgccctttccccatgaggccctgagaaaagcgaacgcccggcaggcacggggcttgccgggcgttcgcgagcaaacggtcgccgacctcttacgccggcctgatcaccagctccctgatcaggctgtcgtcgaggctgcacgagccgtcggtgcagttctcgatctgggcgagggcgtggatgatggtgccgttgtaatcggcgtagaagttcaccgtgcgctcgttcaccacgcgcgggtccagcatgccgaagcctccgaacatgaacttgttgtggtagtacatctcgatggcgttgcggccgaacagaaacgagttctggcgcttcaccacggaggggcagtagtcgaacagccggcactcctcggcgaagcaggcggccagcgcctcgtgatctttgctctgcatcgcggaaacgaaatcgttgatgaccatggtcgcctcctagtagactttctcggaattgagcagggcgtcggtgccgccgtccacgaacaggaccacgccgttgataccgctggcttcggggctggcgatgaacgccatggcgttcgcgatctcgacgggatccatgagcggttcctcgccgaaatgggtgggcacggggatggcctccatggccgcgcgctgctcgggcagcatgttggccgtcatggccgtgcgcacgttgccgggtgcgatggcgttcaggcgcacgccgcgcgaaccccagtcggggctcatgcggcgaacccaacgcgccagggcgtacttggtggatgcgtagtatacgtgaccgatggccgggtcgacgtccttcaccagctcgaggatgcgatcctcgtcggcgtggttgttcagcatgccggccacgtccatgcgcgccgcaccctgggcgatggagttggacgacgttaccacgcagctgccgcccttcttctccaaaaggtcgaacacgccgcgcgccatctcggtggcgccgaagtagttgagcgagatgatcagcgagatgggcaccttgccgcccgacacgcccgcgttgcagatcatggcgtcgatgccttcggggaagcgctcgtgcagctcggcgatagcccccgcgcgcccttccttcgtggccaggttggcgttgatgtcgccgccgttgaggtcgatgttcaccacttcatggccgcgttcgcgcaggatttcggccgtcttggcgccgatgccgctggtggcgccggtgatgacgtagatgcccatgagccgtcctttcatgcagatcttaccgatgctcattcattagtacagcggcaatcatagcatccggtgcgcggtgctcggcgatttcgaggttagcggtagacgagccgtcatgcatggcgcggtccttcggtgggcggtgcacaaggggccgaagcggtcaggcgcgaacgcgctttccgcggtcggccgtcgcatgcgcgtgcggaatccggtcgagcaccgcttgcgcgacggtgccggtggcgaaccccgccgcgatgcccgccaccagcagaacggggaggtagaacgcgatctcgggcgtgccggtgaccgcgacggccacggcgatctgcccgatgttgtgcgcgaccgccgccgccatggcggcgaggcgcacgcgattcggcgacgagaagcggacgaacgccaacgtcaccgccagcgcgcaggcgccgcccacgatgctgaacggcagcgtcgccagctggcctgtcaagaaggccgccagcacgatgcgcacgcccagaaccacggccgcatcgacggggcccagccagaacgcggccgccacggtcacgacgttcgcgatgcccagcttcatgcccggcacgggcatcgggacggggatgagcgattcgagcgcagccagcgcgcacgcgagcgccgccatcagggcgcagcggcagacgcgcagggtggaaggggcggcgatgctagcgcgccacggcatcgaggccatcgccatcgcctccttcccgcgcgacggtgacggtcagcccgtggggcacgcaggctatgggc

SEQ ID NO: 9781 - DNA, 1025 bp, Unknown
  gut microbiota DNA sequence
tcagtgccaaagcgagcgccgccatcagggcgcagcggcagacgcgcagggtggaaggggcggcgatgctagcgcgccacggcgtcgaggccatcgccatcgcctccttcccgcgcgacggtgacggtcagcccgtggggcacgcaggctatgggcgtggcaggaccgtcgatccaacccgtgtgcacgcacacctcgtcggggcagtcggcttcggccacgcggatgcggcccggctccacggccaccacgttcacgccgcgctcgtcttcgaggcgcagcgtgtaagggttcttcacggcatcgaggtcgatggtctcgatcgcgacgccgtcgcgggcgatggtagcgacggcatggccgctcgggttggcggcacccgcggcgtgcgcgacggcgaacccgcccacggccacggccacgacgacggctgcgaacagcagctccgctttgctcgcgcggcgtttcatgagcgcaccacctgggcgttggttccggcggccggagtgtacgcatcggcgatgccgtcggtgacgaacgtgcgaccgtcggaggcgatcagcacgaggtcgaacgccgcatcgccgtccgccgcggccgcgcgccacaggtcgagggcgccgtcgagccccagcacgaagcaggcggtggacagcgcgtcgcattgcgcgccgtccgcgccgacgacgcttgcggaggccaggtcggacgcggcaggatagccggtggaggggtcgagcaagtggtggtagcgcgttccgtctttgccttcgaagtatcgctggtaggcgcccgaggtagacaccgtggcgtcgcgcacctcgagcaggcctgccagcttcccggggtcgtccgggtcggcgacgcccaccttccagggcgagccgtcgggcttggagccgagggccgtcacgttgccgccgaggtcgaacagcgccgaggttatgtcgcgctcgcgcagcagggcgcgcagctcgtcggctgcgaagcccttcgccacgccgcccacgtcgatctgcgcgccg

SEQ ID NO: 9782 - DNA, 2307 bp, Unknown
  gut microbiota DNA sequence
gtctggctcgccgcgtcgagcgacgcggcgacgagcgcggccgtcgccggcgagacggccgtcggcgcgccgcctgcggcattcgcccgggctatctcgctggccgcgttctcgggggccagcagctcgtccagctcgaggacgcgctgtcggcaggcgtttgccgcgtcgtcagcgacggcttggctggcggcgtgcacggtgagggtcatgccggtgtccatagccgtgaaggagctggtggccgttgtggtcgggacgtccgccccgtcgggctcgccgcccgcgcatccgacgggaccgacggccagcgcagcgcccagcgcgcatgcgagcagcgcagcaaacgctcgtccggtccaagaacgacgggacgagcgggtggttcggttctgtcgcgcgaaacgcttcaccatggcatcactggaacaccagtttgctgatggcatgggtcgggcacacttcgatgcacgttccgcagccgatgcacgtgtccgtgtcgatgcgcgcgaggttgttctccacggtgatcgactgggtggggcaggttttcgcgcacttctggcagccgatgcagcccacgctgcacaccttgcgcgttttggcgcctgccatggtgttcttgcacgtcaccacggaggcggttggcgacgaggcctggtcgaccatcgagatgatgccgcgcgggcatatcttcgcgcacgtgccgcagccggtgcaggctgccgtgtcgatgcgcgccacgccgttctccacgactatggcgtcgaacgggcacgcttcggcgcagtcgccgtagccgaggcagccgaacgggcacgacaagctgctgtacgacagcgtgctgaacacgcggcagctgggaacgcccttgaacacgagctgcgggtcgatatggtcgagcgagccttggcaggccacgaacgcttcgcgctgcaccacgcccgtggactccacgcccaggtacgcggccagcgcctgcgcgacgcggtcgccgccggtggtacaggcgttgggcggcgcgccgttcatcatggccttcgcgtactgctcgcaaccggggtggccgcaggcgccgcagttgacgcccggcaggatgctcatgaggtaggtgaggcgctcgtcctcgccgatggccagcttgcgcgagacgatcagcagcagcaccgaccctacgaggccgacggcggccatgagcgcaacggtccaaacgacagtgtccattcgtcccccttcctacagcacgccgaacaggttgtccgccacgcccgcgaagcacatgaagctcaaggacaccagcgccgcggagatcagcgtgatgggcatgcccttgaacgccttgggcggctcggcctcgtccacgcgccggcgcacgccgctgaacagcaccatcgccagcaggaagcccaggcctgcgcccagcgcggccacgagcgcttccggatagttgtagccttcgtccacggcgaggatggtcacgcccagcaccgcgcagttcgtggtgatcagcggcaggtacacgcccagcgcttcgtgcagcgcgggaagaaagtagcggatgacgatttccagcatctgcacgagcacggcgatgaccaggatgaacgcgatagtttgaaggtagcccagccccagcgcgttcagcagctgctgcaagggccacgtgacggcggtggcaagcaccatgaccacggtcaccgcgcagcccatgcccgcggccgagtcaagctttttcgacacgccgagaaacgggcaaatgcccaggaacttcaccagcacgtagttgttgaccaggatcatgctgaagaggattgctgcgtactcggccattatgcctcacgctccttcaggtcgcacatctgacacgacgcgcacacgtcttcctgcgatgcgatggcctcgtcttccggctctcccgcgcgccgcttgcggcgcatctcgaagaccaccgagatggcgatcagcacgcccagcacggcgaagccgcccgggggcatgatgaacacggtcatgggctcgacgatgccgaggaggatagggaagcccagcagggtgcccgcgcccaagagctcgcggatggccgacatgaggacgagcgtgagggtgaagcctgcgcccatgccgaggccgtcgagcgccgcgtccttcaccgggtgcttcgaggcgaacacctcggcgcggcccagcacgatgcagttcaccacgataagcggcaggtagatgcccagcgcctgattgaggtcgggcaggtacgcctcgacgaccatcatgacgatggtcacgaacccggcgatgaccgtgatgaag

SEQ ID NO: 9783 - DNA, 1405 bp, Unknown
  gut microbiota DNA sequence
cgcgcccatgccgaggccgtcgagcgccgcgtccttcaccgggtgctttgaggcgaacacctcggcgcggcccagcacgatgcagttcaccacgataagcggcaggtagatgtccagcgcctggttgaggtcgggcaggtacgcctcgacgaccatcatgacgatggtcacgaacccggcgatgaccgtgatgaaggcgggcaggcgcatggtggtgggaatgatgttgcgcagaagcgacaccacgatgccggagcagacgagcacgaacgtggtggccacgcccatgccgatgccgttcgtgacggccgtggtcacggcgagagtggggcacaggcccagcatctggcgcagcgtggggttctcgatgagcaggcccttgctgaacacggaaagcgccgagggcttttggtcgatggctgccattatgctgctcccttctccgtcgaggttgcggcggcggcaggcgcctcgccggcagcggatcgataggcttcgatggcctcgttcacggcggccaaggctgctttggacgagatggtggcgcccgtgacggcatcgatgtcgtcgatggtcaggggctcggcggcgcggccgaggaactggtcggtgaaatcgggcagctgcaccttcgtgcccagcccgggcgtctcggtgttgtccatgccgatgacgttcgcgatggtgccctcgtcgtcgaaggccacggccatgggaacctggctggagtatcccttcgactgcgcgatgacggcgtagcccaaatcgtcgtcggcttccatgagcgcggtcacgccgggcacgtcgcaggacagcgcctcgaagtcggtcgcctcggggatgagcgcgttgtaggtcgcccaggcgcgcgcctcgcggttcgccgtgatggtgggcaacgtgaggttgtcgaccgagcccagcaggaatcctacgatggcgcagatcagcacgaggacgacggctggcttcaccaggctgttccagagggttggagcgggcgcggcgggagtgtcgggtgcgttcgccatcattcgcctccttctttcttcgcgcgggcaaagcggcgcttcttctcgccgcccaacggcgtggttgccgtgagcgagtcgatgtacggcaccacgaggttcatgagcaggatggagtacgccgcgccctcgttcatgttcccccagaagcggatgaggcacgtgataagcccaaggcccacggcgaagatcacctggcctttgaacgtggtgggcgaggtcgtgtagtcggtcgccatgaatacggcgcacagcagcagtccgcctgagaacacctgggtggccacgtcgtggccggtgaacaggctgcacacgatgacggtgcccacgtacacgcccgggatggtgaacgtgacggtgcgcgtgaccagaag

SEQ ID NO: 9784 - DNA, 393 bp, Unknown
  gut microbiota DNA sequence
gccgcctgagaacacctgggtggccacgtcgtggccggtgagcaggctgcacacgatgacggtgcccacgtacacgcccgggatggtgaacgtgacggtgcgcgtgaccagaagccaggcgaagcccagcaggatggcgatgccgcacgtctcgcccagcacgccggggtgcacgccgaacaggaggtccatgaacggcagctgcgcggcgcccggagccagcggcgtggcggagctcacggcatcgacgccggttgcgccggggaggaaaccccggggcgcggcgtagttcgtcatggccgcggtgaacgacaccgacaacacgatgcgggccacgatggccgggttcgcgaagttgcgcccgatgccgccgaacagttccttcaccacgac

SEQ ID NO: 9785 - DNA, 1145 bp, Unknown
  gut microbiota DNA sequence
ggccagcggcgtggcggagctcacggcatcgacgtcggttgcgccggggaggaaaccctggggcgcggcgtagttcgtcatggccgcggtgaacgacaccgacagcacgatgcgggccacgatggccgggttcgcgaagttgcgcccgatgccgccgaacagttccttcaccacgacgatggccacgaacgagccgatcaccgccatgtacagcgggatggtggagggtaggttgaaggccagcagcaagcccgtgaccacggcggacaggtcgcctgccgtctggggggtcttgcgcagcaggcaccataggtactcgaacagcacgcaggccgccgtggtcacggcggtaaccagcagcgcccgccagccgaatatcacgaacgaggcgatcagcgtgggcacgagcgctatcaccacgttcagcatgaccttctgcgtggtgatgccgtcgaacacgtgcggcggcgtcgagaggacgagcggtcgtttcgtcgtatgttccatctagcccctccttgccatctcggcgcgcatgaagtcgcgcgcaagtttgcttgtctgggcgagcggctgtttggccggacagacgaacgagcaggtgccgcagcccatgcacagatccgccatgaggtcgtcgagcttcttcgcgtcctggaccgtgtacgccttcttgatggcgatgggcgacagctgcatgggacacgagttcgtgcagcgaccgcagcggatgcatgcggtggtggcgggctgttccatggcgtctttgctgaacacgagcacgccgttgttctggcggatgaccggatagtccatgtcgatctgggcgttgcccatcatggggcctcccagcaccaccttgtgcggctccttcgtcagcccggcgaattccatgacgtcgcgcaggcgcgtgccgatgatgatgttcgcgttgcaagggcgggcgatggcgtcgcctgaaacggtgaagcgtcttttgacgaggggcatccctgttttcaggaagcgtccgatggaggccatggtggtcacgttgttcaacatgacgcccacgtcggtctggcgctttccgcgcgggacgacgcgtcccgtggcattgtgcacgagcacgttctcggctccctgcgggtagcggctgggcagcg

SEQ ID NO: 9786 - DNA, 4747 bp, Unknown
  gut microbiota DNA sequence
gcgaatgccgaacagcacgtcgtcggggctctccatcatctcgcggtagtcggtggacaggtacggctcgcattccgtggcgttcaccacgtagaggtcgatctcctcgaggttgggcggcgccagcttgatatcggtggggaagcccgcgccgcccaggcccaccagaccgcttttctttattgccgcgaggaacgacgcctggtcggtcacctcggggggtgccaccgtgtccgcgacggtctgggcgccgtcggattcgatgatcaccgtcgtgtcggttttgccggtcgaatagaagacgggctgtatggccttcacggtgcccgacacgccgctgaagatgtcggcggacagaccccgcggcgcgtgcccgacgaggctgcccacgtccacgtggtcccctttcttcacgacgggttcgcacagcgctccgatatgctgctgcatgggcagcacgatttcgcttgggacgggcatgtcgatggtttccagttccgccgtgtccttgcgatggggcacgacggcgcctcgcgtgcgtcggaatcgcgacaatagggcggtggcgttcatgggcgttcactcccctcgaagggcgttggctggcgcggttggccggtgcgcggataggactgagcctcacctggccgtttgcgggcaaggcgaagcgctcaactcgttgcgttatgagatgctggtcatcctacgtgagccgcacgtccgattccaggaatcgtcggtgaagggaaaccacgtcgctcgccaaaggcgcgtgcgccgattctcgcgtgcgcaattcgccggtggacggtgccgctcacgatggcgcggcatgcgtccggggatcgatgccttccatgctgcgccggtcgcccgcccctctttggccgctctctctaaaaatagagaacataagttcttaaattctagatcaaagcatgctgagtgtgatatactgcgtctattcgaccctgaagctaggaggatgcccatggcggcttggcacgagctgtttcccctcgatcgcgagccgacgatggaagacatcgccggctatatcgaccatcccctgtgggacgcgttcaccgcgttcatcgatgaaagctacggcgcgaaaccgcgcatcgagtacagccggtgcggcggcgctccgggttggaacgtgaagtacaaggcgcgcggccgcgcgctgtgcacggtatatccgcgcgacggcttcttcatctgcatggtgtcggtgggctcgaaggagaaggatgaggccgaggcgctgctcgcgacggccgacccgtacgtgcgcgccctgtacgagcgctcggccgacagcagcatgggccgctggctcatgatggaagtaacgagcgaggacatattgcgcgacgccgaggcgctcatgctcttgcgcgccgccccgaaaggagcgcgctcatgatgcgagaccccgaacagaccatcggcaacctcatcgaccgccggaacacctcgttcgtcggctcggtggacgaggacggctaccccgaggtcaaggccatgctgccgccgcgcaagcgcgagggcatccgcacgttctacttcacgtcgaacacctcgtccatgcgggccgcgcattaccgcgctcatccgcaggcgtgcatctacttcgtcgaccggcggttcttccgcggcgtcatgctcaagggcacgatggaagtgctcgaagacgcgtgggccaaggagctgatatggctcgacggcgacgaaacgtactatccgctgggggtgaccgatcccgactactgcgtgctgcgcttcacggccgagcgaggccgctactaccagaacttcagctccgaggatttcgccgtgccggccgtttgacccaccaggcggccgcgatgctgaacagcagcgtctgcgcgagtatctccaacatgccgccgacgctcgcgttcagcggctcgcctgcgcggtatcagcggcggttctgctcgcggtagcgcgcgagcgcctcgtcgtagccgccggcggtcttcttgtagtacacggtgtagcctgcggtcatgcccgcgaggatgaacaggtagatcacgacgaagctcgcccacgccccgggatcctctgctgggagccactggcccaaccacgcgcacagcgcgagcaccggcagcaggcacgcgccgaagcccgcgatgcgcgccgggtagggaagcttcttgatcagcgcgcccgtgaaccagatcgcttggagtgccgccatgccgaaggcggcgccgtacaggcttgccgtgaggttgaggccgtagctgggcccggcgaacaggtagcccatggcgaggaaccaggccatcatcacggtgaagacgatgcagacggcggttgcggtttgtgcgatgatctttttcatgaggtgctcctttgcatggagaattgagttgcggaagggttgcgatgcggcagcggggcggatcggctcacagccccagcttgcgcttgatggcgggcgcgtactggcgcgagaccatcaccgattctccgttgtccagcagcagctgcagtcgcgcgttgatggccgggcggatggcaaccacgtggtcgaagttcgccagcagctgcttggatgcgcgtacgaattcggtgccggccagcttgtcctccagctcatacagccgaagcggcgtgcggtacaccgcgtcctcggtgtagaggaacgtgcgtccgtcgaccgtctcgacatagcatatcccgtcgatgtcgaggcggtacgtggctccgtcgcgctcgccggtcagcttgcgctcgaaagcgttcagcccggcgacgatgcgttgcacgcgctcgtcgatgcgcgggcacgatacggccacttcgatatcggcgagccgagggtcctcggtgatggtgacgttcatgggcgtgccttcccttggtgagcgggtggttggccaacgtcgtcagtatgccgaatgcgttcggtgcgcacaaggcgacagcgaccgagttgcattccgacgcgctccagttgcaccggcgcgcgctctcttggtatgatgcccgtgcgaaggtgaaaacacggtccggtcggtagtccggacgcgaaccctatgccgcgctcgacgcgtcaacggcttcgtcagtaacctgcctccttggttgtccgtccttcgcgcagcaaccacatacaaggaggagcaaccatgcaggtcaccacttcgatcacgctgaccgtgcttcatgacggtcaattctggatcggcatattcgagcatgcggacgaaggccgctacggcgcatgccgcgtcgtgttcggcgccgccgaacccaccgatgtagagctggtagcgtttatcgtgcggcgatggacgacgcttgcattcgatatggcggccgatccgtctgcgacagcggatgccgtgctctcccatgcgaacccgaagcgtcgtcagcgcgaggcgcgcaagctcgtggagcgagccggcgtcggcacgaaagcccagcaggccatgagcgtcagttacgaggcgcgcaaaatcgaatccagagccttggcccgcgaggctcgccaagcgcaagccgagcgtcgattcgctctcaggcggcagaaacgaaagcagaagcatcgcggaaggtagaggcccggaatcctcattctcccttgatgctctgcgtggcgtgccgcttcccgcgctgcgacacgggaggtcatgcgaagggacgcgcgctggcggtcgttttgcgtccttacccgtatatatcaggggaaatatctttcatgcacggtatactcaaagcaaacgccccaagagggcgcggcaaaaaggaggatgacatgcagccaccctcgacactgcttctctccaccggggagtttgctcggatgtgcaacgtcagcaaggaactgctcatccattacgacaaggtcggtttgttgaagccgaaggtaatcggcaagaacggttaccgctactattcgctcaagcagctgtaccttatggacgccattcggttcttcctcgatacgggcatgtccatgaaagaggtgaagacctatctcgataaccgtaccaccgacctcttcctcgaggccacgcaggcgggcatcgagaagatgaagaagcagcgcgatgtgttggacgcgcgcattgggatgatcgagaagatgcgctacatcacccagcgcgctttgctgttcccgaaggataagccgagactgtcgttctgggatgaaacgtggctcatcacgaccgacgtaaagcctgagcgcacgcagcaggcgttcgcccaggccgtgagcgagcatgccgagttttgcaaatcgtctgccggcgtgacgaagtttcccctgggtcgtatcgtgcactttccttgttccgatcaccctgaagacttcgtctacacgaagctcatcacctggatctcgcccccttcccaccccgcgcttctggagggtcgtctggcgtgcaaaccgcggggcaattacgcggtcattcttcataggggcggcacgagcacggttgcgcgatcctatgccaagctgcttgactacgtcaaagaagagggtctcgatctcgtggggccggtgtacgagttcgatatgaactcgtatctcatgtccgactctgcggacgactacctgttgcatatctcggtgcttgtcgatatgtaagccgcccgacgcgaaaccgcccgcgatccgttcgacggatcgcgggcggttcttcgtgcgcgagcgggccttctaggcgctcatgcgcttcgtctcttggatgag

SEQ ID NO: 9787 - DNA, 145 bp, Unknown
  gut microbiota DNA sequence
caccgccgtggccttgaactggaacgcgccgctcaccgccgtcatgatcctgtgggtgaacctggcaaccgcctcgctgcccgcgctcgcgctgggcgtggagcccgccagccgccacatcatggagcatccgcccatgcgcgtg

SEQ ID NO: 9788 - DNA, 278 bp, Unknown
  gut microbiota DNA sequence
gccgagcttcccgaatccagcgccgaggagttccaggcggtcatcgcgggatcgttcttgcaggagatatcttcgctgccgcgctcggaggacgacctcaagctggcgctggctgagaaccagatcgtcgtcacgtaccacgacaccgtattcatcaaccgccgcctggaaggcaacttcccgaactaccgccagctgctgcccgattcctacgccacgcgcgtgagcatggacgtggggcacctcgtggccggcgtgaagcgcacgtcgctgctggg

SEQ ID NO: 9789 - DNA, 300 bp, Unknown
  gut microbiota DNA sequence
tgccacctggggttatgcggtcggacgaggcgatgcggcgcgtcgaaaccgcttcgcgattgccatgggggggcgttttgcgcccaggtcggcctcgcagctgcgggcgagcgtccggcacggtggggttccgtcgggcgcaggcgagcgtccggcacggcggtcaccgtcgggcgcgggcgagcgtccggggcgcgggcgcgactggccttgcccaggcctgctcgtggaatgtgtgcatccttcgcaaaccgcttgcgcacgctgctatcatggaactatggaaagcgcacaggcgat

SEQ ID NO: 9790 - DNA, 955 bp, Unknown
  gut microbiota DNA sequence
acaatttcggcggtgctgtcgggcatcgggggttgcgtgcggattatgccacctggggttatgcggtcggacgaggcgatgcggcgcgtcgaaaccgcttcgcgattgccatggggggcgttttgcgcccaggtcggcctcgcagctgcgggcgagcgtccggcacggtgaggttccgtcgggcgcaggcgagcgtccggcacggcggtcaccgtcgggcgcgggcgcgactggccttgcccaggcctgatcgcggaatgtgtgcatccttcgcaaaccgcttgcgcacgctgctatcatggaactatggaaagcgcacaggcgatagagcgagaacggaactatggcagcgcgggtgataccgcgcaaggggtatccgacggcttgccgaagagacagcgcaccatcgtgcttgcggtcatgatgtcgggcaccaccgccgcgtgcatctcgcagagcatgatgatagccgcgcttcccaccatcatgcacgagtactccgtgagcgcctcgctcggccagcttctcaccacgtcctacatcttcacgcttggcctcatctcggctatgaccgcttatctggtgcatcgcgttgattcgaagaagctgttcatcgcagccatggtgtgcttcgtcgcaggttgcgcggccgcgctcgtcgcaccgaattatccgctgctgttggcatcgcgcctgctgcaagccggcggcgcgggcatcgcgctgccgcttatccaggtggtggcgctgtcagtgtaccccaaaagcgagtacggccgtgcgatgggcctggtgggcctcatcatcggcttcgcgccggccatcgggcccaccgtatccggcttcctcatcgacttctggggctggcgctcggtgttcgtcatcttgggcgcggtgtcggcggtggttgtggtgctgtcgttcttcgtgctgtccgacgtggtgaagcgcgaag

SEQ ID NO: 9791 - DNA, 1545 bp, Unknown
  gut microbiota DNA sequence
gtgtctttggcggcgctcgcaggcggcgcgcttgcgctcttcgtgttcgcgaggcgtcaggcgcgcatcgagcagccgctgctcaaactgtcgtgctttcgcaaccgcacgttcgcgatagccactgtgctggtgatgatgtcccagatggcgttcatggtcggttccatcatggtgccgttgttcgtacaggacgtgcagggcggcagcgccacggtgtcggggctgactatcctgccgggcgcggtgctgctagggttcttgaacccggtgacgggacgcctgctcgaccgttacggtccaaggccgctcgttgcggtgggatgcgcggtgctggctgcgggcacgctggctttcgcggcgtgcgacgcgggtacgcccgagtgggcgataaccgtgttgtacggcgtgcgcacggtgggggtcgcatgcctcatgatgccgatgaccgctcacgcttgcgcggcgctgtctcttgaagacatcgcgcaaggcacggccattatcacgtcgtttcgccagatcttcggtgcgctctcgtcgtcggcgcttatcacggttatggcgctcgcatcttccaacgagctaggcatcgacgtcggcggtttcgctttaagcttcgaagtgcaggcggccgtcatcgtcgtgggcttcgtcgtgggcatggcgtttctgccgcgcccgcagcggaaaacgcgctagaggcggctcggctgagcgtggttcgcgctatgctgcggctgccagggacggctcggcgtagcgggccctgatgtagcggtcgatggcgtcggcggtttggctctgctgttccgcgggggtgatgctggcttcgccatcgccgctttgcgggccgtaggcgccgaagccagcatggttgccgccttcgatctccacggtttcggctcccttgggcagcaggtcggcgttgtcctcgagtttggcgcggttgagcacctggtcgttcgagccgtacagggagatggcgcccaggttcgtgctcgacaggtcgctggcggagtaggatcccaacagcacgaggccgtcgagcgtgccgtcgccggcatggtcgaccgcgtactgcgccgccatcgagccgcccagcgagtggccgcccacccaccaggtgcccacgtcggggaagtccgcgcgcacgcggtcggctgcgttgatgtcgaagaacgcgaagttgaacggcatctgaaccactacggccaggtagccgcgctcggccagatcgcgcatgagcggcgcgtacgcgctgtattccaccttcgcgccggggtagaacacgaggccgacggctgcgttcgggtcgccgaacgcaaggtagttgtctccctgctgaacgggcagcgtctcggtcgacacgaggttgcgatggttcgcgtcgaggtcgtggtacgagtcgctcgcgtacgcgaagaacgcggctgccagcacgcacagcaggatggcgagggccgtcagcgcgacgacgagcttgcgcggcttgcggcgcgcggcgacgggcgtgccgctttcggccgcttccgtcgtgggtgt

SEQ ID NO: 9792 - DNA, 210 bp, Unknown
  gut microbiota DNA sequence
ggtccgattcggtggcaagtccaacgtgattgaggatgtcggctcgcgaccaggtattttgcagagtgggtagccgcgtatcgctgcgatcagggattcaaacttccgaattcggaggtttttcgccaccgagaagctttttgcgtgcttggtgaggcatgagtacaaatgtttcacgtgaaacatccggaagcgaacgggcgatgcaga

SEQ ID NO: 9793 - DNA, 159 bp, Unknown
  gut microbiota DNA sequence
ggcatggttgccgccttcgatctccacggtttcggctcccttgggcagcaggtcggcgttgtcctcgagcttggcgcggttgagcatctggtcgttcgagccgtacagggagatggcgcccaggttcgtgctcgacaggtcgctggcggagtaggatcc

SEQ ID NO: 9794 - DNA, 1809 bp, Unknown
  gut microbiota DNA sequence
agtccgattcggtggcaagtccaacgtgattgaggatgccggctcgcgaccaggtattttgcagagtgggtagccgcgcatcgctgcgatcagggattcaaacttccgaattcggaggtttttcgccatcgagaagcgttttgcgtgcttggtgaggcatgagtacaaatgtttcacgtgaaacatccggaagcgaacgggcgatgcagaaggaggcagccatgaacaaggacgagattctggagaagagccgtcgggacaacgacggaatggacgagcggttcaagctgatgcaatggcgtgcgagctaccttatgctctccgtgatgatggtggtatgggcgttgttgttcttgtgggattcgcttcatggtcagagcacggatgtgtcgttcgccattgtcatgtcgggcatagccgccatgaacttctaccagttctaccagtttcgttacaaaaccgcgttgggtgcgggcgttttggtgacggtcgcggtcatcagcgtcgtcgtccaccatatattcgcgacgatgtaggggcacttcatgatcaagctaccgtctctcggattcgacgatgtgcatgacaacgacggcgagctcgaactctgcaaccggctgaaggcggcgcgcgccgaggcggggctttcgcaggcagagctcgcggggctcgtgggcgtctcgcgccagaccatctcgtccatcgagacgggcctgttcaaccctacggcaaagctggccctcgtcctctgcatcgcgctcgacaagaagttcgaggatctgttctacttcgagtgaggcgcgtgcaagggcgcgtctaggatcgacggacgcgcctggctcacttccagatcttgcaggcttcggggtcttcggccagcagcaggtcgcgtagggcttgcaggtcgtcggccgagacgtcttcggggttctcgtactccagcgtgtccgccacgtgaaagtcgaagccgttctcgccgtgctcgctccacagctgctgcagcggacggttcgggtgcccgcctccgttcagcttcgcccgcaggctgttgagctccttcgccgcgtcgcgcgtgatgcccagaaagtgctggcccgtggcagtgcagcgcagttcaaccacgcccatgtcggggcggcggctcttgtatgcgtctcgcaattccttgcgtcggtcggtttgcatgcgtatcacctcgtcgtccacggtaccgcatgccgtccgggcgcgcaatctacggaacgtcgaccgttgccctcgctcgcggcgctccgtgccctcaatcaggccgaagccggctgatcggccgcgccggcctgcatccaggcgatgtacgtgtcggggtagtgggcggtcagcgcggccgaaaggtcgaggccgaggagcgactgcacggcaccgacgatgcccaatgggctgaccagcgcgtcgagcgtgggcacgcgggtggatgccgtggagccgaacgtgctcagcgtggcgaagtcgtcctcgtcgcatcctaacgcgtagccggtgttgcgctggtaggcggtctgcacgatggcgtacgaatcgtcgaagtcgacgcttacggtgctgggcagcgtgatggtggagccgtagcgtccgaaaccccaggaggaaagcggcagctgcgtgacgatgtccgcctcgttcaccacgttgaagatgttgccgaacctcggatcgtgccggtcgtcagcgcgcgtggcgcacggggcggcgaacgtgtaagcgtagatgccggacgagggcgccagcgccgacgcgtcgtcgtccgggtcgccgaggtcggcggccagcagg

SEQ ID NO: 9795 - DNA, 4716 bp, Unknown
  gut microbiota DNA sequence
tcgaacctcggatcgtgccggtcgtccgcgcgcgtggcgcacggggcggcgaacgtgtaggcgtagatgccggacgagggcgccagcgccgacgcgtcgtcgtccgggtcgccgaggtcggcggccagcaggttcgcgatggccccgccgcggctgtgccctgtgatgagaatgcgcgtgtgagcggggtcgatgcccagatcgctcgcgtaggagcgcactgctttctcgacctcttcctcggccgctttgaacccgcggtggtcggcatcgtcggagccggcgcccaggaagttgaagttgctgagccactctgcgccgtacgtgccgcggatgcccacgaacagaagcgtgacgggcttcccgtcgccgtccgaagcgatggtcttgctggccaacgtgtacgcggccacgtcgctcgatcccaccaacagtgagctgacctcgtcgaggacgctgctgcgcatcgcgtacgactcggtgcgcacgtcgtggaatcccagcgcgccaagcgtccgctcggcgtagggcagcgaaccggccacgccgtcgtagtactgggattcggaattgcacaccgccgccaacacggaacaggccgtggccagatcgtgctggtaggtgcgggcgtcgtggaagaaccaggagtcgtcgaacgtcagctgcgtggatgttcgtcctgacgggttgtttgggtcgagggcggccaccacctcgctgcagtattcggcggtgacggtggtgcgcggggaagcggggacgtgcgcgacgaccgcgtttccattggcgtgcgcgacgggaacgagccccgattcgtagcccgtgtaccggagctgtaccatgaacagcgcgatgagaaggaggcagccgagcagggaagcgacagccgacgcgaagcgtcgcgcggggttcgtctgcatcggtcctccttcgccatcggtgagtgcttccttcgtttcggccagtatacggtgtcgtgccgccgcggttaccggtgctggcgcaacgcaagtgaaacttaagcgtgctgtaagcatttcttaaggtttggggcacgttgcggcaaggttcgggattcctttgcatcgcgggcgtgaaacattcgcgtgcgatctgcggggacgaggggtcgaagcgtttcctcgtgctagaatatccagttgcttgccaactggcgaacgaatgctggttggcgcgcgtcgtccaagcgcgccgcatcatgagcggcggcgctcgaaagccggctgacgaggcatcatgcgccgcgcggccccgaaatgtgaggaagcaccatgtcaaagggaacctactcgttcaccacccccatctactacgtcaacgcggccccgcacctcggcaccgcgtacaccaccatcgccgccgacaccgtggcgcgctaccagcgcatgaacggctacgacgtggcgttcgtgacgggcatggacgagcacggccagaaggtggccgacaccgccgccgacaagggcatgaccccgcaggactggtgcgactccatggagcccgcgttccgcgacgcatgggacatgctgggcatcacctacaccgacttcgtgcgcaccaccgagccgcgccacgcgcgcacggtgcagaagttctggcaggacctctacgatcgcggctggtgctacaagggcagctacgagggttggtactgcgtgcatgaggaaacctactacgctgaaagcgacctcgagaagaacgaggacggggagctggtgtgccccgactgcaagcgccccgtgcagaaggcgggcggcgaggagaactggttcttcaagctgtccgagttcggcgacaagctgctggcgttctacgaggagaaccccgatttcatccgtcccgaaacgcgcaagaacgagatcgtgtcgttcgtgaagagcggtctgaaggacctgtccatctcgcgcagcacgttcgactggggcgtgccgctgccgttcgacgagggccacgtggcctacgtgtgggccgacgctttgctggcctacctcaccggcatcggctacggcgacgagggcgagcgcgccggcgagttcgacgcccgctggcccatgcagtaccacttcgtgggcaaggacatcacgcgcttccactgcgtcatctggccggccatgctcatggcggccgggctgcccatcacccacaccgtgttcggccacggcttcctgctcacgaagggcgagaagatgtcgaagtcgaagggcaacgccctgaagcccgcggacctctgcaaggtgttcggcgtggacgcgtaccgctactacttcatgagcgacgtgcagttcggcgccgacggctccatctccatggagcgcatggtgcaggtgtacaacgccgatttggccaacacctggggaaacctgtgcagccgcgtgttcaacatgacgaagaagtacttcgacggccaggttccggaggtgcccgccgaggtgcttgcgaatgagaacccgctgcgcgccataaccgaggagctgtacgccgagtacgacgcggctctgggcgccgtcgacttcacggccgccgcggccgcggtgcagaagctggccggtcgcgtgaacctctacgtggaggagagcgccccgtggaacctcgcgaagagcgaggagaccgccggcgagctggccgaggtcatctacaacgcgcttgaggccatccgcatcatcgcgctgtacatggcgccgttcatgccgaacacgtcggccgaggtgttccgtcgcctgtcgctgggcgacatcgaggccgtgaccgacatcgaggccgcgacggcctggggccagctgcccgccggcaacccggtggaaatcggcgaccccctgttcccgcgcctggacatggacgccatcgacctgagcatggagtagaacggttccgccggcctgccggccggcggagcagccgacgctgcggcgcgtcctcgcacgcgatcttcgtgcgatcccggagcctcgcgtaccatagtacgcttcgcctccgcgatcccgcgaatctcgcatccgaggacgcccctcgctggctttgttggaccggcgacgactcgaacaacctgcgagcaagaaaggacgcgaccatggtcgacgaacagagcgcggaacccgtcttcgacgatccgcagtttcggcagaagcgcaagcacggccgctaccgcgtggtggacgctccccagctcgaggggccggtggccgacacgcacgcccacctgcagcttctgcccgatccgtcgtacgcgctcgcgcgctgcgcggctcacaaggtggagttcgtctgcaccatcgtggatgcgttcgaagacgggaccaccacgttcgatcgcttgaactcgtggcggttcgaggccgctgcggctgccaagcgcttcgtcggctggacttgaagcgaccccttcccgcgcgtgccgcgggttcggatcgccgtcgggtgccacccgcataacgcgaagtactacgacgacggcttggaggccgatttgcgccgtatgctcaaggacccgcgcgtggccgcgctcggcgagatcggcttggactaccactacgacttctcgccgcgcgacgatcagcgcgaggccttccgtcgccagctccgcttggcgaaggaggcgggattgcccgtggcgctgcacctgcgcgaggcgcatgacgaggcgcttgccatcatgcgcgaagagggcttccccgaggcgggcacgctgctgcactgcttcaatctggactgggccacgctggaaccgtgggtggaagccggatgctacgtggcgttcggcggcgcgctcaccttcaagaacgccgacgacacgcgcgaggccgcagcccgcgtgccggcggatcgtctgctcaccgagacggatgcgccgtacatgacgcccgaacctatgcgcggcatgacctgcctgcccgatcacgtgctgttcacggcggagcggctggccgaggcctgcgggcgggcgcctggggcccagcgcgaggagttcctcgcccgacttatggacaatgcgcgcgaactgctggatcgcccggccaccgcttggcagaagaacaaaggagcgtgacgcttatgaagcgactcatcatcagcggttcccctcgggcgcgagggcgcagcgcgggcgtcgcggaggccgtgcgcttcgctttcgaggaatcctgcgccgacgacgatgtgcagcttgtttcgttggcggacgttcgcatctccccgtgcacgggatgcgagacgtgtgcggacaccttggggcgcaacgagctgtactgcatcatctcggacgacatgctgcgcgtgcgcgagatgctgaacgcttgcgatcagctgacggtggtgtcgccggtgtacttcgcgggcgcgccgtcccagctcaaggcgttcctcgaccgcctgcagccgtacttctacgccaactggcgcgccaagccgaagcgaccggcaagcctgtacgtggtgggcgaggggggcgacccgcacgggttcggcccgcttgtgggcgaggcgcgctcggcgttggccgtggcgggcttcgcgctggaatccgtgcacgactgggtgggtctcgtcagcgcggacggcgcgctcccttcgggctccgacgtgctggagggcggccgcgtgcatccggcttcggcctacacgtgcactggtcccgaaggcacgtttccacgcgcggtggggcaggtctgatgacgaagctgtcgccgctggccagcgtgt

SEQ ID NO: 9796 - DNA, 1321 bp, Unknown
  gut microbiota DNA sequence
cctcgtcagcgcggacggcgcgctcccttcgggttccgacgtgctggagggcggccgcgtgcatccggcgtcggcctacacgtgcacgggtcccgaaggcacgtttccacgcgcggtggggcaggtctgatgacgaagctgtcgccgctggccagcgtgtccgagacgcgtgccgtcctggaagcgcacgggctttcgaccaagtactcgctcggccagaacttcctcatcaacgacgccatcttgcagaaaatcgtcgccctggccgatcttgtgcccgacgattacgtgctggaggtggggccgggcatcggcacgctcaccgtcgcgctgctgaagagcgtcggacgcgtgctgtcggtggagcgcgaccccgacctgcccgccgtgctggccgagacgctgtccccctgggccgaccgattcgccctgctcaacaaagacgcgcttgatttatgttccgctgatttccaatcagcggaaccactcgacgctgcggcttcccgtggtgcccgatctcgcggcgaggcccaaggctcgcgtaccgaagtacgcagcgccttcgccctccccacgatctcgggcaccacggaaaccctcgctgacgtagctggacccatgaggcttttacccaacaagctggtggcgaacctgccctacgccgtggccgccaccgtggtgctcgactacttcgagcggttcgcgtcgctggaaagcgccaccgtcatggtgcagaaggaagtggccgaccgcatggccgccagcccgggcacgaagaactacggcgcctacacggtgaagctgcgcctgtacgccgagccggccgggcgcttcgccgtagggccgggcaacttcttcccgccgccgcgggtggagagcgccgtgctgcgcctgaaccgccgcccggtcttcgacgaccaaggcgtgccgctcgatgccgatgcgatcgccgccgcctgcaccatggccgaggccgcgttcgccacgcgccgcaaaacgctgtcgaactcctgcaaaacctacttcgccggacgaggcccgcaaggggccgccgtcatcgcccggctcccgcagttgttcgagcgcgccggcatcgatccccgcctccgcggcgagaccctcgacctccccgagttcgtccgcctcggctgcgccttccagcagatcgcttgaacggttcggtcgctgaagagggctcgtctgccgaggggcttgccgccgagccgcttgccgccgagcagcttgcgccccccccctcgcgtcgtaaatccgtgggcgatgtgcagcaaaaacgaggttttggcagcgcgagccacctcgc

SEQ ID NO: 9797 - DNA, 221 bp, Unknown
  gut microbiota DNA sequence
tcgcgtcgtaaatccgtgggcgatgtgcagcaaaaacgaggttttggcagcgcgagccacctcgccggcgcatcgagcgaaacgcgacctggggtttcttcgtcgcgctgcccgcaaaagagcttcccgcgacggccgaatgaggttccgactgccaaaacctcgattttgctgcacatcgccgtgcgtccgctgttaaaccaatattgacatgcgccgcc

SEQ ID NO: 9798 - DNA, 924 bp, Unknown
  gut microbiota DNA sequence
gccttcgcgagtctcggtcgcgggctaggcgtccttcagcgctttggcgcgcacggccttgcctttgctgcacttgggcttcgcaagcgggcagtgcttcttgcagcaggggcacacgcgtccgtcgagcaccgatgccgtctttttcgcttccgccttcttcttgtccggtttcttcttcttgtctttcttgtctttcttcgagctcacgtggatcctttcgcactatgttcgcggccattctagcatgtgcgtccgtgaggagctcgaagcctccgcggacggcagcgctcgcacggcacccgcttccacgggggtttcacgtgacgaggcgcgaggtttgaattgttatggacttggggacaatccgtgcagattctgtagagtattgactcaggtggtataatttgaggctgtcatttctgcacactggcatacgcgagaaagagtgagcatggatttagcgaaacaagccaaaatcgtcgactccattcatgatacgttacacgacttcgtaggtcaacgcctgaaagttcgggccaatatgggtcggtcgaaaatcgtcgagagcgaaggcgttctcatgcaggtgcacccgcagctgttcatcctcgaggtggatcgcaagcgcggccgcacctcccgccagtcctaccagtacgtcgacgtgctgacgggcatggtggagctgtcccagaacggcgagccgctgttcgagcccttcgtgcccgagtccgccgacggcgcgcccgccgcggatcttatggacgagcaagaagaggagaaggtcctgtcctaacggctcagggctggttccggcaaaccgacgggtgtcgcaagcgcggcacccgtttttgcgtttccggccttgtttcttctgtcgtgcagcgaggtcagcgtatagaatagcggggtggaaagcga

SEQ ID NO: 9799 - DNA, 683 bp, Unknown
  gut microbiota DNA sequence
ggccgacggtgcgcccgccgcggatcttatggacgagcaggaagaggagaaggtcctgtcctaacggctcagggctggtttcggcaaaccgacgggtgtcgcaagcgcggcacccgttttgcgtttccggccttgtttcttctgtcgtgcagcgaggtcagcgtatagaatagcggggtggaaagcgagccggggatcgacgcaagaggaggggccgtggcgcaagatcggtcaaaggaaggcgtgcgcttgccgtacgtgctgcggcatttcgacgtgtcgtacctgggcatctgcgcgccgcatgtttggatatactgcgtggcgcaccgcgcggggctcgacttcggcggcgtggtcatcggcatcccgctgtacatcgcgctgtcggcgttcatgctggcggtgatgctgctggcctggaagggcaaggcgcagcgcgtggcgcccaagctggattggccgctggccgcgttgcaggcggctgcgaccctgctgctggtggtgccgttgcccctgacgggggccgccagcgccacggcggccgcggtggcggcgggcatcggcgtggcatggttgtacttgcaatgggcgccgttctacgcgaagctcgacgttcgcgaggccatcgcgtgcatcttctgcgccatggccgtgggctccgcgctcaaggtgcccatcga

SEQ ID NO: 9800 - DNA, 243 bp, Unknown
  gut microbiota DNA sequence
tcggggatcgacgcaagaggaggggccgtggcgcaagatcgggcaaaggaaggcgtgcgcttgccgtacgtgctgcggcatttcgacgtgtcgtacctgggcatctgcgcaccgcatgtttggatatactgcgtggcgcaccgcgcggggctcgacttcggcggcgtggttatcggcatcccgctgtacatcgcgctgtcggcgttcatgctggcggtgatgctgctggcctggaagggcaag

SEQ ID NO: 9801 - DNA, 235 bp, Unknown
  gut microbiota DNA sequence
cgcgaagaagtacccgaggaagtacacgcgcatgccgtccacggcaagcgccgtgagctgcggatcgttgtctcgattgaacgcgagcgcaagcggctcggcggcgagcgccaccgcagcgtacgtcgtcgtcgcgatgacgagagccgtcagcagcgccaggcgcagcaccgcgcgcacgtcgcggtcgctgccacgcgcgtacgcgttgctggccagcggctggatgccctgc

SEQ ID NO: 9802 - DNA, 505 bp, Unknown
  gut microbiota DNA sequence
gcgattgaacgcgagcgcaagcggctcggcggcgagcgccaccgcagcgtacgtcgtcgccgcgatgacgagagccgtcagcagcgccagacgcagcaccgcgcgcacgtcgcggtcgctgccacgcgcgtacgcgttgctggccagcggctggatgccctgcgcgatgcccacgaacagggcgctcgccacgaacgcgaagttcgcgaccaccccgtaggccgccacgccgatggttccctcgaacgcaaggatcaccaagttcagcaccagcaaaaccagcccgcccgacagctctaccacgaacgacgagaacccgagcgccgcgatatgccccacgagccgcgcgcgcagatgcaagcgcaccggccgaaacgtgttgcgtttcctgaggaaatggatcaacagcaccgccatgctcatgagcggggcgaaccccgtggcgaacgccgcgccgaacatgccccacccgaacccgaatatgaacaacgcgtcgagcgcgatg

SEQ ID NO: 9803 - DNA, 2909 bp, Unknown
  gut microbiota DNA sequence
cttcctgaggaaatggatcaacagcaccgccatgctcatgagcggagcaaaccccgtggcgaacgccgcgccgaacatgccccacccgaacccgaatatgaacaacgcgtcgagcgcgatgttcccgaagcttcccaccagcatggcgaccatggccagctgcgggctactgtcgttgcgcacgaacggcagcagcacgttgttcaacaagaacagcggcgcgaacgcgaagatggtgcgcaggtacgtcacggtcagcggaagcgtggcctcgtccgctcccaaaagcgacgccaacggcgtcgcgaacgcctccacgaccgcaagcagcaccgccgcggcaacgcccgccatgacgagcgccgtggtgaacacccggttcgcccccgtgcggtcgcccctcgccgagcacacctggaactcggttgccgcgccgatgcccagcatgaggcccgtagcctgcagcaccgtgtacagcacgatggagaagttaagcgccgcgaggccgtccgaccccaccccgttcgcaatgaagaacgtgtcggccagtatgtacaccgacacgcctaccatgcccagcacgttgaacgacacgtaccgcgcgaacggacgcgccatcgacgacgagccggccatgccggcaccgcgtgccatcgcgcgccgcctcacgcctcgagcgagatgtcgtatgccgcgttgcgcgcgatgccgaactcctcggctatcgcgcgggcgatgtccttgttgcgcgcgcccgcagccttgagctcgacggcccggtcgcgggctgcggcttcggcgtcctgctcggcagcggcgtcctcggcggcgctcgggccgtcgatcaccagcacgatctcgcccttgattcccgcgccctcccgctcgcgcgcggcgaacgcgtcgcgcacctcgggcagcgggccccgcaccacttcctcgtgcagtttcgtcagctcgcggcatacggcgatctcgcgatgcggcagcgtctccgccagcgaggtcaaggccgccaccaggcggttcgggctctcgtagaacagcagcgccgcatcgagcgcgcgcaggctctccaccacggcgcggcgttcggcgtccttgcgcgggaagaagccgccgaaatagaagcgcgggttcgcgctgccgctggccacgtacgccgtggccacggccgtggcgcccggcagcacctccaccggcacgcccgcctcgcgggcggcgcgcacgaggcgcagccccggatcggacacgcccggcatgccggcgtccgagcagtacgcgatcacttcgcctgccgccacgcgctcaaccaacgacgacgcgcgctcgccgatgagcgcctcgtccagccgctcgatgcgcttctcgatgcggaatgccgctagcagcttgcctgtgacacgcgtgtcctcggcgcacaccgcgtcggccgaccgcagcgcctcgagcgcgcgctcggtcatgtcgcccaagttgccgatgggcgtaggacatatgatgagcttgccggccatgtgcttccttccattgctgcgcgcgccgcgccgttcttcgttgtcgtccattgtcaagcatgcaagccgccttggcaaatgtgccggacggaaagcacgcgagcagccgggtcgggccagccctttttggcgcggggatagggcgcaagcccttctctggcgcggagtgggatttgggacttgggtgtcagcggccgcgccggtcgcacgccgcgcccgccacgaatcgacgcggaacgcgcccacccgctcgcaagcgccaccccgcgcccagaagagtgggccccacccgaggccaccttccccgcctcccccgcctcctctcctcttcctcccctgccctccatacccgcgcgtcaacgcgctacaatagctccagcttatcgacccgagagaagggaacgcgcatgcagcagcaactcacgaaacagacccccgagggcttcctgctggtcggacgcatcgacgcgccggagcagccgaaggcggcagccgtcatcgtccacgggctgtgcgagcacttcggacgctacgactacgtgacgcagcggctgctggaagccgggtacgccgtcgtgcgcttcgatcatcgcgggcacgggcgctccatgggcaagaaggtgtggtacgacgaccgcacgcagatcgtatccgataccgacctgttcgtcgaagaagcccgcgcgcagttccccgacctgccggtgttcatgatcggacactctatgggcggcttcggcgccgccagctacggcacggcccatcccggcaagctggacggctacgtgctgtcgggcgcttggacgcgcgaccacgcgggcctggcctcgggcgccgtcgagcaggggctcgaccccgagacgtacatccccaacgagctgggcgacggcgtgtgctccgaccccgccgtgggagaggcctacctggccgaccccttcgtcatcaaggagttctcggtggcgctgctgcgcgccgtgcacgacggccacctctggctgcgcgcgcaggccgccgatttcgccgacccggtgcttctgctgcacggcggagacgacggcctggtcagcccgcaggacagcatcgacatgttccgcgaagcgtcgtcggctgacaagtcgctgcgcatttacgcgggcctctaccacgagatattcaacgagttcaaaaaggaccgcgtcatccgcgatgccatcgaatggctcgacgaccacgtgaggtaagctgcaccggccaaggccgaacatcgccacgccaacggggaaaagcgcctgcgtcataagaaggatcgacgcaggcgcttgcacgagggcaaagccccctcgcggccggacagccgtctgcgtagccgagcccggcatgcgccgcatcctgccgcaacaggaaaaaacgcat

SEQ ID NO: 9804 - DNA, 221 bp, Unknown
  gut microbiota DNA sequence
ccagcatggccatcgtgttcgcgaactgagccgcgcccgagcacacgcccaccgcgcccagcaccggcagccgcagcttcaaaacggcgaacgtcgtcttgccgcgctccgtggtgccgaacagcttcacgcccacgacgatcagcgcgagcaccaccgcgatcagcaggaagttgtcggtgacgaagttcgaagcgtcgatcaaaaactgggtcatggcc

SEQ ID NO: 9805 - DNA, 259 bp, Unknown
  gut microbiota DNA sequence
gctgaggcgtgtttttcgggcgaagatgcgcttcccgacccgccgcggcgcgccggcaacgcagcggctaacggagcgcgacggtgcggcaacctcctcccgccgcgcccgtccttccacacgacggctccgtaccatggagcggatgtgcaagcattcggagcatgacgggaggcgaggcgcgcgtggatgcacgcaacgatcggcgggagggaccttcgcgcgacggccgtacggccctcgggcggctctcgcggcg

SEQ ID NO: 9806 - DNA, 2553 bp, Unknown
  gut microbiota DNA sequence
tggcgctgccggtcctcggcgcgctgtccgtggggctgtatcgtctgctgcgcctgcccgcggccctgaccaccgaaggcgtcgtcgacgagctgcgcgcgggccgtcgcgtcccgggaagccttacggtcgggatactgggcggcagctgccttacgctgctgggcggcggctcggtcggcatggaggcgggcgcgctgcagatgggcgcgtcgacgggctccgtgctgggccgcgcgttcaagctgccgcccgcgcgcggccgcgacggcgcttccgacggctatccgggcgccatcggcatggccgcggcgttcagcgccctgttcttcgccccgttggggtcgtgcatgttcgtgctggagctcgtgcgcttcgaccgcgcggtgctgcggcatgcgcccgccatgctggcagccgccctcgtcgcctacgccatcgcccgcgccgtcggcatcggcgaccatatcccgcgggtggcgctgcccggcctttcgtgggccgtcgccgcgcactgcctgctggtgggcctgtgctgcgccgtgggcggcgcgctgttcgccgcctgtctgcgcgcgctgcgccgcgcgtggcgccgccgggcaaaggctcgtccgttcgcgctggtggccgtgggcggccttgcgttcgcgggtatcgtgctggcatgcggctggcaggcgttccagggcacgggcatgggccttctgcgcggggcgcttgcgggaagcgccgctccggccgacttcgccgtgaaggcggggctcaccgtgctcgtgctcggcttcggcttcaagggcggcgagatcatgcccatgttctccatcggagcgctgctgggctgctcgctggggctggccacgggcgcgccggcgggattctcggccgcgctcggcatggcggcgttcttcgcggccgccggccgctgcccgctgacggcgctgctcatgggcgccgagatattcggctgggcgtcgcttccgtttctgctgatagcggtggctgcggcgtacgccggcagctacgacgtgggcgtgttcggccgcggcgcggcaagcgagctcgcgcgcgtgcgccggcgtgcgcggcgcgacgagccgtcgctcgaggaggatcgatgaggatgcgcgagaacgagcggcaaccgcggcgccgcgtttacgcgaagcccgtgaagcgccgggccccgcgccgattcgaggcgctcggggctcgaaggagcggtacaatgtggggcatggaaaccctgaaaaagctcaagcagaaggcgggctcgcgcgaaaccgagccgtccgccggcgcggcgcctgcgcaaggcgccgcgtcctcgaccgccccggacgcgagcccggtctcggcgcgtcaggtgctcgcgaagttcgcgagctattatagaccctataccttcctgttcgtgttcgatctcgtgtgcgcgacggtgctggcctgcgtcgacttggcgttcccccagttcctgagcttcttcacgaaggacttcttccaaagttcgcctgaggctatcatcggctcgctttggtggatcgcgctcttgttcgtcgtgctgtacggcgtgcgcacggcctgccagtacttcatcaccagctggggtcacatcatgggcgcgcgcatggaggccgacatgcgtatggacctgttcaagcagtaccagcgcctgagcttctcctattacgatcgcaacaacaccggcgagatgatgagcaagctggtcaccgacctgttcgacatctcggagctggcccatcacgggccggagaacctgttcatctgcatcctcaagatcgtgggctcgttcgcgctgctgttcctgatcaacgtgccgctgaccgccatcatgctggtggcgacgctgcttctggccgcgtactcgttctggcgcaactaccagaagcgcgtcatcttcaccgagaaccgcaagaagatggccgacatcaacgcgcgcctgcaggactcgctcggcggcatccgcgtggtgaagtcgttcggcaacgagccggtggagatcaagaagttcgaccgcacgaacgcccgcttcgtggccacgaaggagagctcgtacaggttcatggggtcgtttcatgcggtgaactcgctgttcatcggcgtgctgtacacggttaccatcgtgggcggcggctacttcgtggccacgggcggccttgcggtgtcggatctggccatctacgcgctgtacatcggcatcttcatctcgcccatcgagcagctcatcaacttcgtcgagacgttccagaagggctacgccgggttccgccgcttcatggaggtgctggccgtgcgacccgacatcgccgacgcgcccgacgcggtggacctgggcgccgccgagcgcgcccgctgcggcggcccggatgggcacgtggccggcgaggtgcgctaccgcgacgtgcatttcagctacgacggcgtccacgaggtgctgcgcgggctggacctggccatcccggcgggcgcgacggtggcgctcgtggggccgtcgggaggcggcaagaccaccacgtgctcgctcttgccccg

SEQ ID NO: 9807 - DNA, 253 bp, Unknown
  gut microbiota DNA sequence
tggcatcgtctgatcgagccacttctcctccatgaacagcgagcgcatccgcaccccggcggccagcgcgcgttcgatcaccttgcgcgactcgccgatgaacaggccgttcgcgctgtcggggcaatcgcgcaactgcgcgtcggtcatgcccgagtacgcggcaagccgcgggtcgtcaaggtcttcgaggtggatgatcggcatgtcgttttcctttcagtcgccgaccatcgtaccaccgctcgccacg

SEQ ID NO: 9808 - DNA, 247 bp, Unknown
  gut microbiota DNA sequence
ctcttctcgatgatatgagagcaacgcgcgccggtctggtatgatgcggacaacgcaagctgccggatgcccatgcatcccgacctgggaaaggagcactttccgtgttcgctcgactgtcgcgcatcgtcccgatgcttatcgtgttggccgtggtggcggcaatcgtatacatcgtggccgcatggcgctattccccgaaccgagcgaaagagctgctcatcaggatattcacggctatcacggg

SEQ ID NO: 9809 - DNA, 222 bp, Unknown
  gut microbiota DNA sequence
ttcttcgcgaggatgcccgccgacgagatgaaggagctggccatcttgcgcccccaggccggcttgagatgcctcttcagcagccccagcgccttgttgataagcgactcgatgccgatgaacaggcggaacagcacgcgcggtttgcggtagcccaccacgaacatgctggacagcgccgccagcaccgccgccaacgccagccccccgacgaggaacagc

SEQ ID NO: 9810 - DNA, 217 bp, Unknown
  gut microbiota DNA sequence
ggcctacctgtcggtggagatgaacatgggccagatggtggacgacgtgcgcctgaccgtggccggccgccgcccggtggacttctacggccgcaccggcggcgtcatcccgacgccggtggaggtgctggccaagctggaagccatgaacgaagcaatcgccgcatccgcgaaaggaggggagtaggccatggccgacaaggaaatgaaagtcgtg

SEQ ID NO: 9811 - DNA, 25397 bp, Unknown
  gut microbiota DNA sequence
cgtgacgtcgaggcccgccgtctgcaggatgttgtcgagggccgcttccacgtcgccgccgaagcactgctcctcgaagcccagcttgcatcccaggtcgagcatgatcttccaatcctcgcgcgcctgcccggccggctggacgcacggctcgcggaagaacagcttgcggccgtaggcggcgaagggggccatgcgctcgtggcacatggcggcgggcagcaggatgtccacgtagtcgtgggtccaggggcgctcgtagtagtccacggcggccacgaactccagcttgccgagggcttcctggtagcggtccgattcgggccagatcatcacgttgctggccacgaggatggcggccttgatcttcccctcgtctatgtactcgggcaggcgagccgtctggaagtgcttggtgaacgatacccaggcggggaagtcgtccttatcgactcgcttgtcggcgaatccctgttcggcgtagatgtcttcggcgcggaacttcgcggttgacgcgctcacgtcgagcggcaagccgcccgaggcgaacatgaccccgcccttcttctcgatcatgcccatgagggcggggatcatgaacacggcgcgcagcgcgtgccccacgttcgaggaatgggcgagccctgccgagctagtgaccagcgtgctgggcgcgttttcggccagcaggtgcacggcctcttccagcttggtcgcgggcacccaggtgatctcctcgactttctcgggcggatactgggctgccaagtcggcgaggccttcgtagccgtgcgtccattcctcgacgaactgcttgtccacgagcccgtcgcggatgaggatgttgatgaacccgagggcgagcgcgccgtcggatccgggccgcagctgcagatggatgtcggcgaggcccatgaccgtgggcgtgatgcgcgggtcgacgatgacgaacttgcagccgcgctctttctgatccatgaacttcgcgtggcggttcggctgcgaccaggccgcgttgaggctccaaatcatgcagctgccggtgtcgtcggtggggtcggatcccgacgaattctgaccgcgtccgtacacgagctgggacgtgatgttcgtggcagtcgagcacagcgagctttcaagtccgtatgtggagctgccgaacagcgttgcgacgcgctggataggcgggcgtggctccttggggtcgccgcagtagaacatcacggcatccgggccgtcggcgtccttgacgcggttgaactcgcttacgatggtgtcgtaagcctcgtcccaggtgatgggctcccattgggactgcccggtgcccttgggattcgtgcggcgcagcggcgtctgcaggcgcttggggtcgtaaagctcctggatgcttgccaggcccttggcgcaaaggggcgtggtgggatggggcgttctcgattcgacgcgcacgatcttgccgtcctggacgtacgcggtcatgccgcacttgggaacctgattgcacatgtcgcagtacgtgtagcgtttctcgacaggggcatcggggtcaactgtgccctcggcgtgcgcgatgtcgaagctgaacgcgctggccagcgcgcctccggcggccagggcggacgcgcccttcacgaacgagcggcggctgatggtgtgttgcatcgctgtttcgtcaatcgtagtcatgagtgcgccctccttattcgctcttcgcttcggttttggcttgcgctttcgccttgtccttcgacttcttcactccgacgcccacgcccacgccgaccgcggctaccgcgacgacgcccaccgtcgctgcgacagggtcgatgccgggcgccgctttcgaactttctgcgaaagcgcctcctgcggccgtgggcagcaggtcttcgtccatgccgttcatgggcacgtaatagaacgatgtctcgtcgacgcgcacggcatcgcctagggcgatgcgtttgctcacgtcgctttcagggtcgtcgagatcgccgaagaagcgtgcgtgcgcagggcagttgagcacgcaggcaaccggaagcccctcctctgcgcgctcatggcagaagatgcatttctcgacgacgcgcgagcgctggacgccgtaagcctcgtagggcgcttgagcgtactcgtcgaaataattgccctttccttcgttgagcacgcgggcgccgtaagggcacgcggacatgcagtagccgcaggtgatgcacgcgtcgtaatcaacgatgaccacgccgtcgtcgagcttctggctggcgccggtcgggcagaccgatacgcattcaggattttcgcagtgcatgcaggcgtgcggaaggtaagcgcgtcccgcctcgcctgcggcctcgccccattcaaccgtgtcgagcttcacccaggatacgcccgggctctggttgttctgcagctggcatgccacgacgcacgccccgcaccctgcgcagcgcttgaggtcgatgagcattccccatttcgtcatacgtgactcctctcctcgatgtccccgtgccctgcgcctcggtgcggcgcaggacgttacgaatactctggcaaatcgctggggaaagaggtatcggaagcggtggatgagcgtgcgaaaccgcatcggttccgttatatgatctttcgttttcccaggtggcgacacgttgttcggacgcatgctattggggtagaatgggaagcggaagatcgtaggggatacgggggtcttccatggggaatcgcactgctctgaaagacgcgtggtcgaaggcggtcacgcgggccaatgtgacgcttgccgtgggattcggctgcgcggtgtcgatctcgccaacgttgctcacggcggccacgccggacaacatgatgagcgcgctcgtgaacaagcctccccatggtgcctgcatgccttcgctcgtggcggctgctctggcatgcctcgtgatattcctaggcggacgacgcctgttcgcggtgctcgagcgcacggtgaagccgctcgcgctcggcgtggccatggcgctcatgggcgccgtgctggttctgccgctcgttacgaggaactccgtgtcggtaacgggcgacgtggtcatcgcggttgcagggtcgctgtcggttttgctctacctgttctggatgcagttgttcggcaggctatcggcgcagagcatgttcctcacgctgttcctgtcgcaagtgctgacctgcgccatcaacgccatcatctcgatcgcgaatatctacacggtcgtcgcgacatccatcgcgttgcccctggtgtcgacgatctgcctgcgagttgggcaacgcgaacacgcagatgaacgcccgtcgagcgaggttcccgcctcgcaagaggggcacggagcgtcgacgctgatgctcgtgaagctggcggccatcgtgttcgcatggggcgtgatcgaccatctgttccgcagcgagttcgatgcgttcatgcgcacgcaggtgacgacttcgcccttcgcggtggcgtaccatgctgcggcgttcgtcgtggtagtggcggctgtcgctttcgcctacgcgctgctggcgtatcgcgagcgcttccagttcgggcatctgtaccgcatgatattccttctgggccttgccagcatcctgttgctgcccatcgtgctggcagggcaggcgactatcgtgggctacacgtgcagcgtcatcatgtaccagctcgtgttcctgctcgtctgggtcatcgcagcgtcggtgttccgcgattccccgactcatgcgcctgggttcttcgggctcgtgtacggattctggtcgctggggtcgctaggcggtgcgctgttcagctcggtgttcgtgcagcacctcaccatggacaacgtgcatctgatcgtgttcgcggccgtgcttgcggtggcggtgggttacgcggtcatgttcaccgaggccgatgcgaacgcgctcgtgcaaatcgtcccgtacaagcgtaaagcgccgttcaaagcgaaatgccaagcggttgcgcaggagtaccagctctcgccgcgggaaacggagatcgccatgctcatcgcgcaaggacgcgactcggcgcatatcgagaagaagctgttcctgtcgcgcagcaccgtgcagacgcaccgcatgcacctctaccagaagctcgacatccacaaccgccaggagctgctcgacatcatcgaagccgccgatgcgagctagggcggatctgccctctccctcccgacgcgcacgacttcagcgagcggccctgcatctgcggggccgttttgcctgttcggcggcatcctccggttcggacgatgccgccgaatcccaaagatggttcgcttcgacgatggcgcgcgccgcccctgtttccttacgatgccttccgcgcggaggggtcggctgagcgttcggccgccgcgcaggacgaggaaacggaaggaaggagaccgatgcacgcacaacgcaggatcgcgctggtcacggtgtgcgccttgctggggacggtcggcatcgccggctgcgctccccaagcgaacgaggcgcttgcaacggacgatcggcaagccgcgcaagcggaggagcggaactacaccgacgaacagaaatcgatcatcgccggagaggagggcaccacctacgacggcatctcgctcgacgcctacccgggcaagggctacctcgacgacatgcacgacatgtgggacgcgaacgtcgatcaatgggcgcccgagctgcgcacgctgccgagcggccagatcgtgcagcgcacccccagcgagctgaccgagcgcgcccgtcaaggcaagacgccgtacaacatctaccggctgaacaacgacaaccgcggctgcaacagctgccacgccgacctcgacgcgacgctgcaacacctcgcgcagaccatgcatccctcgccgaacagcccggcgctcgatgccgagatgacggtggaccagtgcctgttctgccatacatactcgccgggctacatccccacgcagtacgagttcggcacgctcatccacaacgtccactacggcttggtgtccgacggtcggttcgaggacgagtacaaaggcaactgctactcttgccacgatgcaaccaacgacggcgagggcatggcgctgtgggatcagaccaagttcgagcgcctgcgcggcgtgacgaaggtcgagaacgtggagggcgacttctccatcgaccaggaaaccacgatggcgcaggaggacatgttcaacatggacgcctggaaccgcctgtacgaccgtatgcgctccggcgccgagtacgccgacacgcccatgccccagagcctgttcgacagctggcccatcacggtggacggcgaggtgaacagcccctacaccgcgcttcttcccgacctcgtgaaggaagcggaggaggccggcgtcgtggtgacgaaggtttcgaaggaagtgtgcaactggaacggcaccggcgccggctcggtgagcaacgtggagatcactggcatccccgtgagctggctcatcgagcgtgcgggcggctacaccgacaacgccgacatcaacggcgtgcgcgtcatgcgcgccgacggctcgtccaagcgcgccatgccgctggacaaggtggacggcggcgaggccttcctcgtgtacaagatcaacggcgagcagctgaccgcggccaacggcttcccctgcacgaactggtgcgaaggcgtcgaccctgaagtgaactccaagcagatgagcgagtacaaggtggccaccgacgcgcccgacttcgacgaccacgtgtacgagttcgagcatcacgacggcaacccgaacggctggatcgacgccgaggggaactggacgaacaagcccaacgccaccatcctgggcgtgcccgagggcctcgtcatccagaacggccagccctatacgttccacggctatctggacgcctacgacgagaagatagcgagcgtcgagttctcgatggacttcggcaaaacctggacgaaatacgaattgggcgacaccgacgtcaacaagctcgtctggttcgacttcacctggacgccccaggaggagagcgcctactgcctgcagctgcgcgccaccacggaaagcggtctcgtgagcccgcagatccagacggtcatggtgaacgcgaaggacacgatgccgaccgccgatcagaccgtcgtcatcgacaccccgtcgctcgtcgcgccgaaggcggccgtcgacgcgacggaaggaaaggagtaaaagcgctcatgaacaagccagctcagaagatcatggccggcgttgcgggcgcggtgctgctcgcatcgggaaccggcgcggccctcgcggcccagcagcccgcaaccgccgaagaaggctcccggcccgccggcgcaacccacacggtggccgatttggacatccgcgcccagtggctgggcgaggaatccgactacgtgcgcgttgcggacgtgcaggggtcgttcacgttcaaccaagagggcgtcacccccaacgacgagctgttcaacgtgttcggcacggcgatcctctcgatgtgctccaagcccgcgcccgagctcgccgccgagcaggacggcgtcgccaactactatgtgaacgtgggcggccaggtgaaggagaacttcacggtgaacctgtccgagctcgacgacgaggagcaggaagcgctcatgggctgctcgtgcgccacgggctcgcccttcggccaggctgccgtcatcggcgtgccgttggcatcggtggtgggcatggccgaactcgaagacggcgtgaacaccgtgacggcctacggcgccgacggctacggcgagccgctgccgttgcagtacgcgctcgacaagaacgcgcttttggtgtaccgggtgaacggcgaggagctgaaggcgtcggagggatcgagcgtgcagctgtggatgcccgaaaccgtggcgcgctacttcacgcgaaacatcgcaagcatcgagctcacccgcgaggacgccgtgcccgaggtggcctcggtcgaccccatgtaccgcaacaagatcgagatcaagaacacctccgacggctgcgtgttcgaggcgggcgacgagatcacgttcgagggcgtggccgacgactgcggaagccccgtcgcggccatcgagttctccttcgacggcgggcgtacctggacggcgtgcgagacggacggcgccaccgccgacaagtgggtgaactggcggttcaccacttcgttcgacgaggcgggcgactacgagatgaccgtgcgcgcccgcacggccgacgacgtggtgtcgccgctgtccgccagcctttcctttgcggtgcgctagcctccgcgatacgctgcatctttccatgagcggagccggcatcttccggctccgctcagcgtgcgctcccgccgatgcgctatactgcgtgcagaaacgcaaggggaacgcgaaaggggagcgctgcggcatggagcatcggcggggaatcgtgaacgtatgcggggcggcgtcggccgccgggctctcgctcatcttgctgtggtgcacgctcatggggcacacgcccggcttcctgctgtcctcgctcggtctggcggagtgggcgaacgcccgcacgttctggctgacgggcatcctcgtgctggccgcggtgctggcggcggctccgcgctgggtggccgcgcacgatcgcagcctcgcgttcgtgatgccggtgatggccgctgtgggcacgggatgcttcgcgctgtcgttccatcaggacttcttcagccctgccgtcctggccacgttcgggctcgtgctggcagggctcggctacttctggttcgcgtcgcgcttcgtcatcctgttggcgaagacgcaggggttcgcatgcgcggtgtggtgcatcgtggcggcgttcccgttgcgccagctgatgagcttggcgctcgacggcttcatcgatcctgcccagcaggtggtcgtggccatcgccctgccttgcttggcggcggcgtgcttcgaggcggcccgcgcggccgacggccgacgcggcgcgaccgacgcgtcgggggcgaaggacgccgtgccgtctccggccgtcggcgcgcccgccgccgagccgagcgtgcggcagcgccaggcggcgggcgacatggtggccgtgctggtcatggcgggcgtgctgctggccatggtgcgcatcttcggcccctcgggcgcatggggggattcgaacaccacgtacttcgacgcgctcgggcgcatcccggccatcacggtgctcaccttgtgcctggcggcgttcgcgtggctcgccctgctgctcatggcgaagcagcccgcgtcggtgcggttccaaccgcccatcctcgtggtcatcgccgggctgttcgtcgtggtggtgcgcgcccagctgggcgatgcgccgaacgcgctgctcgacagcatcgtgcagttgaacgacccgttcgctcacctgctgttctggtcggcgatcgcggccgcctgcacgttgttgccgctgtccgagaaccgcatcgtcggcatcgcggggcttgcgtacgccgcagcctcggtggtgtgggtggtgttcctgcgcggcagcgccgtcgtggagacgactgtcatcctcgtggtggtggcgctcgtgatgaaccgctcgtggctgtcgtcgctcgcgcgcggacgcggcaggggccggcaggttgcggagggcgccctcgacgacgaggcggcgggcgacacggccagccgtctgacccagtccatcgtcgagcgctgccaggaggtggccgcggcttacgcgctgtcgccgcgcgagaccgaggtgttcacgctgttggcgcaagggcgcacctgctcgttcgtgcaggacgagctcgtgctggccgagagcacggtcaaaacccacatgtcccatatctacggcaagctgggcgtgggcggccgtcaggagatgatggatctcctgctcgacgagaccaaggggaaagacgacgcctagggcgcctatcgatgccgctcgcggacgattttccctttgttgacgaaccgtaaagcgccgcgtcgctataatccgactactttagcgtgcgaaagtacctctgccgaaacggcttcgtcgtgtgccggaggcgtccggaatctgcttcggcgcaggctctttctctcgcaaggggattcgttgtacaagagaagagaggggatgtgcatggatatcatccagttcatcagcgacatcgacgccttcgtgtggggtcctccgatgatcgtgcttttgctgggatcgcacctgttcctgacgtttcgcaccgggttcatccagcgcaagctgcccacggctatcaagctgtcggtgacgaaggatccggatgcgccgggtgacatcagccagttcggcgcgctgaccacggcgctgtcggccaccatcggcaccggcaacatcgtgggcgtgggcaccgccattctggccggcggcccgggcgcggtgctgtggatgtggctgaccggcgtgttcggcatggccacgaagtactccgaaacgttcgccgccgtgaagtaccgcgtaaaggaccacaacggcaacatgctgggcggcgcaatgtacgcgtggcgccgcgcgttcgagaaggacggcaaggcgccgtggtggggcctcttgggagcgggcgcgttcgcgctgttcgcggccgtcgcctcgttcggcatcggctcggcggtgcagtccagtgccatgaccggcatcatcacgtcgaacgcacccggcgtgcccacctggggtatcggcctggccatcgttatcatggtgtccctggtcatcttcggcggcatcaagatcatctcgaaggtgtgcgagaagctcgtgccgttcatggccatcgcctacgcgtggggctgcatcgtgatcatcggcatgaactgggagttcgtgtggcccgccatctgcctgatcttcgagtgcgccttcacgccgaaggccgcgttcggcggcgccgtgggctccggcctcatgatggcgctgcagttcggctgcgcgcgcggcctgttctccaacgagtcgggcctgggctcggcgcccatcgtggcgtccgccgcctccacgcgcaacccggcgcgccaggcgctcgtgtccatgacgggcacgttctgggacaccgtggtcatctgcgcgctcacgggcatcgtgctggtgtccacgatgatcgcgaaccccggcatcatggagagcggccagatctcggccggcgccgacctcaccagcgcggcgttcgcctccattccctacatcggcacgcccattctggtcatcggcatgatcctgttcgcctacaccaccatcttgggctggtcgtactacggtaaccgctgcgtcacgtacctgttcggcaagcgcgccatccgtccctaccaggtgctgtacgtcgtcgtggcgttcttgggcgccatcggcatcggcgatttggtgtggaccatctcggacatcacgaacgccctgatggccgttccgaacatcatcgtggtgctgctgctgtcgggcttgatcgcgcgcgagacgaagcactacgtgtgggacaagaacctcgaggagacggacgagacgcccattccggtgttggaatcgaagtagcgccgcgcgcggatagcgcgacggcgagggccccggtgtcgaaagatgccggggccctttcgcgttcggggcgcgctgccggcgtgtggtccggccgcgttcggggcgataccagcgtgtggcctgtccggcgttcggggctcttccagcgtgtggtctggccggtctgttgttggcacagaatgaacgctatgcgcgattctgcactggcctgagaaattgcgacctggggtttctttcgccggtaatcagaaaagtgccgagaaatcgtgcatagcgttcattctgtgccatgcgcgtgcgcgcgagatcgcagaatcggccttcgcccgtgcccaacgcgcatgcgatgcggtatcatggcgggcatgaagaaactgatgatcataggcggcggcgcggcgggtctcgcggcagcggtggctgcgaccgacgcgctgcgtgcgcacggcgtgcgcgtgggcgcggacggcggcgcggacgccgtcgaggtgacggtgtgcgaggccgacgagcgcgtgggccgctccatcttggccacgggaaacgggcggtgcaacttctcgaacgtccgtgtcgatgcggggctctaccgaaacgccgaattcgtcggcgcggcgctggcccagctgcgcgctcagggcgggcatgcggacggatgcgaagagcccggacgcaagaaagccgtccgctcgacggacgcggcccttcccgccgatgccgtctgccccgatccggtgcacgcgttcttcgcaggcttggggctcgtgtggcgcgaagagggcgaaggccgtctgtacccgctggcgaacaaggctgccagcgtgctggacgtgctgcgcgcgggcgcgcgggacgcgggcgctcgcgagctgtgcggctgcgaggcggtgcgcatcgatccgccgtcccatgcgggcgatcgctttcatgttcgtttcgccggcggagcggtgcgccatgcggaggcggtcatcgtggccacgggaggtcgcacggcgcgcggcttgctgcccgagggcttcgaggcgacggagccgcgcccggtgctggggccgctgcgcaccgactcccgcctggtgaaggcgctcaacaacatccgcgtgcgctgcgcgatctcgctcatgtcgcccgacggcgatgccaaggcgcgcgaggagggcgaggtgctgttccgcgactacggcgtgtcgggcatcgcggtgttcaacctgtcgaggttcgccgaggcgggcgacatgctgcgcatcgacctgctgccgcggatggacgcgccgatgctcgagcagctgctgctagagcgccgatcgcgcctgttcgcgcgcgctggatcgtgcacgggcgacgacgtgctgcgcggcatggtgctgccggcggtgggtcgcggcgtgctgaaggcggccgggctgcgcgccgaagggccgttcgggaagcgcgatgccgcgccgctcgcggcagcgctcaaaggactcgcgctcgaggtccgaggcgtcggcgagccgcggcagtgccaggtgcggcgcggcggattcgcggtggaggcgttcgatccgcgctcgtgcgcgtcgcgcacgatgccgggcctgcacgtggtgggcgaggcgctggacgtggacgcgccctgcggcggctacaacctgcattgggcgtgggctagcggcatgctggcgggtcgcgctgccgccgagcgcctgatgaaggaggcggtcgatcatgcttgaggtttcgaacgtgaagttgccgcttgacgcggggctgcccgagggcggggggctcgtgcgcgcggcggcggccgcggcgctgggggtggcggaaggcgacgtgcgcacggtgcgcacggtgaagcgcagcgtggacgtgcgcaagaagcgcgacgtccatttcgtggcgacgctcggcgtggagctggtcgacgaggcggccgaagagcgagcgcttgcggtcgccatcgcgcgcggcggcgctggggcgatcgtgggaacgcacgtgaagcgccacgagccgtacgagccgctggacgtgccattgcgcgctgcggcggccgcgaatgccggcgagccgcgcccgatcgtggtgggcgcgggcccggccgggctgttctgcgcgctctatctggcgcgggccgggctgcggccgctcgtgctcgagcgcggcggcgacgtggacgagcgcctggccgcggtggacgcgttcgcggcgggcggcgatctcgacccgcagacgaacatccagttcggcgagggcggcgcgggcacgttctcggacggaaagctgaccacgaacatcaagaacccgatggcgcgccacgtgctgcgctggttcgtggacgccggcgcgcccgaggagatcctttggcaggcgaagccgcacatcggcaccgatctgctggtggacgtggtgcgcacgatgcgccgccagatcgaggacgcgggcggcgaggtgcgcttccatgcgcagcttgcaggcgtgcgtttcgcgggcggcgcggtgacgggcgtcgacgtgctcgacgggcgcacgggcgcggcggagcggatggctgcgcggcgcgtggtgctggcctgcgggcattcggcgcgcgatacgttcgaggccgtgcacgcggcgggcgtgacgatggagcagaagccgttctcggtgggcgtgcgcatcgagcattcccaggaggcggtgaaccgggcgcagtgcggcgacgccgccgcgcatccggcgctgggggccgccgactacaagctgtccgcgcacctgccgagcgggcgcggcgtctacacgttctgcatgtgccccggcggcgaggtggtgtgcgccgccagcgaggagggcggcgtcgttgtgaacggcatgagccgtttcgcgcgcgacggatcgaacgcgaacgcggcgctgctcgtgggcgtgggtcccgaggacttcgggagcgaccatcctctggcgggcgtcgagctgcagcgccgcatggagcaggcggcgtatcgcgcggccattgccgcaggcggcgccgcgtaccaggctccggcgcagacggtgggagatttcctggccggacgcgccggcggcgcgagcgcgaaggtgcggccgacgtacgcgcgcggcgtggcctggtgcgacctgcgggagtgtctgccgggattcgcggccgacgccatcgccgaggccctgcccctgctcgatcgtcggctgcgcgggttcgcggacgaggatgcggtgatgaccggcgtggagacgcgcagctcgagccccgtgcgcatcgtgcgcgacgacgcgctgcaagcgcgggtggaaggcgcgcccgacgacgcgcccgaaagcggcctctacccctgcggcgagggcgcgggctatgccggcggcatcatgagcgccgcctgcgacggcctgcgcgtggcccgcgtcctcgcggacgcgttcgaatcgcgctagatccgcgttggaatcctgtcgaatccgcgttggaaacgaaggctgctttcgtggaaaccgcgttggattcgcgtcggatccgcataaggttccgtggtgcttttcgctagatctgcgccatcgaaacgtgagacgggccctctatactaagaacgtggagcaggtgcgctgaggatgctatagtgagggaggccgtcatgggatcgagtgttcttttggatcgagaggggcaagcgatggatgtgaaagaggctgcgaagaaggcagcggcttacacggcggatatggaaacgctcacgaagccggatgagaaagccttgtttctcagcggatcgggattcgccatcgaatcgacgcgtttcgacgattcgcataattgctgggagatcggcgtcggattcgtccgcgagatcgaccgccggagcaatgcgaacggcatggtgttcggcaaccaagagcctcttcgtgacttgcgcacgtacaagacggtgacgatctcggacgatagcggcgaagtcgtctcgtacgagtaacgggcgtcatgaaagggatcatcgacgcaaacctgctgctcgtactcgtggtgggtttgaacgatcctcggttgctgggacgaaagaagcatgtcgctgaatactgcaaggaggacttcgacgttctttgcggtgttctgaacgatttcgatcgcttgctggtcacacccaacatcataaccgagtgttcgaatctgatttgcggaaaagacgggcatggggcaaattccagtgaagcgaccatcctcgccgagctgcttgatgaaggagccgtctaccgcctcgacgagcgatatgtcgagagcgtcgtagcggcgaatcgaaacgagtatcgctatttgggcgtcggggactgctcgcttctgcacctcgttgatgcgcagcatgccgtcgtgacggcggacggtgccttggctcgtgcagcgcagtccataaaccacgcttcggtcaacttcaaccatgttcgaacaggcgcactgttgtactgatcgctagaactcgatgccgcggcgggcgaggacgccctcctcgtagtagtgcttcacttcgcgcatctcggtgacgaggtcggcgacggctgtgagcgtgtcgcttgctccgcggcccgtgacgacgagctcaacgttctcgggccgttcgagcacgaggtccaccagcgcgtcgggcccgaaatagcccaggctgtcggcgacgttcgcctcgtcgagcaccaccacgtcgtacgcgccgctcagcatcatgtcgcgcgcgacggccaggccccgcttcgccgcctgcgcgtccgccgtcgcatcgggtgcgctcaactcgtcgcccgttccgaactgttcgcacgcaatgagatcgccgaacaggcgaaacgcgtcgagctcgccggtggggccgcacttcatgaactggcagaagcacacgcgcaggtttgcggcagcggcccgcatcgccaatccgacggcagccgtggtcttgcccttgccgtcgccggtgtacacctgcacgtatccctgctccatcgtcatgctcccagctcccgttcccaatcgaagtcctcgggcggcgccatgggcagcgtcgggtcgtcggcgtcgtccatgcggccgtcccacaggcaggcgcccatgtccacgtgcgcatcgtcggcgaacgcgaccccttccgcttccagcatctcgcgctgaacctcggggcctccgaaggcgaaccccttgcacaggcccccgtccttgaacaccacgcggtggcaggggatgctgttgacctcggctcccggctcggggttcgcgcgcagcgcatatcccacgtagcgcgccgaccgcggcgctccgatgagccgccccacttgcccgtacgtggccaccttcccgcgcggtatgcgccgcaccacctcgaacaccctgtcggagaaatcccccatgccttcttcgctcctcgcttccgcccgtcgtttcgcttcagtatacggcaaccttgtacggcgcgtgagccttgcgcgccgccgttgacgcttgtctggcgcgagcacgaaacgaacagacgattgcgggttcccttttcctacgatcccccttatgattgaggcacggctgttcctcgagaaccgcccccgcttctttcgcacgggaggtagtagatggatccgatcagcaaccgtcgtccggggggctcggatggcgccgagcctttgagcgctcagtcgagcgccttcgatgcaattgggagctttccaaggccaaccgatctcgtcgacgccgaggcgctcgccgacatgcgggcgttcaacgatctcaaggcgaagcgcaagaagcagcgcaaacgcaagatcgtcgtgggcatcgtgtccgcggtggcggtgctcgccgtggcgggcggcgcgttcgcctggtattccgccgatcaggcggccaaggcgctggagaatatggcgccgcagacggccttcgtcgagcagggcacgttcgtcgaaacggtgtcggcttccggcaacctgcagcccgtcgcctcggtgagcgccacgtccgaggttgacggtatcgtgggggaggtgctggtagccgaaggcgatgcggtggccgagggccagacgctgttcacggtggtcaacgacgatctggacaaggccgtgaagcaggctgcccagggcatcgaagaggccaaaaacggcgtcgcccaggctcagaacgctgtgaacgacgcctaccatgccaagtccgccggccaacaggcggcggctcgggctcaggagcaggcgcaggccgccgccgcagccgccaaggaagcgggcgcggcaacaccggcttccgacgcgtcgggcgcctccttcgacgaggccggcgccgattccgccatccgcaacgccgagctggcgctcagcagcgcgaacctggcgctgcagaacgcccagagcgcctatgacgaggccgtcgcgcgcgccgccaagcgcaccgtcacggcgtccatcgcgggaagcgtcgtcgcggtcaacatcgagcccggcaaggcgctgggcgcgacggcgaacgcggccgcctcgccggtgcagatcgccgatctgtcgcagatgaccgtctccatcaacgtgaacgagatcgacatcctcaagatcaccgccgaccaaaccgccgaggtcgcgttcaccgcggcccccgacctcacgctgcccgccactgtggtcagcatcgccaccacatcggccggctccggcgacgcggcgggcggtgccatgtacggcggcatgggcggcgcggtcacgtacgcggtgaagctgctcatcgccgaacccgacccgcgcctcaagcccggcatgaccgccaaggccaccatcaccacgaccaccatcgagaacgcgctcaaggtgcccatctcggccgtgcagtccgacggtgcgggcggcagtttcgtcatggtgctcaccgatcctgagacgcagggaacggagatgcgcgaagtcgaggtggtcgcgtccgacggtcttacgtccgtcgtgaagggccgggtgaaagccggcgacgaagtggtcgtgagcggcggcatgggcggcgcgccggacggcatgggcatggcggtcgatggcgctgcctcggccgattccgccgccgttgcggtgggatagcgctatgggatacgtcgtggaagccgtcgacctgcatcgcatctacgagagcgcttcgggctacacccatgccctgcgcggcgtgacgctgtcggtggcgcaaggcgagttcctagccatcatgggaccctcgggatcgggcaagtcgacgctcatgaacctgcttggctgcctcgacacgcccacgcgcggccgttacctgctggagggtatcgacgttgccgactatcgcgaggacgagctggccgagatccgcgccacgcgcctgggtttcgtgttccagtcgttcaaccttcttcctcgcgccaccgtgctgcgcaacgtggtgctgccgctcatctacacggcctgcccgcgcaaggagcgcgagctgcgagcgcacgcggcgctacgcagcgtgtcgctggacgagcggctgtacgaccatcgcagcaacgagctgtcgggcggccagatgcagcgcgtcgctatcgcccgcgccctcgtgaacgatccggcgctcatcctggccgacgagcccaccggcaacctcgacacggccacgggcgacatggtgctgaacacgttcaagcgcctgcgcgacgcgggcaagaccatcgtgctcatcacgcacgagcccgacgtggccgcccacgccgaccgcgtggtgcacatccgcgacgggcggctgtacgagggcccgcagccgagcgccgccggtcgggaaggggcgcgcccatgaagataggcgatctgttctacgagacctggcacgcgctgtccgcgaacaagggccgttcgttcctcaccatactcggtatcgtcatcggcatcgcggccgtcatcgccatgacctcgctcatcgcgggcgtgcagaacatgctcatgggcgagatggggctgtcccaagcgcgccaggtgtccatcagcgcctactcgccgcagggcatcacgttcgacgacctggacaagctggagcaggggatgccggaatacgaggtcatcacaggtgcctcgtacgcatcggccgagatcacgatggccgacggccagaaaaaccacgccacggtcatcggcgcgcgtcccgattacttcacagcgaacgggacgaagcttaaggagggccgcttcttcaccgagagcgaggagcagaacgccgcgcgcctcgtggtgatgggcggcggtgagatgaccgtgcagatgctcggcgtccccgacaccgaggcggtggggaagacggtgcgcctgggcaacgacgactacacggtgatcggcgtgttggaaacctcgtccttcatgggcggcggagggacgttctacgcgccttacaccacggtggagacgcgcatcggcaatgcgagcggcatccaacagatcgtcggcttcgcgcgcgagggcaccgacatggatcggctcgtcgagacgacgcagacctttgtggcgcagtacttcaatctggagcccgagaacgtgtacgtgtcgtcgctcgacgccgtcatcaagcagatggaaacgatgatgacgtcgttctcgctgctcatgggctcggtcgcgtccatctcgctgttcgtgggcggcatcggcatcatgaacatgatgctgaccaacgtcaccgagcgcatccgcgagatcggcctgcgcaagtcgctcggggcgcgtcgtcgcgacatcacgaagcagttcttgctcgaggctatcatgctgtgcgtggcgggcggcgcgttcggcatcctattcggcttcctggcggcgttcgggctgggccaggtgatcggggcggtgcaggcgggcatgaccgtcacgccggtgctcgcgccgggcgtggtgttcggcgccgtggccgtgtgcgtgcttatcggcgtcgtgttcggctactacccggctcgccgcgccgccaagctcgacccggtggagtccctgcgctaccagtagaagcgatgtctgccccgccgccttggcgcaggcgagggccctagtctgtcatcctgagcgagcgaagcgagtcgaaggatcccgagcggcgtcagcgggaaaggccgtggccggctcctcgcgggatccctcgacttcggcctccgttcaggatgacgagggcatgccggcggtcggcggaaacgttcctgttcgcgtcgttcgccgacccaagagatggtagaatgctttgagcatgaagaagacgtctcggatcgtgggaagccgggtgagaatcccgcacggtaccgccactgtgtttcggtcttgccgatcagccagaataccgaccgagaagcgtgtgtgcgcaagcggcgagttaccgcgagcgctacccgtcgggcccgagcgccctcggcttgtctgcgtagcgaatacgggctgcgcgatctccctgctcgggaggtcgcgcagcctttgttttgctgtctttcttctgcgaagcgaacgtacgaaaggagaaggaagacagtgaaagaacatgcaagcacgcgtgcggggatagcgcagcgggcctgggccctcttgctggccgtcgcgctctgcctgggcctcgtgcccggtgcagcctgggctgccgaaggtcagactgctgcagcgggggcggaaaacgctcaagcgtccgccggtacggtcacgctgaccgtcaccgccggcagcaagaacgactacggcacgggcgaggtcacgtaccccacatgggtcaacaagcagtacgccctcggcgaggtgctgaagacggcccaggccgcgggcggcaccggacacggcaagggcgatctcacgatggaggacctgctggacaccgccgtggcgaagggcgacctcaaggcttacgacgcctcggagtcctcgtacggcaagtacctcaactccgtgacctcgaaggacggcgcgaagctggccggctggagcagcgacgactcttcagccggcctatattggtccctgttcgacaacggcggctttgcgaactcttcgttcgaccaggtcaagcttgtcggcgggaattcctaccaattctgctgggcttcgtattcttcggcgaccgctccgtccgactggaaagcgtattacgagaagaatcctgccgaccaggcgaagggcgacgatggcttgccgatttccgaggttgcgaccctgacggtcacctcagggagcaagaccgactacgatgcgggggagacgacgtacccggcgtgggtcaacaagcagtatgcactcgacgaggtgctcaaggcggcccaagccgacggcggcaccgggcatgcgaaggaggatctcacgatggaggacctcctgaacgcagccgtggcgaagggcgatctgaaaggctatgatgcctcttcgtcttcatacggcgggaagtacctcaactcgatcacctcgaaggacggcgctgtgcttgcgggctggaacagcgacgattactcgctcggccagttctgggccgtgttcgccgccggcgtctcgtcgagcaccccgttcgaccaggtgaagcttgaggagggtgcgtcctatcagctttgctgggacaccttctcctccgcggtggctccttcggactggacggcctactacgctgagaatcctcctgcgaaagcagacgcgggcgacggttcgaccgatcctggcgatgcgatcgatccgcccaccgacaacaatatcgcacatggtatcgatctgtccgctatggcttctttgatgaacggcattgcggcctcgtacgagggaacgaccgaggcctggaaggtcatggacatggcggcgatgggacgcctggcggcggctcaggcgagcgcgttcattccggttggacttgagggcatgaagaaccccgctcccgattcggctgcgaccgcgtttcagcgcaatatcatcgcgttgagcgccgttggcgtcgatgctacttctgtgcccgacggcggtggcgtgtacgatgcgctggatgcgatggctcagaaggtgacggcggcatcgcccgtgaacgtccaggcgttcactctgctggcgtacgcgagcaatgcctatgaagtgccagtcgatgcaaagctgtccgaggatgctctgatcagcgtattgtgcggaagccagctttccgatggcggcttctcctacagtggatcgaaggccgatgcggatatgactgcaatggtgatcaccgcgctttcgccctatgcttcaaacgatgcagccgttcgcaatgtcgtgaacagggcgttgaacgctctcaagggtttgcagcatgatgatgggggttttggagcgaccgggatcggcgttgattccggcaccaataccaattccaccgcgatggccgttgtcgctctgtgcgccgccggtatcgacccttccacgtcgtgggctaccgaaagcggtgccacgccgttgagcgcactgctatcccaggccgcctccgatcgttcgggtttcatctaccagggttcggtaaacgatttcgccaccgagcagggcttccgggcgctggtggcttaccagggtctcaagaacaccggtgccgcgtacaacatctacacgcaggctaagctcggccaggcggggctgcccgccgagaagcaggaagaggagagtgctcccgctcctgctgacaagcctgtggccgacaagaaggcgcttgccaaaaccggagacggctctgcgccgttcgcggccggtaccgcggtgctcgcgctcggcgcgcttgcggcgggtatcgccgccacgcggcgcatgcgcgtttccgacgagctctcgttgcgtcgataggatcacggcggtatgagcgaagattcgaacgagaagaccggcggctcgggtgtcgaaacgctcgagccgcgtgagcgggccgaagcgcccgacaaccgcatcgccccctccgcgcctcgcggcgaggagggggcctcggtgggcggggcatccgcaacggcggcgtccgcgccctcgtctcgccgacctcgcaaggcgctgctcgccaccggcgtcgttgccgctgcggtggccctgtgcgccgtcgtggcgagcatgggcttcgccaccggatggctcggcaaccctgcgccgtccgatccggtgccgatgcccagcgtcgtcacggatgcgccctctgacggagacgacgcgtcgaaggacgacgagaccgatcgcaaggatgccgccgaagaggcttcggagggcgcggacggggaaacgggcgccgtcgtcgagggcgaaggcgcggcgggtgccgacggctcggccgcttcgacggccggcgaggcgccatcgggcaccgacctttccgcgtcggagggcgctgctgcaccggctccggagcctgctcccgaaccggccccggctccctcggctcccagcaccgtcacggtgacggtatacatcgacagctcccgcgccgcgtccaatggctacccctcatccttgggcggcggcacggtcaccctcaaccagggcgcatccgtctacgatgccctctgcgctaccggagcgtcggtgggcgggtcgagcggctacgtcagctccatcggcggccttgcggaattcgcttgcggtcccggcagcggctggctgtatttcgtcaacggatcgtcgcccggatacgggtgcggttcgtatatcctaagcggtggagaaaacattacgtggatatacacctgcgatttgggcaacgacctgtagatgtgcggctagaggaaagtggggtaccgtgttcagcaatccgaaagtggccaagatcatggctgcattggcgatcttcttcgccgtgctcgtggtgatctcgatcttccaaacggtgcacgcctaggggcgcgcctcgtatgaagcgcacggcgttcgacctgttccatcccgtcgtggcgttcggctacttcgccgtcatgttcgcgctcagcatgacggcgatgcagccggtctacttggccatctcgcttgcaagcgtgctctcctacagcgcggtgctgtgcggttggcgggcgacgggtcgctcgcttctctggcagctgcccctcgtcgccgtcgtcgcgctggcgaacccgctgttctcggcgtccggctccaccgagttgttccgcctcgggctgcgcgcgttctacctggagagcttcgtgtacggcgcatgcatgggcatcatgctgatcagcgtgatcgtgttgttctcgaacgcctcccaggtgctcacgtccgacaaggtcatgacgctgttcggcggcgtcgcgcccacgataggcctcatgctgtcgatgacggcgcgcctcgtgccgcagttcgtgcggcgcggcaacggcatcgccgacgtggagcgcgcgtgcacggcggcgcgccctgccgaggagcccgcagggaagctcgctgtcatgcgcggctacctgcggaggacttcggtgctcatgggctggggcatggaagactcgctcgagacggccggcgccatgaaggcgcgcggctggggggccgccgcgcggcgcaccacgtacgcgcgctaccggttccgtcgcttcgacgccgcggcgctcgtcttcggcggcgcgctcgcgttgctggccgcagccgccgcctgggcggcatgcgcgcaattccgtttctatccgacgatcggcgggctcgcgccttggtggaactatctgccgtacgcgctgttcgcgtgcctgccgcttgcgatcaccgcgaaggagcatctgagatggcgagcgtgaaggcgatcgaggcgcgcggtttctcgtttcgctaccctgagtcgacggccggcatcggcccgctcgattgggcggtggaggagggcgcgttccagcttctggtgggcgccacgggcagcggcaagaccacgctgctcggtagctgcaagccggccatcgcgccggttggagcgcgcgcgggctcgctgcaggtgttcggacgatccgtggaaaagctggatgcgcgcgaggccgccgcgacggtgggttacgtggcgcagagtcccgagaaccagatcgtgtgcgacagcgtgtggcacgagctggcgttcgggctggagaacctcggcgtggaacaggacgagatgcgccgccgcgtggccgaggtcgctcacttcttcggcatagagccgtggttccgccgctccgtcgccgagctgtcgggcggccagaagcagatgaccacgttggccggcacgctggcgatgcagccgcgcctgctgctgcttgacgagcccaccgcccagctcgatcccgtggccgagaagaacttcctgcacgctctgtttcgcgtgaaccgcgagctgggcatcaccgtcgtcgtggccacccacgcccccgaggcgatggccgagtacgcgacggacatggtggagctgcgagagggcacgctgatccgctgcttcgaaccgcgcgccggggtgtcggccttccgtcgttccgaatccgtcccggtggcacccgcctccgctcaggatgatgaagccgcatacgccgtctcgttgcacgacatccatctgcgctacgcacgcgatgccgactgggttctgcgcggctgcgatctgcgcgtcaccgccggcagcatccacgccgtcgtaggcggcaacggctgcggcaagtccacgctgctgcgtgccatcgccggggtcgtcaagccggagcgcggccgcgttgagaactgcctggccgcgcgccaggcgctgctcccgcaggatccgaaaaccctcttcgtgtgcgatacggtggccgaggagctgcgcgagtggcaggcgaactgcggctacgacaacgctgcgatcgatggcgttctcgcgcgcttcggtctggacgcgcgcgtctccaaccatcc

SEQ ID NO: 9812 - DNA, 520 bp, Unknown
  gut microbiota DNA sequence
gcaccctgcgcgatctcgcgcaggccggggcgaccgtcgtcctcgccacgcacgacctgacgttcgccgcgctcgtcgccgatgccgccaccatgctgttcgacggggaggccgtgtgcaccgagccggccgccgcgttcttcgcgggcaacctgttctaccgcccgaccgaggatgcgttctcccggctgtggcgcgaggaacgctcgtgacgcgcccgccttcccgcgcggcggcgcgcctcctcgcgctgctcgaggtgccggcgctcgccgccgtgcccctcgtgctgggcgtgtgcgcgtacttccaggtggagcagggcgcgctgctcaccgtggtcgtggccttcgcggcggtgggcgtgttcttcgccagctttgaggcctcgcgcccggcgttgcgccagatcatgccgaccgtggtgttggcggctcttgcggcggcgggtcgcatgctgttcgctcccgttcccgacttcaagccggtgtcggccatctgcatcctcgcgggagccgtg

SEQ ID NO: 9813 - DNA, 1045 bp, Unknown
  gut microbiota DNA sequence
cgaggcctcgcgcccggcgttgcgccagatcatgccgaccgtggtgttggcggctcttgcggcggcaggtcgcatgctgttcgctcccgttcccgacttcaagccggtgtcggccatctgcatcctcgcgggagccgtgttcggccgccgcagcggctttctggtgggcgcgctcgcggcgctcgtgtccaacttcttcttcggccaagggccgtggacgccgtggcagatgtacgcttggggcctcgtaggctacctggccggcgtcctggccgaccgtggctggctcgaccggctgcccgtgctgtacgcttacgggttcctgtcggccctgctgtacggcctgctgctgaacgggtggtacgtcatcggcttcgtgcagccgttctcctggccggccgcgctcgtcgcgttcggcgccgcgctgccgttcgacgcgacgcatggcgtggccaccgtcgtgttcctcgcggcgctctacgttccctggcggaaaaagctcgagcgcatcaagaggaagtacgcgctgatctgacggatgccgccgattgcggcgcggcggccgtgcgcgtgctacaatgcctcccgatcatcgaagaagggagctcccatgccgccactgtccagctcgaagcgcgaagccgtcgccgccctcaagcgcggcgaggcggtcatctttcccaccgagacggtgtacggcctgggcgtgtccgtcgaggcggcggcgagccccgaggcgctctacgatctgaaggagcgcgaccgcggcaagcccgtctcctggctcgtgggcggcgtcgacgacctcgaccgctacggagcgcacgtgcccgacctggcccgacgtctggcacgagcgtactggccgggacctcttacgctcatcgtggaagcgagcgacgccgtgcccgcggccttccgctcggcggcgggctccatcggcctgcgcatgcccgacaacgatacggcccttgagctcatcgaggcggtcggctgcccgctggccaccacgtccgcgaacatctcgggtctgcaagcgccgggg

SEQ ID NO: 9814 - DNA, 235 bp, Unknown
  gut microbiota DNA sequence
tcgctacggagcgcacgtgcccgacctggcccgacgtctggcacgagcgtactggccgggccccctcacgcttatcgtggaagccggcgacgccgtgcctgcggccttccgctcggcggcgggctccatcggcctgcgcatgcccgacaacgatacggccctcgagctcatcgaggcggtcggctgcccgctggccaccacgtccgcgaacatctcgggtctgcaagcgccgggg

SEQ ID NO: 9815 - DNA, 211 bp, Unknown
  gut microbiota DNA sequence
gatcagcgacggtccgggataggcctcggcctcggcgatggccttgatggtctgggccggcttggcgcccatagcaacctgcgccacgtacacgtagccgtacgccatcgcgatctcggtgaggctcttcttcttgacgtccttgcccgcggccgcgaactgggcgacctggccgatgttggttgccttcgaagcctgaccgccggtgttg

SEQ ID NO: 9816 - DNA, 781 bp, Unknown
  gut microbiota DNA sequence
tcgacgaggccaagctcaaggccgtgctcggcgacgatttggccgcccagctcgtccaagcggcttcggcgagcgacgacgcggcgtggatcgccgcccatccggacgcctacgccatggacggcgacgcggtgcagtacaagctgctcaagctggccgccgtcgagcccgaggccgtgcccttcgtgcgcacgttccccgacgcctatccggccgagagcgcccttggcacggacgatcccgcctccggcgaggtgccgcgtctctaccagtgggatcagcgctggggctccaccgtgtacagctccacgacgttcgcgctgacgggatgctgccccacgtcgctttccatggtgtaccagggcctcaccggcaagggcgatctgtcgccttacgatatggggaaacgcgcgagcgacggcggctttgagacggcgttcgacggcaccgactcctcgttcctcgtgagcgaggcagcctcgctcggcctttcctgcgaggcgctctcggtcgatgcgggcagcgtgcgcgcggcgctcgaaggcggcgccgtgctcgtctgcaacgtcggccctggagacttcaccgacaacggccacttcttcgtcgtcaccggcatcgacggcgacgggaacctgcgcatcaacgatccgtactcggccgagcgctcgaacagagcctggaacgtggacacggtgctcggccagacgaaggcgctgtgggcctaccggctggcctgaggacgcgggtgcgcgtgcgggcaatgcgtcttcgcccgtaa

SEQ ID NO: 9817 - DNA, 1306 bp, Unknown
  gut microbiota DNA sequence
cgaagcgcgcgccggccgtgcgtggtacaatgcccccatgactgaccaaacccaaatcaccctcacggccccccgaagcgtgaacatggcgctcatcgtcggccctgcggacgagatcctccatgtcgtgcaggatgcgttcgcctcgcggatcacggttcgcggcgacacggtcgagctcgtcggcgatccgctggaggtgcagtcgctcacggcgctgttctcggatctcatcaagctcgtggaaggcggcggcgagcctacgctcgagtacgtgcggcacgccatcgacctgttgcgcacggccgagttcagcccgcaggcgctgcgcgaggacatcctgctcacgtaccgcggccgggccatccgtccgaagacggcgggccagaagcgctacgtcgacgccatccgcgagcataccatcacgttcggcatcgggcccgcgggcaccggcaagacgtacctcgccatggccatggccgtggctgcgctcaagcgcaaggaggttggccgcatcatcctcacgcgccccgtggtggaagcgggggagagcctgggctttctgcccggaaccctcaccgagaaggtggatccctacatccgcccgctttacgacgcgctgttcgacatgaccgacatggagcgcgccacgcagctcgtcgagagcggcgtcatcgagatcgccccgctcgcgttcatgcgcgggcgcaccctgaacgacagcttcatcatcctcgacgaggcgcagaacaccacgcctgagcagatgaagatgttcctcacgcgcctgggcttcggctcgaagatggtggtcacgggcgacgtgacccagctcgacctgccgcgcggcgtctcgggcctcaaaggcgtgcgggccatcctcgaggacatcgacgatatcgcgttctgcgatttcaccggcaaggacgtggttcggcattccctggtggccgccatcgtctcggcctacgatcaggcaagcagaaaggcttgaggtatcatggatatccagatcaactacgactaccgcaaagaagacctcgagaagctgccgctgcacgagctgacccagttcgtgctggcgcgcgaggacaagcccttcaacaccgaggtgtccatcagcttcgtcaccgacgaggctatcgccgagctcaacgagcgctaccgccacaaggagggccccaccgacgtgctctccttcgagtgcgacggcgtggacgacgacctgtcggccatgacgctggcggaggatcccgtctacgaactgggcgacgtggtgatcgcccccgacgtggccagccgccag

SEQ ID NO: 9818 - DNA, 293 bp, Unknown
  gut microbiota DNA sequence
taccgacgtgctgtccttcgagtgcgacggcgtggacgacgacctgtcggctatgacgctggcggaggatcccgtctacgaactgggcgacgtggtgatcgcccccgacgtggccagccgccagacgcgcgagttcggcaccacgttcgaggaggagatcagcttgctgctcgtccatggccttctgcacctgtgcggctacgatcacatcgaagatgacgaagccgaggtcatggagaagcgcgaggccgagatcctcgaagcctggtccaagcgctgagatcgggggaggg

SEQ ID NO: 9819 - DNA, 2477 bp, Unknown
  gut microbiota DNA sequence
cggttctcgctcggacgcgcgttctcgtgcgcatgggaaggcgtcgtctacactgcgcgcacgcaacgcaacatgaagatacatttcgcggtgggcgccgcggcagtgctgctcggcgccgcgctcggcatcgacgcggcgtcgtgggcggccatcgtcatctgcatcgtgctcgtgctggccgccgaatgcctgaacacggccgtcgaatcggtggtcgacctcgtgtcgcccgactacgccgagctcgccaagcacgcgaaagactgcgctgccggcgcagtgctcgtgtgcgcgctgggcgcggtggcggtagccgccgccgtgttcgtcccgcgccttgcggcgctgttcgtctaacgcatcggaaacattggaaggcttttcatggacaacatctatcccgcagtcggcgattcgttcaagtcggggttcgtcacgctggtcgggcgcccgaacgcgggcaagtccacgctgatcaacgccattatgggcaagaagatcgccatcacgtcgaacacggcgcagactacgcgccatcgctttcgcgcggtgctcacgcgcgagggcttccagctcatcctcgtggacacgccgggcctgcacaagccgcacgacgccctcggcgaggagctgaacacgtcggcgctcaaggcgctcgaggacgtggacgtggtcgccttcctcgtggacgcgtcgaagccggtcggcacgggcgacgagtgggtggccgctcagctcaagcgcgcgcgctcgaagaagatcctcgtgctgtcgaagatcgacctcgtggacggcgagcagctggaccgccagcgcttcgccgcagcccagctgggcgattgggacgccgtggtggaattgtcgagccagacgggcgagcatgtgcaggatttcgtcgacgaggtggtggcgctgctgccgccgggtccggcgtggttcccgaccgatatggagaccgaccagcccatcgaggtggtggtggccgagttcatccgcgagaagatcctgcgttcgttccacgacgaggtgccccatgccatcggcgtgcgcgtggaggagatggagtacgatcgcaagaaggatctctaccgcatcttcgccatcgtgtacgtggagcgcgacagccagaagggcatcatcatcgggaagaagggcgcggccatcaagcagatcggcaccgaggcgcgccaggacctcgagcagctgctgggctgccgcgtgttcttggacctgtcggtgaaggtgaagaagaactggcgccgcgacgcgaaccagatccgccgtttcggctacggcgaaggggcttaagggctctgtctgcccggccgccggcggccggaacggctcggcgcttatcgccgatcggctgcgccaacctggaagctcgccttttttctgcaggtattgtcacgaagcgtgcaaacggggcgttgtccggctgcgctcggcccgttttcggctacaatcgtcgtatgtgccatttgcgcgagggagaaagccagcatgatctgtccgaactgtcaatctgagaacaaagacggcgcgaaattctgcaacgattgcggatttcccctgaccggccgtatggcggccgtcgccgcggcgtccacgagcgatgcgacgctgcgctcgatcgcggctgacgacggccccgaggatgcgcaggccggcgagtccgatcccgacttcgagggcacggcatccgccgtcgaacccgagtccgccggggaacccgacgcttcgggtccgctcgatcgttcgagcatccccgccatcgacgtggcgggcgtgaacgtcaacgagaacggcaacgcgttcgacttcggctccatcggagacgacgaggccgcgcgcgctgccgacgatctcacgccgttcgtgccccgtcgccccgacgaagagccgatctccggtcgctccgatttctcgggcttcgacgaatgcctcgtcgatgcgggctacgtgcccccgaagaagtcgtgggggccgggcgataccatggagatgccgcgtatcgagggccaggccgcgcccaagcaaaaggagttccgcgcacctgatgccaaccagaagaagggcggcaagggcaagatcgtggccatcgtgctcgtatgtctgctggccgtcggcggggcggccgcgggcgtcacgtactatctggagctatggggcggcaagatgctgcccgacgtcgtgggcatgacccagtccgacgccgtctacgttttggagtccaagggcttcgccgtgcacgaggaaaagatcaagtccgacgacaccgagggcgtcgtgctgctgatggatcccgtcgccggctctcgcgaggaggagggctccgaagtcaccatccatgtttcggaggcgcgcacgatccccgacgtcgcgggcaaacagcgcgacgaagcggcggctctgctcgagaaggacgggttcgagaaggtttccttcgtgaccgagaagtcgaacgagcgtga

SEQ ID NO: 9820 - DNA, 242 bp, Unknown
  gut microbiota DNA sequence
aagatgctgaccgacgaagggtacgaaccggtggcgagctacgtctacgacgacagcgtgcctgccggtaccgtgctcggcacgacgcccgaaaccgacgcgaaggccgactccggctctacggtcaccgtgtcggtcgccttgtcgcgcggcgccgagttggagcaggcggcgctgtcgtatctcggcggtttgcgcgattcgggctcgaccgtcacggtcggcggcacggcctatctggt

SEQ ID NO: 9821 - DNA, 1208 bp, Unknown
  gut microbiota DNA sequence
agaccacgtcgttcaccatcacgggcaaggcggtgacctcgctcgacggcgaaaccgtgtacggctcctccaagcagaagagcggtgccatcgtttggacgagcgacaacgccatcgccagtatctcgtagcgcgcgtgtcccagcctacctacgacgcgcgcgccatcgtgctgcgcaagacgaagctcggcgagagcgacctcatcctggcgctgctcgccgaggacggctcgcagatacgggccgtagcgaagggcgcgcgtaaacccgccagctcgttcgcggcgcgcctcgagctgtactcggtcgtcgacttgctcgtcgcgcgcgggcgcagcctcgacatcgtgaaggaagcgcggctcgtcgagagcaacgagcgtcttcgccgcgacattgagcacgctgccggggctgcgcccattgccgaactgctcgaccgcgtcacgcagatgggtctggagaacccgcggttgttcgcgctcacgcgcacggcgctgtccagcctgggtcgggtcgatcccgcgcaggtgccggccgtgtgcgcggcgcacttgctcaagacgcttgcgttcgcggggttgcgccccagcctcgatgtgtgcgtctcctgcgggcgcgacgtggaggcggttcccgaaagcggactcatggcgctctcgtaccaggagggcggggcggtgtgcgccgcatgccggtcgagcgtggagacggtgctcgtccctgcctctacggtcgcgtggtgccgggctctgctgagctccacgttcgccgagatcgagattctcgaggcggatccttccgccgcgttttccgtgctgcgtttctgccagcaatgggtgagcgagcacgtcggggcaaacttgaaatcgttgaacttcctgttcacttgcggattgttctgaaagatgcgggcgggacccgcgaagaggaggagagaggcatgtaccgttacaccccgcgcggcgtatgctcgcgcgcgatcgatatcgacctcgacggcgacaaggtggcgcgtgtcgagttcgtcggcggctgcgacggcaatttgaaggcggtgtcgaggctcatcgagggcatgacggtggaggacgtcgccgcggcgcttgagggcaacacgtgcggtcgacgcgcaacttcgtgcgccgaccagctggtgaaagggctgcgcgaggcgcgtcaagcggccgtgtaggcccagatcgc

SEQ ID NO: 9822 - DNA, 343 bp, Unknown
  gut microbiota DNA sequence
ctggtgaaatcgcccggtcccacgctgcaaatgacgggggagccggacaggagagcgcggcgaacgctctgctcgtctgcgggcacttcttcggcgacgaggccaagctcggccgcgccttcggtcatgaacgtccaggcggtgccgtcgggggtcgcgcatccgaggcgctcggagaacgcgcccatgtcggccggtgtcatgtcggtgcggccggtcagcgccacgtacgccatggccatgcacgtaggcccgcaaccggtggttccgaagtcgtcttctgcgtaggttccgtcagcccatgcgggatcgcgctggtacagcgcgggcacctcgccggcct

SEQ ID NO: 9823 - DNA, 159 bp, Unknown
  gut microbiota DNA sequence
tcggatgcggcgtgcgtgcggctttcgggagcgcaagcgcggcgtatgggccgagcgcgataaacggagcggttcgggcgaagccttgcatcgaaggaattggtgtacggcacggggagcctcctcgaaagcgttggatacggggatagcgaggcgtcg

SEQ ID NO: 9824 - DNA, 197 bp, Unknown
  gut microbiota DNA sequence
gcgtgttggacggcgcggagaacaacgccacggccgtaggcaggtacgcgtcagacttccagaacgaggtgctgctgtcggacttgtcgatgcccatgacgatgtcgaccgttccctctttgagagccgattcggcatccgatcccacgttgacgacctcgagcttcagcccgaagctgtcagccagcgccgccgcc

SEQ ID NO: 9825 - DNA, 473 bp, Unknown
  gut microbiota DNA sequence
aaaagagttggaattgatacagcaaaacctgtccaaatatctcaaacaggatgctcctaaaatacaaagatcttctcataaccaactcccttctttgtaaaaccataataataggcagcgatttcactcgctgcctaaattcccattaaaccgatatcctacaccgcgcaccgtttgtatatataacggatgaccaggatcatcttctatcttttctctaatgttgcagatatgtcgcataaccacattataatcaccggaatagggttcattccatatgatatcatatatttgttctttgctaaacactcttccgggacttcgcattaataaatgcaaaatttcaaactctataaaagataaatctattttttcctgctttcgaaataattctcttttagccaacaaaataacaatatctccataactcaaatttgtttttgcattttcaattacttgaaatgctcttgctc

SEQ ID NO: 9826 - DNA, 207 bp, Unknown
  gut microbiota DNA sequence
ggctgctcgtcgaataccgagcaacaagccggcgagacgcagaagcccgccgaagagcaggccaagtcggagagccatgaggccgtggagctgcagctgttcgccgcgaactcgctgtcgaaggccatggacgctgtacaggagctgtacacgcaggatcatacctgggtgacgttcaaggacacgcagtatctgtcttcgggcgag

SEQ ID NO: 9827 - DNA, 317 bp, Unknown
  gut microbiota DNA sequence
cgggtagccctcgtagttcaagtcggccgggatgccgccgtgctccaccgtgtagtcgtgcacccagcggtccacctcctcggtggtcgtgcccggtccgatgcgctcggccacgtagtccagcaccccgatgttgatggtcgcgctgcgcttgatgccctctatgtcggcagcgcttttcagcgaggcgcggtcgggcagttcgaagccctgctcgtacatgctctgcaggcgctcgtcgaaagcgaggtggcacttcttgtacttcttgccgctgccgcaccagcattcgtcgttgcggcccgggttggttcgtc

SEQ ID NO: 9828 - DNA, 223 bp, Unknown
  gut microbiota DNA sequence
gcaagcaggaagacgctgaccgaagccaccagcgggtcgatcccgggcacgaacgagaggacgaccgcagccagagcgggcaaggccaggaggcgcataaaggaaacgatgtaagcccatttgtctctcaccacatccgacagcttcatgcgcgacatttcgtagccgattatgaacatggccagcggcgtcatcatagaaccggccatattgaacgcgtccg

SEQ ID NO: 9829 - DNA, 262 bp, Unknown
  gut microbiota DNA sequence
cacgtgaaacatttgttcccatgtcgcacgtcattgcgacgaagtgtttcacgtgaaacgtttcgtcgctttgcaggtcgaacccatacgtcagcgagaagcgccgaggtgcccgagatcgcggggatggcgaggacgaagcgcgccccgaaggaagtccccgtaggggatacttcggtacgcgagccgccggcatcgccgcgagatcgggtgcatcggcgcttcgcagcgtcgagtcgttccgccgttcgacagaacggcg

SEQ ID NO: 9830 - DNA, 259 bp, Unknown
  gut microbiota DNA sequence
ggcgaacacggcaacgggcgccgccgccagcagaagcgagttctgcgtgcccagcgcgctgccgcgcgacgcttcgggaatgcgatcgagcatgaagaagcccagcagcgccgacgcgggtccggcgctcacgcccagcacgagcgcgcccagcagcatgaacggatagggaggcaacgcgcccagaatagccacgcccaacagcatgccgaacatcgacagcacgtaccatgtccgacgcgacagacgcggagcgaac

SEQ ID NO: 9831 - DNA, 145 bp, Unknown
  gut microbiota DNA sequence
ccggcatgttgtacgccatcgcggcgaacatcgtgttcaacatcacccttttcagcttcggcatcgcggttttgcaggacaaggcgaagcccgatatcaagggcattctgctgaacccttgtctgatctgcaccgtcgtcgcgct

SEQ ID NO: 9832 - DNA, 232 bp, Unknown
  gut microbiota DNA sequence
tcgaacgatgaaaccgccctcgggcggacatgaagtggcgaacgggtgagtaacacgtgaccaacctgcccccctctccgggacaaccttgggaaaccgaggctaataccggatactccctcccctgctcctgcaggggtcgggaaagcccaggcggagggggatggggtcgcggcccattaggtagtaggcggggtaacggcccacctagcccgcgatgggtagccgggtt

SEQ ID NO: 9833 - DNA, 242 bp, Unknown
  gut microbiota DNA sequence
ccgcagaacacgccgatggtcaccgggttcgtgacgatggacagcaggtccatgcccgtcagcaccacgctggcgttcgagaatgcgaacagcggcaggatgaagaagtacacgggaatgtgcaggcgatggtcgaggcgcgtgataggcgggatggacaggcgcgacacgcggccgatctcggccacctcggacaggtactccttctgcacgatgtcgggctcgccggggtcgtagcgatc

SEQ ID NO: 9834 - DNA, 275 bp, Unknown
  gut microbiota DNA sequence
taagagaaacgggctggttgtcgatctgtgcaacttccagctggcggatggaagcccccttatcgcctacccaagaaacaacggatggaaccagcagttccatttcgactgcgccggcaccctggatacggatctctccaccttgccggaagaggctgacgacccgtacgacgacgaaacgctttgcgcagacggcggtagcacgaagcccctcagctttttcgacctcttcaaaaccatcgaacccacgttttccctcgaccagatgaccgaca

SEQ ID NO: 9835 - DNA, 213 bp, Unknown
  gut microbiota DNA sequence
catcgagctggcgttcatctggatcgtcgtgttcctcagcttctcgaaggtgtcggactcggcgtggatcctcaacatggccgccgtgctcaaggtgggcatcgcgctggtggtgggcggcctcggcatttggtacgccgtgaacttcggcttcgcgaacgacatggcgcccgagacgttcctgccggcgctcgactcgaacagcctgacgta

SEQ ID NO: 9836 - DNA, 272 bp, Unknown
  gut microbiota DNA sequence
tcgttcggcatgcctcccgtcagctcgacgttcgcaaacaacaccatctcggtgcccgcgggagagacggcctccggcacgctcacgttcgacgaccgctactcctcgcagcgtttgttctggaacgacggcgccaccgaagctacctggctgctcgatcaaaccccggtaaccgcagagccggagccgcagcccgagcccccggcagagcccgcaacgcccgagcccgccgaggatccgcaggccaaggccgtcgccgccgtggaagcggc

SEQ ID NO: 9837 - DNA, 175 bp, Unknown
  gut microbiota DNA sequence
cagatcgtgctggtaggtgcgggcgtcgtggaagaaccaggagtcgtcgaacgtcagctgcgtggatgttcgccctgacgggttgttcgggtcgagggcggctaccacctcgctgcagtattcggcggtgacggtggtgcgcggggaagcggggacgtgcgcgacgaccgcgttt

SEQ ID NO: 9838 - DNA, 178 bp, Unknown
  gut microbiota DNA sequence
cggcctggcgctgctggccgcccgcgccttcgcgcgccgcgacgtgttcctgctggaatcggagcacatcgccgcgaagcccattcccgtggaggtgcacgtgcgcgccatccaccagcgcatccagaacaagaagacgctgcgcttctcggaactggtggacgagcgcacgccggtg

SEQ ID NO: 9839 - DNA, 3953 bp, Unknown
  gut microbiota DNA sequence
cgtcggcctcgtcgggcgccacggccaccagcaggccgccggacgtctgcgggtcgcacagcacgcccatgcggttctcgaactcctcgtcttcgaggccgccctgcctcacgaaggcgcgcgcccagtcgataatgccgaacgtcttggcagggcggcagaagtcgcaggaataccggtagacgcccttgaacagcggcaggtcgtcccagacgagctcggccgacgcgtccgaggcctccagcatctcgtggaggtggccggccagcccgaagcccgtcacgtcggtggcggcgtgcgcgtgcacggccgccatcgcctcggcgcccgcacggttgagctccatcatggactcgatgacggggcgcatgccctcgtcgtcctcgaacccggcccggaacgccgagttcatgatccccgagccgaggaccttcgtgtagaacagcgcgtcgcccggctgcgcgcctccgttgcgcacgatgcggtcagggtgcacggtgccgaacaccgacaggccgtacttcggctcgtcgtcctcgatggagtggccgcccaccacgaacgcgcccgcctcgcgcaccttgtcggcgccgccgcgcagcacgtcggccaccacgtcggtgcccaggctgcacgggaacgcgaggatgttgagcgccgtcagaggcttcgcccccatggcgaacacgtcggacagcgcattcgccgcggcgatggcgccgaactcgtaggggtcgtccaccaccggggtgaagaaatcgagcgtcagcacggcggccgtgtcgtcgttcagacggtagacggcggcgtcgtcggacgtgtcgaagcccagcagcaaatctgcgtcgggcggcggcgcaatgtccttcagtatctcttcgaggtctcccggaccccacttcgccgctcaaccgcccttctcggtaaggcgggtgagacgaatgcgctctgtctcgctcatgggactcctttcgcatgcgacgaatcggtcgtttctcgcagtatagcagtccgtcccgtcggccgttcgtcccgcctccaaggcgtcatgcatcccgccttcggtgccgtacccggatcgcgctggccgttcgccggaaccgcctatgccgttcgcagccggaaagcgaccgttcgttttgcctcttcaaggggaagtatgacgtttaccgaatattctcgaatagatcacgggactttgcgcataaaacgggtcgcctcatcagaaactgatgatgtcgcatccgatggagcttgttaggattgcggcggtcgagcggtggagggctgccgactcggccacggcatgcatgtaccggtaccacgagcaggacgacgtctccccatgccctcggcgacgttctcccgctggtttcgggcgcatgaggttctcaagggacgagaagacaagaaggaaggagaacgaggacatgaatctgtcacgcaggggctttttcaaagccgccggcgcagcgttcgccactaccatggcgttcgagctgtcctcacagtcggaggcgctggccgtcgagcccgcagccgactggaagctcgtgaacacggaggagtacacgaacatctgctgctactgctccggcggttgcggcgtgatctgctccacccgcgaaggcgagctggtgaacatcgaaggcgatcccgaccacccggtcaaccagggcggcctgtgcccgaagggcgccacgatgttccagctgcgcaacgtggtggatccctccacgcgcgaggtgatcaagaacccgaaccgcaggacccgtccgatggttcgacgccccggcgcctccgagtgggaggatatcacctgggacgacgccgtcgccgagatcgcgcgttgggtcaaggacacgcgcgacgccacgttcgaaacggtgtccaacggcatcacggtcaaccgttgccacggcatcgccagcttgggcggcagccagcagaactccgaggaagagtacctcatcaacaagatgatgcggtcgctaggggtgatagccatcgacaaccaggctcgtgtttgacacagccccacggttgccggtctggcagcaacattcggtcgcggttcgatgacgaaccactattgcgacatgcagaacgccgacgtcatcttgacgatcggctccaacaacgtcgagaaccaccccgtttcgtcgaagtgggtgcagagggcgcttgacaacggcgccacgtggatcgtcgtcgatccgcgctacacgcgctcggccgagatggcggacatctactgtcctatccgctcgggcaccgacatcgctttctacggcggtctgttcaactacattctcgagcacgacctgtggcagcacgagtacgtgctgaactacacgaacgcgtcctacctgttggacgaggagtactccttcgatgtggagacgggcatcttctcgggcttcgacaaggacagcgccacctacgacgcgaagacctggcactaccaggtggaatccacgaaggagtgggacacctcggagggcggcgcctacgcctgggccaaggccgagggcgtgcccgagttcacgcctcccaccgtcgaagtgccgaagcgcgacatgaccctgcaggacccgatgtgcgtgttccagcagatgaagaagcactattcacgctacgacctggacaccgtgtccgccacgtgcggcatggacaaggagcttttggagaaggtgtacgccacctacgcggccaccggcgctcccgacaagtccggcaccatcctgtacgcgctcggccagacgcagcacacctacggcgcgcagaactgccgctccatgggcatcctgcagcttctgctgggcaacgtcggcgtggccggcggcggcgtgaacgcgctgcgcggcgagccgaacgtgcagggcgccaccgacatgggcatgctcgtggcgaaccagcccggctacctgaactggcccaccgagtacggcacgccgtctctgcgcaaatggtgcgagaaggagacgtacgcggacggttactacaccaacaagccgaagttcatcgtctccgcgctgaaggaatggttcggcgacgcggccaccgtggagaacgactacggctacgactggtggccgaaggtgccgaagagccccgactactccatcatcggctcgttcgagctgatgagccagggtatcatcaagggctacttcaactggggcatgaacccctgccactcggcgccgaacgcgagcaacgtgcgccgcgccatggcgaacctcgactggctcgtggtggccgactgggtggagacggagtccgccaccttctggaaggcccccgacatgaacgccgccgacatcgacaccacggtgtacttcctgcccgcggcgctgatctacgagaagccgggcaccatcctgaactctggccgctggctgcagtggcgctaccaggccgtcgagccgtgggaagacgccaagcccgactacgagatctgcgacgtgctgtggaaggccatcgtcgacctgtacaagaaggaagacggcgtggctcccgagcccgtcgtcaacacgaagtgggactactacgttgacggcaagatcgacccgcgccccgtggcctgggccctcaacggctacaactacgccgagggcggcttcgagaacggcgcgcccgatttgctgagcacgttcgcgaacctcaaggccgatggctccacggcctgcggcatgtggatctacaccggcttctgggccaacaacgacgctccgctcgacccggccgagcaggccatcggcagccgcgtcgccgacgacccgacggggctgggcctgcatcccaagtggtcgttcgcttggccgctcaaccgtcgcatcatctacaaccgcgcctcggcggatctggaaggcaagccctggaacccgaaccgggtgctggtcgaatggacgggcgagaagtgggtgcagaacgacgtcggcgacttcgtg

SEQ ID NO: 9840 - DNA, 2052 bp, Unknown
  gut microbiota DNA sequence
gctgcatcccaagtggtcgttcgcctggccgctcaaccgtcgcatcatctacaaccgcgcctcggcggacctggaaggcaagccttggaacccgaaccgggtgctggtcgaatggacgggcgagaagtgggtgcagaacgacgtcggcgacttcgtggccgtgtcgaacggcacgcccgtgccgcccaacaacaaggcgttcatgatgctgtgggagcagaacgcgcgcctggagagctacggcatgggcgacggtcctttgcccgagcactacgagcccttcgagagcccggcggacaacaagctgaacggacggcagaactcgccgtgcgtgcgcttcgccgagttcgagtcggtcaagcgcggcgaccgcagccagtaccccatcgcggtgaccacctattcggtcaccgagcattggcagaccggcggccagacccgcacgtgcccggccctcaacgaggccatgcccgagcagttcgtcgagatgtcggtggaactggcggccgaaaagggcatcgagaacggcgagcgcgtccgcgtgttcaacaaccgcgggtcggtcgaggtcatggcgctggtcacgcctcgctttaagccgttcaaggtgaacggcgagaccgtgcaccaggtgggcatgacgcaccacttcggctgggcgggcgacttcgccaccggagacatcgtcaacgacctgccgccgaacgtgggcgacccgaactgctgggtgcccgagtacaaggcgttcctcgtcgacatcgagaaggcataggaggggtgagctatgagtgagaaagccatattgttcgactcctcccgctgcaccgcgtgccgcggctgccaggtggcctgcaagtgctggaacggcctgccgtccactctcgagaagaacgggaacccttccacgggctcgtaccaaagcccgatggatttgaacggcgacacgcgcctgctgatcagcttccatgaggaggccggcggcgacaagggcgtgaagtgggccttcgggcgccgctcgtgccagcactgcaccgacgccccctgcgccaccatctgccctggcggggcgctgaagaaggacgaggccaccggtttcgtcagcgtggacgagtccaagtgcatcggctgcaggtactgctccacggcctgcccgttcgacgtgccgcaataccacggcgacacgagcaagatcaacaagtgcaccggatgcctcgaccgcgtcgagcagggcctggctccggcgtgcgtgaccacctgccaaccgcaggcgctcatgttcggcgatcgcgaggagatgctttccatcgcccgggaacgcgtggactacctgcacggcaagggctatgcggacgccgccttgtacggtgaggacgaggtgggcggccttcacgtgatccaggtgctgaagcacggcgtggaagcgcacggccaggtcgtcgacccgcaggtcaacccgatggtcggcctgacccagatcatgaagccggtcacgggcgccgtcacgggcctcacggttgccggcttggcggccatgttcgtgctgggcatcggctacaagcgcgacaagctggcgtacaaccccgagacggacgacacgatctccgtcgacaccggagaggtcgtcaagcacggtgacggccaggacgaggagacggtgatggagcatatcaccgagaaccttccgggcaagaagggaggcaaccgatgagcaagggacccgtcaaggtttccgctgaggaagccgccaagaaccaggcgttcttggcaagcatggcagccagcggcaaggaacgctacatcaagcgccactcgctgcaggcgcgcttgacgcacggcatcaccatcgcggcgtgcatcctgctgtgcatctccggcctgttcgtgttcgttccggccctcgcggccgctgtcggcgcggacacggtgttcgccattcgcatgtcgcatcgcatcatcggcgtcgtgttcgtcgcggtgccgctgatcagcgccctgctggctccgaagggcgtggcgcacatcttcaagaacctgttcgatcgttgggattcc

SEQ ID NO: 9841 - DNA, 2550 bp, Unknown
  gut microbiota DNA sequence
ccgcatgtcgcatcgcatcatcggcgtcgtgttcgtcgcggtgccactgatcagcgccctgctggctccgaagggcgtggcgcacatcttcaagaacctgttcgatcgttgggattccgacgacaagaagtggatgatgctgttcttcccgtacctgttcatggccaagtggatccacatgcccgaccagcgcgaggtcaagagcggccagcgtttcgccgacggcatgctgtggttcgccggagcgctcatgggcatcacgggcatcatccttctgctgggcacgacgctgttcgatttcggtgcgggcgtgcacggcgtgaccctgttcctgcacgacataggctttctgctgatcgcggtgttcggcctggcgcacatcttcctgggcgccggcatcttccagccgtaccgcggcacggcgaagctcatgttcggcgacggcacggtgtccgagtccgacgccctgtaccactggggtcactgggcccgcaaggagatcgccacgggcgagaacgtggtggagaagacgaagtaaaagcgcggcgacccgttcgtgccgccgcgaatcgcggcggcacgggcgccgggtgggtaacccgaccggacgctcccgggttgtcatcctgagcggagcgcgaagcgcggagtcgaaggatcccgcgcggcgccagctggaagcgccgcggctatcgccgcgcgggatccttcgactccggcctgcgctcaggatgacaaaaagggcgttccgcccgttcagataggaaaggaatccatgaacctcaaagcgatcgatgcggccatcgccgcgtaccgtacgaacctcgacgagggcgacgtctcgcggctcgcgttcttccgcgagctgtggggggttcaggccgaggcggcctcccatgttgatctcggctacgaagtgcccgacgccgatagcctgaaaacgtgggcgcgccacggggagccggtgctctcccatgctccggtgaagatcgaggccgccgcgttggcgggcgcgatggagcggctggccgaagtgctggctgcgcgcggcgggttcgcggcgtcgacgagcgaggcgctctcgcgcacgagctgggagcgcatggtcgccgcaagcgacctcgtgctcgccggctgcaacccggctgcctatgtggagtcgttcgtcgagctgctcgaggacgacggcatggacgaggacgcggcccgcatcggcgcgatggcggcggcgctggccctgcgcgcgtttctagagggtccggcgacggccgtcgagcgggcgcttcgggaggcgggtgccgacgagccgcatagcgtgcgctgccccgtgtgcggcggcgaagctgcggtggcgcaggtgagcggcgcgcctgcggggcagggacgcgccaagcgcctgtggtgcgcccagtgcggctgcgcgtgggagttcgagcgcgtgcgttgcgtgcgctgcggcacgcagaaccagagccgtctgcattatttcaatctcgagggcgacgaggcgcaccgcctggccacctgcgacgaatgcggcggctacacgcgcaccgtgtacgaggaggacgcgcttgcgccgttctcgttcgaagtggaggacgtggtcatggcgaagctcgacctcgtggcgtaccagcgcgcggccgccgatgccgccgcggaagcgcagaggtaggacgatggccatcgtagagcgtcccgagcccgcgaagcgcgagtcggccgagcggcccatccgcatcttcctgaacgaggtgcctgtggccgtgagccagggaagccccttcgggctgtccgagctggcggtgggctacctgttgtccgagggcctcatcgccgatcgcgacagccttgtggaggtggtcgaggtgcccgaggaggctgcggtgtacgtggccagcggagagcgggcggaggaaggttacgtgcccctgcaccgcgtcacgtcggccgggtgcgcccagtcggcgcttctgcgcgacgcgcggcgcgcgggcgagccccgcgcgttggagacggcggcgcgcttcgacgccgacgacttgctggcgtgcatggaggagctgtgcgagcgcagcccgcgccgcaacaccggcgcgtgcgtgcacggctgcgggctgggtgcggcgggttcggacgagctgctgctggtgcgcgaggacatcgggcggcacaacgccatggacaagctggtggggcaggcgtggctcgaccgtgtggacgtgcgcgacaaggcgctgttcatcacggggcgcatcagctgcgagatggccctcaaggcttatcgcgccggttgcccggtgctggtcagccgcaagtcggctaccgacgaggccgtgcgccgcgccgaggagctgggcgtcaccctcgcgtcgcactgccgcgacggccgtatccgcgtcctgtcgcgttccgagcgcgtgacggggtagggggatcggcccctgcgggcgatccatccggtttcgccgtgcacgcgcccggtttcgccgtgcgccttgaccgcgcccgccggttgcctttgaattgcccagacggcgcgcggcg

SEQ ID NO: 9842 - DNA, 742 bp, Unknown
  gut microbiota DNA sequence
cggctatctcgcctggcaacggcagcaggcggccgatgcggtgcgcgcggtcgagcgcgagccgctgccggcggtggagcgcgcctacgacgcgcctgcggacgagccggcggagaatcctatcgacttcgaggcgctgcgccgggagagccccgacgtctacgcgtggctctacgtgccgaacacgaacgtcaaccttcccgtgctccagcggccgggagacgacttcttctacctcgatcatgaccgctacggcgagccggccgtcgaaggcgcggtgttttcccagatggcgaacgcgaccgacttctccgatcccgtcaccgtgctgtacggccacaacatcgtgaacgacgcgatgttcgccacgttgcatgcctacgaggacccggcgttcttcgccgacaaccccgagctgtacgtttacctgcctgatcgcatcctcgcctacgaggtggtggcggcctacgagtacgacgaccggcacatcctcaactcgttcgacttctccgaccccgccgtgcggacgggctacttcgcatcggtgctcgcgcccgacgacccgaaggcgaacgtgcgcgacggcgcgcagctcgatgccgacgaccgcatcgtgcagctcagcacctgccgctcggccctgaccagcgacccggtgcgctatatcgttacggccgtgctcgtgggcgagaagcctgctgcgtgagctgcgcccccgctttcgcaataggcggagcctctt

SEQ ID NO: 9843 - DNA, 4427 bp, Unknown
  gut microbiota DNA sequence
tcatcgtgcagctcagcacctgccgctcggccctgaccagcgacccggtgcgctatatcgtcacggccgtgctcgtgggcgagaagcctgctgcgtgagctgcgcccccgctttcgcaataggcggagcctctttcgtcgaaggggtcgaacggcatgtctccatgctctagcatgaggtggctgtggaatgcttgcgccttcgggtaggcgcatcgacgagagaggtgctgatatgaagaagaagctggccgcgcttttgtgcgctgcgatgctcgcgtgcgcgctccccgcgctcgcgtgggccgacgaggcggctgagccgacggcggatcaggcgaccgcgcaggagtcggccgcggcccgctcgatcgggccgtggcaggagagcgcgtcgaacgaagacggctcgtgcgtcctctctggcgaggcgagggcgtcttcgttcgccgtcatcgctacgagcgagacggccgacgacgcgctggacggcatgccctcgttcagggtcgttgccgagaacgcgaccaagaagatcgatttcggcgtggcgcttctcgcgggcggccagtacgccggttgcaacaagctcgaggtgcacgtgaagccgagcgcgggaagcgctggcatcgccaagacgttcgaagtgacgagagccgtcgaccagagcagcttcaacttcacgtccgagatgttcaacctcggcgaccaggaaggcgatgcctcttacagcgccgacttcgtcatgacgctcgtcccctcgaaggcggacgtcgacgaaccggccgccaacgagcctgctgccgatacgtcggctgcgttgccgtccggcgccgacacgggcgcgacctcgcccaagaccggcatggacgccggcgcgctggcgggcgcctccttcgccatgctggccgccgccggagtcgtggccttagcgctgcgccgcaagctcgcgaagtaaccgatgctcatcgtcgggcgggcgtgccgcaaggttcgcccgcccggtcgtcgaaaggcggccgcataggcgcttgcgcgacctcgccttatacatattctcgcaagtttctgcataaaaggggttacaaatcggctccgaaccgaatatactgcttccagtcctttaaaagcggtacagagagaccgacaaggtagaaccccaagcgctcacccgaacaagagcgcgacgagtcgaagcctttgtctgtcgcggaggcttttttcatgccctcgcgcagacgccgccaactcgggggcgacgcggacgcccggcatcgccggagcgggcgcggaacccggcggagagcaggtccgtctgtacgcactcgacgtcaagaaagggtgtgtatgaacgacgcaggaacggtcaagaccgtctgcatggacgcagacgagatcgagcggtcgctgacgcgcatcgcgcatcagatcctcgagaccaacaagggcgcgggcaacatcgcgctcgtcggcatcgtgacgcgcggcgacttgctcgccaagcgcctggccgagaagatcgaggccatcgagggcacgaaggtgccgctcggcaagctcgacatcagcttctatcgcgacgacttcgcgacgcatctctcgcccgaggtgcattccaccgacatcctcttcgacctcgacggcaaggacgtcgtgctcgtcgacgacgtgctgtacaccggccgcaccatccgcgccgcgctcgacgcgctcatggacatcggccgtccctccacggtgcagctggccgtcctcgtggaccgcggccatcgtcagctgcccatccgcgccgacttcgtgggcaagaacgtcccgtcttcctccgacgagaacgtgcgcctgttcttggaagaggcggacggcaagtccgaggtcgagatactggaaatcgctccgggctcccgcgcgggttcggcaccgctgggaggtgaatagggcatggccttcaatcacaagcatctaatcgacatcacggagtactccgccgacgacatcatgaccgttctggaaacggcggtccgcttcaaggaagtcaacgagcgccgcatcaagcaggtgcccacgctcaagggcgtcaccgtggtcaacatgttcaacgagccgtccacccgcacgcgctcctcgttcgagatcgccgagaagcgcctgagcgccaacagcctgaacttcggcggcagctccacctccacggtgaagggcgaaagcctcgtggacacggtggagacgctgtgcgcctacaagatcgacatgatcatcgtgcgtgacaagcacgccggcgtgccccgcaagatcgccgacgtctccggcgcgcacgtcatcgacgcgggcgacggcaagcaccagcaccccacgcaggcgctgctggacctctactccatctgggaggtcaagggcgacctgaacggcctcaaggtgggcgtcgtgggcgacatcgggcactcccgcgtgtgcggcagcctgatccccgcgctcaagatcatgggctgcgaggtgacggtggtcgcgccgccgacgctgcttcccgcgcgccccgacatcctgggcgccgaccacgtgaccacgaagctggacgaggcgctgcccgacctcgacgtggtgtacatgctgcgcatccagcgcgagcgcctcgagggcgcgccgtatccgtcgctgcgcgagtacaacatgctgtacggcctcacgaaggaccgcgagcacctcatgaagcccgacgccctcatctgccatcccggccccatcaaccgcggcgtcgaactggatagctacatggccgaccatccgaagcgctcggtcattctcgatcaggtctatgccggcatccttacccgcatggccgaaatgtacctgctgctcggagggagcgaagatggccttactgcttaagaacgcccacgtgatcgacccgcaggtcggtctgaacgaaacggccgacatcctcgtgcgcgacgggaagatcgtcgagatcggccagaaccttgcgatggagaagggcgtcgagcgcgacctgggcggcaagatcgtcgttcccggtctcgtggacatccacgtgcatctgcgcgagcccggctacgagctgaaggaggacatcgcctccggcacgcgcgccgcggcgcacggcggcttcacggcggtgtgctgcatgccgaacacgaagcccgtcatcgacaacgccgtgggcgtggagtacgtgaaggctcgcgcggcggccgtgggcaagtgccgcgtgcacgtggccggctcctgctcgcaggggctcaagggcgacacgctgtccgagatgggcgacatggtggcgcacggcgccgtcgccttcaccgacgacggccgcggggtgcagggcgcgggcatgatgcgccgcgtcatggactacgccgcgcagttcgaccgcgtggtgatgagccactgccaggacgaggacctcgtcggcgccggccaggtgaacgagggcgtcgtgtcgacgcgcctgggcatgctgggctggccggccgaaggcgaggagatccagatcgcccgcgacatcgccatctgccgcctcaccggctgcccgctgcacatccagcacctcaccacggcgcgcggcctggacctggtgcgcgccgccaaggccgagggcctgccggtcacctgcgaggtcacgccgcaccacctgttcctcaccgaggacgccatcggcgacgactacaacaccttcctcaaggtgaacccgccgctgcgcacggccgaggacgccgccgcgctggtggaaggcgtgaaggacggcacggtggacgccatcgtcaccgaccacgcgccgcacaacgacttcgagaagaacgccgagttcgagctggcgcccttcggcatgatcggcctagagacggcgctttcgctcgtcatcacgaacctggtggcgccgggcgtcatcagctgggagcgcgccgtcgagctcatggccgtgcgtccccgtgagatcctgcgcgtcgagcgcgtggccctcgagccgggcgcgacggccgacctcacggtcatcgacccggacgccgcctggacggtggacgccgcggacttcaagtctaaggccgtgaactcgggcttcatcggcgtcgagctgaccggccgcgccaccgacgtctacgtgggcggctacgccaccatggaggacggcgccatcgtcgagtagggtcgagccctgcacgatcttcgaaccacgcggccccgcatcgagcgaacgatgcggggccgttctgcgcgatgcccggtgcgcccaatggccatacggggcgtaagaaacgctccgatgagccgactaggcggcgcaggtcgcccgctgcggttccagatgcccgattcttcctgcaatgttgcgttgcgggggtagaagaagggcgatcctgagtgcttttgcgcgttttccctggttgcaaacgcaactgctggagaatgtccgat

SEQ ID NO: 9844 - DNA, 911 bp, Unknown
  gut microbiota DNA sequence
ccgggccctcgcttcctagtaccacgtctgcaagatcctcgcagcccagggcagacgaggaggctccaatggaacctatgcaggtttgcttctcccatcaaacggcttttcaggtgttgagggcgatcgacgcgcgggagcttgcagggtctggcgacacggcgtggcggcttcccgctcgtgcgccgagtgcgcgggagctcgaagaggtcgtcaagcgcattgagaacgatcgccctgggttatcgatcgagcgtcccgtccatattctcctgggagcggcttcaagatgccgctccacttcgcgtcgcgtgtcgcacgtgtgcacacggcagatgcgtgggaagtccttgctccggctgtcggacggtgttggcgtatgcagtgcgccgtttgcctgcgttcaggcggctccgtcagcgaaaaacaagatcgatctgcttgaacttgcttacgagctttgcggaacctatcgcactcggcgaacgtcgactgctcctgcgtatcaggtgcctcctttgatgacgatgcgttctctacgcagcttcgtttcgctcaacccttccatcgcgggcgctcggatcgtggcgcgcgtcctgccgtacctggcggatggttcggcttctccgagggagacgaagcaggcgctcgtgttgggcttgccgacatcgtacggcgggtacggcttgggcatcccgaggatgaattacgaggtgaaggcaatcgcaggagcccgcacgacttccggcagatcgagttttcgttgcgacctttgctggccggatgcgaaactcgacgtggagtaccaaagcagggagatgcacgaaggggaggaaagtcgtatcagggattctagaaggacgaacgcgttgatggcgatgggctggacggtcgtaggcgtcacgaacgac

SEQ ID NO: 9845 - DNA, 494 bp, Unknown
  gut microbiota DNA sequence
gcggatgcgaaactcgacgtggagtaccaaagcagggagatgcacgaaggggaggaaagccgtatcagggattctagaaggacgaacgcgttgatggcgatgggctggacggtcgtaggcgtcacgaacgacgagctggacagcctggctgcaaccgacgcgatagccgacacgatacgtcggctcctgggaaagcgcgtgcaagtgcgcgtgtcggactaccatgctcgcaagctgcggctccggcggcagctcgggcttccggtgggctacgactaggccggccgccgtaggtgcggcctcgatgtgcgattatcacaggaatgttgcgtttgacggggcgttctcatcgacgcggaagagcgcgagacgatgatcaggcagtttgcaatgattactttcgatgcatgccgatacggtccgaaaaaacgcaacattgcgggaagaatcgcacgcggcacgccgcttcttcggcacgcgtgcgccggccgccg

SEQ ID NO: 9846 - DNA, 236 bp, Unknown
  gut microbiota DNA sequence
tgcgcaacatacaccctgcatccgtgcgcctcccacatcagatggaggcgcttttttgtaggggcgttgcccgaacggaaggatggaagcttgagcgagatttcgaagcggttgttgcaggggacgtcgaagcctgcgggcgcgcccgcggcgctcgtgttggaggacggcgccgtgttccgcggcacgtcgtgcgcggcggcgggggaggtgttcggcgagatctgcttcaacac

SEQ ID NO: 9847 - DNA, 902 bp, Unknown
  gut microbiota DNA sequence
cccgccctgcgcggcctcgtcgtgcgcgacctgtgcgcgacgccgtcgaactggcgcagcgcgcagggcctgcccgactacctgcgcgaccacggcgtggtggccgtcgaaggggtggacacccgcgcgctcgtgcgccatgtgcgcgactgcggcgcacaacgggccgtgctgtccaccgtcgacgtcgacgaggccagccttctggcgaaagtgcgcgcgagtgcatccatcgtcgggcagaacctggcctccacggtgtcgtgcgcgcgtccgcgccgcttctcggccgacgacctgccggcttcgcaggcgttcgcgctcgccgcgcctcccgagccgcgcttcaaagtggtcgcctacgactgcggagcgaagcgctccatcctcgaaaacctcgtgcgcgccggctgcggcgtgacctgcgtgccgtgggacaccccggcggacgaggtgctgaccatggctcccgacggcgtgttcctgtcgaacggcccgggcgaccccgaggccgtcgagggcacgtacgcccaggtggagcaactgctggggagggtgcccgtgttcggcatctgcctggggcaccagatgatcgccaaggcggcgggctcggatatcgagaagctcaagttcggccaccgcggcggcaaccatcccgtcatgaacctgcgcacgcggcgcgtggagatcaccgcgcagaaccacggcttcggcctcgtgttccccagcttgggcgcgctcgtgccggagctgtcggccggcgtctgcacgcacgaggacgacctgcgctgctgggcgcgccgcggcgtcgcgccggtggtgcaaaacgagcgcttcggacgcatccagctcacgcacgtgaacctcaacgacggcacggccgagggcgtcgcgttcctcga

SEQ ID NO: 9848 - DNA, 874 bp, Unknown
  gut microbiota DNA sequence
cttgccgcgcagcagcacgaggccggccatcagcgtcatgcccaaagccaggccggcgcccaagaacatcaggggaagcgcgatgctatcccacgcaggacgggccgcgatcaggtacgacgaccctgccacgaacggcagcaccaggcccacgatgcctcccagcacgccgaacaccttcgacacgccagggtagtccttcttcgccagcaccaggtacaccaacgcgatgatgcccatgatggcgacgacgaacagctccttcgacagcccggatcccaggttgcccagcaaatgcgtcgcgcgctccgggtgccccatgtgcagcaccgacacgcagccgcccacggccaggcagatgagcgcgatcagcgcgcccgagaaccgcacttcgcggaacttgccgcgcagctcgcccacggccaggaacacgaacgagcccgaggtgacacccaacagcacgctgaaaatcagaagtggccactggatttccatggttactcatctcccttccaggcgcacttgtccatggcgtagtccacgcccggatggttccccacgtccttcagcttgtacgtcttctttgcggcgcgcagcttcgacacatcggactgggggtcgtccaggtcgccgaacttgcgggcctggcccgggcagtgcttcacgcacgccggcttctcgcccttgtcgatgaggtgcgcgcacatcgtgcacttttcgataacgcccttgtccttgccggtgtcgtacgcgcgcacgccgtaggggcaggccatgacgcagtactggcagccgatgcacttgctgtgatccaccagcaccacgccgtcgtcgcgcttgtagctggcaccggtggggcacacgctgacgcatt

SEQ ID NO: 9849 - DNA, 172 bp, Unknown
  gut microbiota DNA sequence
ggtcgataggccgcaggtgcaaggcgtgcgagcgcctcagccgagcggtactaatagcccgagctcttcttcgcatgcatatccctcgggttgcgcgatcgaaagtcacgagcgctgtgcaaccgccagggtggcgcggggggatcccgcggccctgacggggccatacagg

SEQ ID NO: 9850 - DNA, 182 bp, Unknown
  gut microbiota DNA sequence
cgacgagctgatcgcgctgttcaagcgcaacggagccgggcgcgcctcgtcgctgacctgcaccgtctcgcccgcgcttccgttcgtggagctcgatcccgccaaaacgtattccaccgaggtgcagaaggtgaacggccgcatcgtgttcgagggcatcgtgcaggcggcgaagcaggcgc

SEQ ID NO: 9851 - DNA, 2131 bp, Unknown
  gut microbiota DNA sequence
ggtccgcggctggtcacgtccggcgtgggggtcacggtgcccggcggccacggcgcgggcctgttcgcgcacgtcgcgtccacgccggaagaggcgcgcgccatcgtgcgcgactgcttctcgcacaagtgcgacttggtgaagctgttcgtcacgggaggcgtgttcgacgccgaggtggagggcgagccgggtgtgctgcgcatgtcgcccgaggttgcgcaggcggcttgcgacgaggcacgcaagctgggcctgcgcaccgccgcgcacatcgagagcgccgagggcgtgcgcgtgggcctcgaggccggcgtggacaccatcgagcacggcgccccgctggacgacgagctgatcgcgctgttcaagcgcaacggagccgggcgcgcctcgtcgctgacctgcaccgtctcgcctgcgcttccgttcgtggagctcgatcccgccaaaacgcattccaccgaggtgcagaaggtgaacggccgcatcgtgttcgagggcatcgtgcaggcggcgaagcaggcgctggcggcggggatccccgtaggtttgggaaccgattcgtcgtgcccctacatcacccagtacgacatgtggcgcgaggtggtgtacttcgagcgcatcgtgggcgcgtcgcgtcagatggcgctgcatacggccacgctgggcaacgcgcgcatcctggggctgggcgacgagacgggctccgtcgaggcgggcaaggcggccgacctcatcgtgctcgaccgcaaccccctggagaacctggaggcgcttcgcgacgtgcgcatggtcatggctcgcggcgtgctggacgagcatcctcgcgtgaagcgccttgccgaactggacgccgagctcgacggcttcctgccgggtaaccaaaagcattgactcttgtcacgtgacgcgttacaattctgccatgattaaaacgtttgccgataaagacacggagcggctgttcaccgacggttcgtgcaagcgcatttcgtcggacgtggctgcgcgcacggcgcgcaagctcgatatgatcgatgcggcgctcacgcttgaagacttgcgggttccgcccggtaacaggctgcatgccctcaaaggagatcgggcgggaatgcacgcgatttcggtgaacgaccagtggcggctttgctttcgcttcgagggccagcatgcgtacgatgtcgcgttgtgcgactaccattgaggcaggtgggaagatggagcagcatatgatattgatggcgcgcaagcccacgcatccgggcgaggtcctgcgcgaagagttcatgcccgattacgggttgacggttgcatcgcttgcgaagcgtttgggtgtgtcgcgccagtcggtgaacgaagtggtgcgcgagcggcgcgcggtgagcaccgagatggcgatgcggcttagccgcctgttcggcacgtcggccgagtattggctcaacctgcagcgcaacgtggatctgtgggagtcgctcgacttgcaccgcgaagaactcgacgccatagaagctttgatcgcgtagctcagtaccggttgcatgacccgtgcgctccctcttggcgggcgaggtcggcgaggagggtttcgaagccttgctgctggtcggtgagctcgcagcttgccagcaggtcgcgggcgctttcgagggtggcggcgccggcatggggcgagcggtgcagcgccatgccgcactcgatgacggcggcggcgaacgtccaatctccgttcggatcgtcggtgcagctctcatcgtcgaccaccagcgcctgctccaccgcttcgacggttcccgcagggcagtagcgcatcgtgcacgtcagccattctccgccgttcgcttcggagcggcgaccgtcctgccggtcgtcggcatcgcttccgtatttcgatgcggacgcgcccacctcgaacgccgatcctgcggggacgatctcgtacgccacggtgaacgcatggcccgcgcccacctcgcccgcatcgtcgcggaactcctcgtcggcgagcgcgcggttctcgtagccgatcagccgatagcccttcacccggtcaggattgaattccacctggatcttcacatcgtcggcaagcggcacgaggttcgcacggaggttccggccgagc

SEQ ID NO: 9852 - DNA, 1280 bp, Unknown
  gut microbiota DNA sequence
tatggctcgcggcgtgctggacgagcatcctcgcgtgaagcgccttgccgaactggacgtcgagctcgacggcttcctgccgaagcccgtctagcggcgctgccggcgggcgaggtcggcgaggagggtttcgaagccttgctgctggtcggtgagctcgcagcttgccagcaggtcgcgggcgctttcgagggtggcggtaccggcatggggcgagcggtgcagcgccatgccgcactcgatgacagcggcggcgaacgtccaatctccgttcgggcagtcggtgcagctttcgtcgtcgacgaccagcgcctgctcgaccgcttcgacggttcccgcagggcggtagcgcatcgtgcacgtcagccattccccgtcgttcgcttcggagcggcgaccgtcctgccggtcgtcggcatcgcttccgtatttcaatgcggacgcgcccgcctcgaacgccgatcttgcggggacgatctcgtacgctacggtgaacgcatggcccgcgcccacctcgcccgcgtcggccgcatcgtcgcggaactcctcgtcggcgagcgcgcggttctcgtaaccgatcagccgatagcccttcacccggtcgggattgaattccacctggatcttcacatcgtcggcaagcggcacgaggttcgcacggaggttccggccgagcacccgccgggcttcttcggcgcagtcgacgtagtggtaggcgccgttgccgtggtcggccagcgtctccatcttgttgtccttgtagttgcccgagccgaatcccagcaccgagaggtacacgccggtctcgcgcttccgctcgacgaagtcgtgcagctcgctctcggacgagatgcccacgttgaggtcgccgtccgacgccatgacgacgcggttcacaccgccttcgatgaacgacgattccgccagacggtacgcctgctccaaaccggcttccccgttcgtcgacccttcggcgacgaggccgtcgacggcgcgcatgatacgccgcttgtcgtcgcccggcacgccttcgagcagcacgcgctcgccgctggcgtaggttacgacggacacgcggtcgcgctccgtcagcccttcgacgagcgcggcgaacgagtctttgaccagggggagcttgtcagggtcgtccatcgaccccgagacgtcgatgaggaatacgaggttggcgcccgtgggcgaagcgtcgccgtccttctcggtggcgaatcccatgaccagcagcttcgtctggtcgttccaaggacagtcgctcatctggg

SEQ ID NO: 9853 - DNA, 240 bp, Unknown
  gut microbiota DNA sequence
ccttccggagcgctagggcgcgtgccgttgcgtgcgcaggcccgccgaatcggcctgggaggccgcgttgcgcaccgaccgctccgtccccgcgatcgcccgctccgcatcgacgcggccgtgccctgcgccccgcgatcgcgacctcgtacgggcgggggttcgcgcgctttggcggttgtacgccgtccgtcgacgcgctacactggtcgccatgacgcgcgacccctcatcgacttc

SEQ ID NO: 9854 - DNA, 202 bp, Unknown
  gut microbiota DNA sequence
gggcgagatgaccaaggacgccttcgcggcgaaatgggccgacaagctgatcgacgtggagcatcccgacctgggccccaagtccaacctgttctgctcggccggcggcgaccgcatgttcctcatcggggaccgcttgacgcagctggggttcggctcggtcaacaacttcaaccacggcggcgtgtgcggcatgacgggc

SEQ ID NO: 9855 - DNA, 213 bp, Unknown
  gut microbiota DNA sequence
acagtatagggcatcctcggatcaccgcatggcgcaatatcgcgaaaggatcggcgcgcgctgaatacacgggcgaagcgcgttagagcgtgggtcaccgagccgctcctcgccaccgttacctgcgcgcgagggcgtctctagcgcgataccaggtacaccttgtcgggaggaatgcggatccacagctcctcgccctcgtgcggcagctcg

SEQ ID NO: 9856 - DNA, 175 bp, Unknown
  gut microbiota DNA sequence
gagcgcgacgcccacgatccacgacagcaagctggcgttctcgacggggtcccaaccccagtagccgccccaaccgagcacgacgtacgcccagatggcgcccaggccgatgcccacgcccaggaagaaccaggagaacagcgtgtagcgctgcgagcgcacgacccattcctta

SEQ ID NO: 9857 - DNA, 194 bp, Unknown
  gut microbiota DNA sequence
gcgtggctgcggccgcccgtgatcagcgtgtacgggtactcgtccagcagatcggggcgcgagatcttcgtgatgggcggctcgatgtacatgggcagagcgccgtttccgtacagcagcaggtcttcgctccacagctccatcttgccgttgtcggactgcggatgcggcgggatcaccttgccgtccggcgt

SEQ ID NO: 9858 - DNA, 4416 bp, Unknown
  gut microbiota DNA sequence
tttttttcgaaaaaagtgcttgaccggatttcctcttccggtatactaggcttcgcacttttacggggccttagctcagctgggagagcgcatggctggcagccatgaggtcaggggttcgatccccctaggctccaccatatttgctacgacggatgcgatgcatccgtcgtttttttattgtgcacgcattgcgtccgatgacggcaagcggggtgaaggatatggtcgaggcggcagatagccgtgcggaacctcagtcggtgggcgaaaacggcgctcctatgacgatttggcaggtgtggcttcgacgtctctgcctgttcgtgatcgtgtgggctatcgcggaagtgctgttgggcgctgcgttgtggggtgcttacctgttcgcgcgcatggtgcttgacgtcgagccctcggtgctggccgagcccgttgtgggcgcgatggcgatggcgggagcgtgcctcaacctggccatcggattcctcggccttcgcggagcgcggaatccgcgcaagatcaccctgttcttctggatcacgttcgtcgatgcgatgttgacggcgtgggcgctggccagcagcgtgtccgcgggcacgtgcgacctcacctcgcttgtgagtggcctgttcgtcatcgcgctagccgtgtgcgcttggcaagtgcgcggtcagacgggttacttcgacgcgcatccgtaaggcctcccggcgtgaaaaagcctctccggggttccggagaggctttcaactgcgggcggtttgcttgacggctgcacccgatgcggcgctagtcctgcttcgcggcctcgatttgcgcgatgatggggtcaagcgcgccggctacgtcgtagtcctccacctttccggcgtcgcacaggcgcgcgaagctggggtcgatgggcagcgtggcgtaggcggggatgtcgtagcgctcggccacggccgcaccttgcggatcgccgaagatgtgatggcgcttgccgcagtcggggcactcgaagtaggccatgttctccacgaggcccagcagctcgacgttcatgtcgtgcgcgaggttcacggccttgcccacgatcatagccaccagctcctgcggagcggataccgtgacaatgccgtcaaccggcagcgactggaacacggtgagcagcacgtcggaggttcccggaggcatgtcgacgaacaggtagtcgatctcgccccagttcgtctcgctgtagaactgacggatggcgttcgagacgaccgggccgcgccaggccaccgggatgtcgtctttcggcagcatgaggttggtggacatcaccttgatgccgctttgcgtctggccgggcaggatgccgtcggcgtcggcggtcagcgggttcgtgatgccgaaggtcttcgggatggacggtccggtgacgtcggcgtctaggatgcccacgttcttcccgcgcttctgcatttcgctggcaagcaggctggtgaccagcgacttgcccacgccgcccttgccggacacgacgccgatgacgtgtttgatgttggagcgggagttcgtctcgatggtgctggggccctgggcggtgcggtcgctgcatccggactcgccgcagctgctgcactcgtgcgcgcattcttctgccatgattccttctttctgggttttcagcgcccccgtgcggcgggagcgccactcgtctcacctggatgatagcataagctttatacttaggtggaaggaatcgacccgcgcgccgggcgcgcgcggagacggaggagcgcgcatgctgttcgctgatatcgacctgttggatgagaaccttgatttccgctcccattgctgggtgggcgtgcgcgatgggcgcgtcgcctacgtgggggatgcggctccggcgggcgaggaagcggcgaggtacggagaggtgtacgacggacgtggcaagctcttgtgtcctgcgttctacaacgcccacgcgcacgcgcccatgacgctgttgcgcggctacgccgagaacctgcctttgcaggcgtggctgaacgacatggtgtttccgttcgaggcgaagatcacgcccgaagactgctactggggcacgcttctgtcctgcgccgagatggcgcggtacggctgcgtgagcttctcggacatgtactatcacatggaggagggcgcccgcgccgcgctcgacgccggcatcaagatgaacctgtccgactcgcttcttgccttcaacggcgaagggttggacgacctgccggtgaaggggaacctcgaccgtctcatccgcgatgtccagggcgcaggcgatggccgcatcgtggtggactgcaacatccatgccgagtacacgtcgaacccgcgcgccgtggccgatttggcggcgtacgcgaaggagcacgggcttcggttgcaggtgcacgtctccgagacgcgcctcgagcacgaggagtgcaagcagcgccacgacggtttgacgccggtgcgctacttcgagagcctgggcgtgctcgacgtgcccgtgacggcggcgcactgcgtgtgggtggacgacggcgacatcgacgtgctggcggagcgcggggtgttcgtggcggcgaacccggcgtcgaacatgaagctgggcagcggtttcgcccctgtggcaaagatgctcgcgcgcggcgtgaacgtgtgcctgggcaccgacggcatggcgtcgaacaacaaccacgacatgatgcaggatatgtacctgctggcgctgacggcgaaggggtcgacgaacgatccggccgtggtcacgccgaagcaggcgcttacggtcgctacgcgcatgggcgctctttcgcaggggcgcgacgactgcgggtacgtggccgtgggggcgaaggccgacttgtgcgtgctggacacgtcggggccgtcgtgggcgccgatgacgaacccgctggtgaacgtcgtgtacgcgggacatggcgccgacgtgtgcctgacgatgtgcgacggggtcgtggtgtatcgcgagggcgagtggcccacgctggacatcgagcgagcgaaggccgaggtcgaggcccgcacgaagcgcatcatcggcgagctgtagggcgagtgctgccgggtgggcggcttgcttgacggagggcctttgcgtatactggcaggcgagccgcagggagcgggtactccccacggctctcggactcgcttcggcggttcggatgtttattttggtcccggttcgtccttttgggacgaccggggcgtatctttcagccgcgcttgaagtgcgagcgaggctaccccgaccgtcaggctgccgaaggcagcgatgaggccgagaacctgcaagatcaccccgataagatccagcaatatgccatccatagaggacacccccttccgtttatctagaattcggaaatggatgtaaagagggtgctatcctccccgcctggcgagttcgtgcctcctattatagcgagctcgtcttacgtgcagatggcgtgcatctagcgcagatctttctcgatctgctgcgaatctcacgcatttcccacgtgggttccatgccgtttgcccctgtttccaacgttgtttccacacgccttgccgccgtttccgacatggttcgcacgttctcggcgcttcggtgcgcatgtttcacgtgaaacatcggttcgttttgtttcgggtgaaagcattttcgcgcggtgttgtgcgcaaagtgcggctaggcatggcgggcgcgttggtctattctgaaatggatacaatcgtgaagagggaaggggcggcatgctgaggatttccgatacgcgcatcgacgggttcatcgcggaggacgtgccgtacgtcgatctgacgtgcgcggtgctgggcatcggcgacgagccgggcgagatggagtacttcacgcgcgaagactgcgtgctggccggcgcgaacgtggtcgcgcgtatcatggggaagctgggctgcgacgtggtggaggcgcgtcgcgacggcgagcgcgcgactgcgggcgaggcgttcttccgcgtgcgcggcaccgcgggcgacctgcatgcggcgtggaaggtgtgcctcaacgtgttcgaccatatgtcggccgtggccacgaaaacccgcgcgatggtggacgcggcccacgcggcgaacccgcgctgcgaggtgctgaccacgcgcaagagcatgccgggcgcgaaagacctgctgaccgaggccgtcatggcgggaggggcgttcccgcaccggctggggctgtccgagacggtgctggtgttcgaccatcacctcacgttcttcggcggcttcgaggcgttcgtggagcagctgccggatatcaagggccgctgcgttgagaagaagctgtttgtggaggctgatgccgagcgtgcccgcgtgctggcgcgcgctggcgttgacggcatccaggtggacaag

SEQ ID NO: 9859 - DNA, 650 bp, Unknown
  gut microbiota DNA sequence
tggacggcctggccaccacggcgcccttctccgccaagcccctcgacatgagcgtgcgcatgcgcccgctgtagcggcttgcgccgtggatgtgcggtctttgggctcggcggatgcgttgtcaccccaaagccgcggtttcgggcaatattccgaggctttggggcgacaacgcatccgccgctgccggtcttcttcgcatggtcgtgggcatcgggcgaattttcttgaaccgggtgtaaccttttcgcgtcggggcgcgtctaataggtaaccgaccttgaaaggggcacccgcgtggacgatctgatacagcgagcgcgaaacggcgacggcgaggcgttcgccacgctgttcgagcacagcaagcagccgttgtggcgcgctgcgatggcggtgctcggcaacgtggacgatgcgtccgacgcgctgcaggagacggcggtcaaagcgtggcgcgccatgccgcgtttcggcggccgcagcgcagtgaacacgtggttcatgcgcatcctgctgcgcgtctgctacgacatgcgtcgtcagcgcaaccgcgagacgccgtgcgccatggggctgttcgccgcggacgtggacggctcgggcgtatggtgggagccgtcggcgggccagatgctggcgggcgcggg

SEQ ID NO: 9860 - DNA, 641 bp, Unknown
  gut microbiota DNA sequence
agactggaacgaacgcttcacgtgaaacgttcgcctacgatgcgcctgccgacgcgccgctgcccgtgcgcccgcccgtgctttgcgcgggctgcccccatcgcggcagcttctacgcggtgaagcgcgcgctggggaagacgcccgccgtgctgtgcggcgacatcggctgctacacgctgggcaacgcgatgccgctggacgccgtggacacctgcctgtgcatgggcgcgggcatcacgatggcgcagggcttcgccgtggccgagccgcacaagaagacgctggcgttcgtgggcgactccacgttcttcgccagcgggctgcctggcctggtgaacgccgtgtacaacggccatgacatcaccgtgtgcgtgctggacaacgccaccacggccatgaccggctcgcagccgcatcccggcaccggcgtcacgctcatggggccgaagcgccagcccgtctccatcccgcgcgtgttggaggccgtcggcttcgattgcatcgtgcatgcgaacccgctcgacctcgatgcgtcggtggcggccgtgagcgaggcgctcgaccacgaaggccccagcgccgtcctgttcgagtcgccgtgcatccagctggtgaagccggacgcgcccgccgtcgtg

SEQ ID NO: 9861 - DNA, 489 bp, Unknown
  gut microbiota DNA sequence
acccatctccatcccgcgcgtgttggaggccgtcggcttcgactgcatcgtgcatgcgaatccgctcgacctcgatgcttcggtggcggccgtgcgcgaggcgctcgaccatgaaggccccagcgccgtcctgttcgagtcgccgtgcatccagctggtgaagccggacgcgcccgccgtcgtggatgccgaaacgtgcacgggctgcaagaagtgcatcaccgagatcggctgtcccggcatcggcttcgacgccgacgcgcgcggcccgcgcagcaagcagcgtggccaggcgttcgtcgaccccagcctctgcaacggttgcggcctatgcgtccaagtgtgccccttcgatgcgctgtcgatgacggaaccccaaacagatgtttcacgtgaaacatcttcggacgcttctgggtcggaaggaggctgccatgcgtaacgtgttgctttcgggcgtaggcggacagggcaccgtgctggcggcga

SEQ ID NO: 9862 - DNA, 1905 bp, Unknown
  gut microbiota DNA sequence
tcccagcctctgcaacggctgcggcctgtgcgttcaagtgtgccccttcgacgcgctgtcgatgacggaaccccaaacagatgtttcacgtgaaacatcggcgtcggaaggaggctgccatgcgtaacgtgttgctttcgggcgtaggcggacagggcaccgtgctggcggcgaaggtgctggcccaggccgcgcaggacaagggttggcaagtgcgcacggccgagactatcggcatggcgcagcgcggcggcaacgtggtgtcgcacgtgcgcatgggcgacgcgggcgaggaggtgttcgcgccgctgctggccgagggcacggccgacctcgtcatcgcgttcgagccggccgaggccgcccgcgtgctgccgttcctcgcgcccgacgggctgctggtcacggccactacagccatccagccggtcacggcggcgctgtccgacaagccctatcgcgccgacaacgtgctggcgagcatcgagcgatcgctggcgggcaccggcgcgcgcttcgtcgcggtggacgatgtcgcgcttaccgacgcggtgggcagccgcaaggtgttgaactcggtgctgctggccagcgctctcaaggagggccgcatcgcgctcgacctcgacgacctgcgacgcgccctcgaggagtgcgtgaagccgcgcttcgtcgccctcaacctggccgccgtcgacgcggtggctgcgcgataatcttcgcgccccgcgccccgcgccccgcgccccgcgccccgcgccccgcgccccgcgccccgcgcgcggttagttggggaaggctccttgcgcgttcggggtcgccatcgtctttaagcaccgccccctgatgtatactgcggtcattcaaattttgtttgaatagtcggcggaaggcgagggcgttatggggcgggcgatggatcaggtgttgctgcaggaagcggtcgatttggcgcgcaagctttggcacgcgtacatcatcgagccttcggacgaaagcgttcaattcatcgtggacaccatggatccgcagaatctctcgctcatcggcacaggaaagcacgagctctatgtcaacctcgaggcgttcttcgcgggactcgagcgcgatcaggaagaagctcaggacatcaccttcgagatcctcgacgagtactacgagccgcgcgccatcggcgaggacacctgcatcgtgttcggcacgttgtgggcgcgtgagcgacccgaccgtccgaaaccgttgctcgtggaaatggacacgcgtttcacgctggtattccgtcgcgagggcgaccggtggctgctggtgcatctgcatcattccacgcccaatgtcgatcaacggcgcgaagagtactatccgaaaacggctaccgagcaggcgaacgccgctttggagtattccaaggctatggagcgccgcgccgagcttgattctatgaccgagctgttgaaccatgccgcgttcgagaaatatgtggcagcggcgcttgtcgaaggcggcgagggcagcgctttcttcatgatcgacctcgacaacttcaaaacggtgaacgacacgttgggccatcctgaaggcgaccgggtcatccaagagttcgccgacgtgctgttgcgcgtcttcccgcgcgatgcgctggtcgggcgcatgggaggcgacgagttcgccgtgttctctacctgcccgctttcggtagaggaagcccaatgcaaagcgtgcgagcttatcgaggcatggggatcgcattctgcttcgcgtgccgtagagctgggatgttcggtgggcatcgtgcgcgttgtgcgaggcgagacgttcttcgacctctatcgcgccgccgattgcgctctgtacgccagcaaggacaacggaaaaggctgctacagctggtgatcgccgtcggcgctg

SEQ ID NO: 9863 - DNA, 399 bp, Unknown
  gut microbiota DNA sequence
ctggtgctcatcatcgttctgcttgcgctgtacctgcgctcccgcatgcatgcggcgcgcgccgtacgcgaagagaatttgcgctttcaagagctgtaccgcctggcaaacgagcagttcttcgagtattccataaaatcggacaccctgcgcatttcgaagtcgaaatcgcttctttccagctcctacgttgacgatgccacgagcatggacgacggatcctcctacgtctcgtacgagaacgcacgccaactcatcaagcacagtgcgaaccccgagctgctggatgcgttcacctcgccgtcgaacgccgtgaccgaggtgctgtgccacgaggaagcgaatcccgacaaggataggaagtggatacgcatcacttcccatttcgtggaggacgat

SEQ ID NO: 9864 - DNA, 328 bp, Unknown
  gut microbiota DNA sequence
gccgagatcctcttccaggttgaggtaggtcgccttgtcgacgcagtagcgcgcgagctcgcgcagaagggcgcgccatacgaaacggaagtcgaggttgcccttgagcaccataacgtcgaacgcgccgccgggcagcacgctgccgtatgcgtagccttcgacggtgccgccgatgcgcaagaggatgccttcgaggtcgagctcctcgaagtggttcatatcgagcaggatcttccgatgctccagctcgagggggtgctcgtcggtgccgcgacggcggctcgtctcgaaccaaacctgctggtaggcgcgcagctcgtccata

SEQ ID NO: 9865 - DNA, 141 bp, Unknown
  gut microbiota DNA sequence
gcggtccttctcctcgagcgacaggccgacgaggcgcggcgtgcggccctcgtcctgcgcctcgcgcacgagcgtgcgcacgtcgtcggcgatgtcgagcgtgcccagcggcggatagtacgcgacggcgccggggatgcg

SEQ ID NO: 9866 - DNA, 223 bp, Unknown
  gut microbiota DNA sequence
cccgccgcccacgccgacgtagccggatgccacgcccgcgcccaggccgatccctgcgccgatgagcagctgcttgcgcgtgagtttgcgcggcgcagggtcgacggcagcgccagcctgcgcgctcaccttcgtcggatcgtcaatcgcatcgtcgttcgccgcagcgtcgcctacacgctcgatggcggcttcgtccggctcgatcgtgctgctcgacgct

SEQ ID NO: 9867 - DNA, 320 bp, Unknown
  gut microbiota DNA sequence
ggaatgcgccatccccatgagatcacgtcggcttcgggcagcagcgccttgatgatgagcgctgcggtggagcccgccaacaggcccgccgcggtggatgccggcacgagcgagcagtacttcccgcgatggttcgccggcgcgtactcggccaggaacaccgctgctcccgagtactcgcctgcagccgagaatccctgaacgctgcgcaggcacagcagcaggatgggggacagcaggccgatcgtctcgtacgacggcaggcagccgatgaggaacgccgcgcccgtcatcatgaagatggacagcgacaacgacca

SEQ ID NO: 9868 - DNA, 2013 bp, Unknown
  gut microbiota DNA sequence
gcaaatgtcctcgatgacctcttcgatgtagcggccggtggaatccaggcgcacggcatcgtcggccgggcgcaaaggcgaggtggcgcgcgaggagtcctgatcgtcgcgacggcggatgtcggtgagcacctcgtcgtagtcgacggagcccacgccgcggtcgacgttctggcgcacgcggcgatgcgcgcgctcctcagccgatgcggtgaggaacaccttcaccggagcctcggggaacacggtggtgccgatgtcgcggccctccaccacgtaatcgcccgcgcggccgatgcgctgctgctgctcaacgagcgccgcgcgcacggagggcgcggccgacacggggctcacggcgcggtcgatctcggccgtgcggatggcatcggtcacgtcgatgccgccgatggaaacgcggcgcggaaccggctcgccctcctcgtgcgcgaaggcgatgtcgtgggcgcgcgcgaggcggccgagcgcttcgtcgtcgtcgaagggaaccccgtcctgcaacgcccgccaggcgacggcgcggtacatcgcgcccgtgtcgaggcaggagaagcccagctcgcgggcgacggccttcgcgaccgtggacttgccggccccgctggggccatcgatggcaatgatcatcgtgccaacctttcgatatcggtgaggaactgcggatagctgattttcacggagtcgaagttctccacttcgacgggagcgttgccgcacaggccggcgagcgcccaggtcatggccagacggtggtcgttcttcgagtcgaatgcggcgccgacgggcacttgcaagcccggctggccttccacgaacaggtcgttgccgtcgatccacgcgtccacgccgagagtctcaagcccctccacgatggcggccaggcggtcggtctctttcacgcgcaactcgctgacctcgcggaacacggtgacgccgcgcgcgtgagccgccacgaccgccaacaccggcacttcgtcgacgatggtggcgatcttgtcggccggcacctcgcacccatgcaggttcggcgtgtagcacgccgaaacgatgccgtagggctccttgcccgccgctcccgtgtgacgcacgctgatatcggcgcccatgcgctcgagcgtgcgcgtaaacccgatgcgcgcggtgttcaagctgacgttctccacctggatggagctgtcgggcttcaacacggcagcgcagacgaggaacgccgccgaagacggatcgcccggcacctgcacctcgcaggcccgtagcgcagcgggacccgtcacgctggccgtgcggtcggccgctgtggtggtcacgccgaattcgggcagcatgagctcggtatggttgcgcgagggcgagggctcgttgagcgtcgtcgtgccccgcgcatacacgccggccagcagcaccgcggttttgagctgggccgacgccatgggggcgtcgtaggttatcgcgcgcaggccctcggagccgcacaccgtgagcggcagcgtctcgcgcccttcgggctcgaagcgcgcgcccatcttcatgagcggcgcggtgatgcggcgcatgggacggcgctgcagcgagtcgtcgcccgtcagctccacgcgcacgctccacggcgccagcacgcccatgagcaggcgcaccgtggtgccggagttgccgcagtcgatgggagcctcgggctgcgaggggccggcggcgccccaccccgtgacgcctcccgccaagctgccgtcgggctgcttctcgagcgacacctgcgcgcccagctggcctacggccctgatggacgagcgcacgtcctcggagtcgagcacgcccgaaagccgcgaggtgccctcggccatggcggcgaacagcacggcgcggtgcgatatggacttgtcgcccgggaccgaggccgagccgcgcaggggcgccggcagcgggttgacgacggtggcgtttgcttcatgcgacatgggtatgctcctttgccgtcaagggactgaacgatactga

SEQ ID NO: 9869 - DNA, 391 bp, Unknown
  gut microbiota DNA sequence
gcgcgcatcatggcgggggagaagctggccgatttggggatgccgcccgacgaccgccggctcgagcatttcagcgtgaaggaagccgtcatgcccttcggccgcttccccggcgccgacacggtgctcggccccgagatgaagtccaccggcgaggtcatgggcatcgcgcgcaacttcccggcggcgttcgcgaagacgcagctggccatcagctacgcgctgcccgagggcggcacggtgttcgtcagcgtgtgcgaccgcgacaagcgcgccatcgtgcccatcgctcgcgacatcgcgcgtctgggctttcgcatcgtggccacaggcggcacggcccgcacgttgcgggcggccggcgtggagtgcgagcaggtgaggaagatcc

SEQ ID NO: 9870 - DNA, 1406 bp, Unknown
  gut microbiota DNA sequence
agcacggcgtgacccacgtgacgaacctcgccggcgcccaggccatggtggccggcatggaagccgcgcgcctcggcggcctcgcggccgtggccttgcaggacctgccccagtgggagctttcgcgctgacgcgccgcgttctgcgcgcatcgtcgcccggaaaacacggaatcgcacctggaaccgtgttttccgggcgaaaaggcgatggcttccgatttccgatgcgcttccggtttgctacactgaaggcgtttcatcgtttcgcatgattccctgacgagggcagccgtaccaggatcgaaaagacggcgcataacctacgaaaggggtcttctcatggcatgggtcgttcttatcgtatcgggcgtcttggaagcggtgtgggccacggcgctcgggcgcgcggaggggttcaccaggctagcgccttcgatcgtgttcctggttgcgctggcgttgagcatggtcggcttgtcctacgcggtcaaaacgctgccaacgggcacctcgtacgccgtttgggtcggcatcggcgcctcgctcacggtcgcctacggcatgctctcgggaacagagcccgtatcggtggcgaaagtgctgctcatcatcggcctcatagcttgcgtcatcggtctcaagctcgtccacgacggctcttgatgccgcttggaattcaacgtgcggaaacatagaagcgagggcgcatcggctgacgcgccctcgctcgatcagaattctccctcacgccttcgaggacttcggcggtctggccgaccctcgtttgacggctatgtcgagcgcgcccagcgcgtcgtaggcttcccgcgccgacgcttcgactcgatcggcatcgaggccgcgctcgtcgggatgcagctcgacgcgtctgtcggcgacggcggaccatgcctcgtacactttctcgatgggcggcagcttctccacggtgctccttcggtcgcggcgtcatgttcggaaacagcatgatatcagatggtagaatgatcgcttcgaatgctgacgaaccgtcgaagaaggagcgcctgcaacgctctcggcggagctcgaagaagccggcttcgaaaaggcggagcttgtcggcgacgcggctggcgcacctctcgacgaggtgagcccgacgatcgccgtagtcgcgcgcaagcctgcgacctgcgtggacgggcgatgacacgaatcgtgtcttgccggagcgatgcggctcagccatcttgggagcctgaaagggggcgcgtcccatggatttcggagagaagctgaaagcgctgcgcaccgagcgcggcctgacccaggagcagcttgccgccaggctgtacgtgtcgcgcacggccgtgtcgaagtgggagacgggcggcggctcgcccaacctcgactcgctgcagg

SEQ ID NO: 9871 - DNA, 401 bp, Unknown
  gut microbiota DNA sequence
gccaacgtggcagacgcgaacaccgtcgagtgcgtgcgctcgaacaacgtctcgttcatcgcttcgcccacgttgatcagcagcgcttccagcttttctgcgacgcgatctttcttgcgactcaaagtggccgcataggcatacgtttccggagccctgtccaagatgatgtcggcggcgttcatctggtctttgagctccatcgcggtcgatgctatctcgcgctggatctctgccgcgccttcgagctcttccagatatcccacgagctcctgacacacgcgcaccagcttctccgctgcttcggtcatcgctcgaccatagcttgctacctgggcaaacgttgcgctggaacgcacatctgaattgatccacagctcgacgatctcgtagccttttcc

SEQ ID NO: 9872 - DNA, 234 bp, Unknown
  gut microbiota DNA sequence
gccgcgttcatggaacgcgatccgcatacgttcgaccgccttcccggatggctgttctgcgcgctcatcatgatcggtctcgtggtcatcgacgtcgccggacgcctgggaagcgacgcgacgatgatggcgctgctggtgggaggatcggtgctgacgggtgtgggttacggctattactggggaagctgggcggagtacctcgggcgcatgcacccctcgcgcacgtcgttc

SEQ ID NO: 9873 - DNA, 9862 bp, Unknown
  gut microbiota DNA sequence
atgcgctccgtgatcttcttcagcagcgcccaatccagttccggcacctcggccgtcatggcgtccaccgtgttcaccgcgcggatgatggcgggccactcgaaggcgcgcacgccgtcgcggacgccggtggcgcggaagtcggggacgctcacgaagtactgccacaccttgccttcgaggccggccgcggcgaactcgtcgcgcaggatggcgtcggcctcgcgcagcgcctccaggcggtcgcgcgtgatggcgccgaggcagcgcacgcccaggcccgggccggggaacggctggcgctcgaccatgccctcgggaaggcccagctcacggccgatgacgcgcacctcgtccttgtacagcagcttcacgggctcgcacagctcgaactgcaggtcgtccggcagaccgcccacgttgtggtgcgccttcacgccgtcggattccaggatgtcggggtagatggtgccctgcgcgaggaagctcacctcgtcgcccaccttgcgggcctcctcctcgaacacgcggatgaactcggcgccgatgatcttgcgcttggcttccggttcggccacgtcgtcgagcagctcgaggaagcggtcggtggcgtccacgtacacgaggttcgcgtccagctggttctggaacacgtcaaccacctgctcgctctcgcccttgcgcatgaggccgtggttcacgtgcacgcagatgagctgcttgccgatggccttgatcagcagcgccgccaccaccgacgagtccacgccgccggacagcgccagcagcaccttcttgtcgccgatctgggcgcggatcgcgtccatttgctcgtcgatgaaggcgttcgccagctcaggggtggtgattcgctccatgtcttcggggcgcttgttggggtccatgcgggggtcctcctcgtgttcggcaatgatctgaggaaattatacgtgaaatggcgcgggtgtataggcaggtcgttcgttctttcggcgccctgctcagtatcccatctcgtagaggcgagcgtcgtcgatgccgaagtagtgcccgatctcgtgcacgacggtcttcccgatctcctcgacgatctccgcgcgcgagccgaagcagcgctcatggggacctttgaacacggtgatcacgtcggggacgtcgctgtcgtagccgtcggcgcgatcgggcagcgacacgccgtcgtagagccccagcaactcgttgtcgcagacggaagcccctagacagtcgggttcctcgagggtttccagatggtagtcgttcggctcgtcctctacgacgacggccacgttctcgagcgcgtcgaggaaccgctcgggaatgcatccgagcgcctcctccacggctgattcgaactcgctgtcggtcatgcggtgcatggcggcctctttcgtcggcgggcgcgcgggccctcggcccacccggttcgctgaaccggcagacacgagtataccccatacgatttgtactgtgtgccgcacattatcgtgtgaactatgttatagtgtgcgacacacactatccgacgcaaccgcaaaacctgcggcgcagggaagcggcactggaaggaggggcgcatggcgtacgacgacatcgtatcgagcatggtcttggaacttcggcgcggcacgctggtcatgctcgtgctgagccagctgcgcgagccggcatacggctacgcgctggtgaaatcgctggccgaccacggcatccctatcgaggcgaacacgttgtacccgctgatgcggcgcctcgagtcgcaagggctgctggcaagcgaatgggacaacggcggctcgaagccgcgcaaatactaccgcaccaccgacgagggcctgcgcgtgctgcgcgaagtggaggcccagtggcacgttctgtgcgacggggtgggcaagctgttggagacaaacggagaggatcgggaacatgccgaacgataacgacctgatcgagcgttacctgtacgccatcacgcggcacctgcccagcgcacagcgctccgacgtggccgaggagctgcgcacgcttatctcggacatgctggacgagcgctgcggcagcctgccgcccacggccaaggacgtccgggtcgtgctcaccgagctgggaaccccgggcgagatggtgcgcaagtacacgagcggggaaggggaatgcctgatcggacagccgtactacgcacagtacctttacgttctgaagatcgtgctggcctgcgtcgcaggcggcatgctggtcgccggggcgctgtcgctcgcaacgggcgcggaagggagcctcctcggaggcgtgctggagggcatcggatccctgataggggcgcttctcttcgcgttcgcgatcgtcaccctgctgttcgccttcttctcccgccggggcatcgaggtcgagacgatgggctcgctcgacgacctgccgcccgtgccgcgcgagaccaggtcttccacgcgcggcgacgcggttgccggcatcgtgttctccatcgtgggcgccgttgtgttcctgctgttccccgacgtgctgaacgcgctcagccatcgcgcagacggcgtgccgttcgatccgttcaacgtcgacgccttccgcgcttcggcatgggtcgtcgtcgtgtggacgttcgtgtgcgtcgccggcgagagcttcaagctggtggaaggccgctatacgaagcgcgtgctggcggtgacgttcgcatgcgacctggtagcgggagcgctcgtcgtgttctggctgacgaacttccagctggtcgactcccatgccgtcgtccaggcgatgcagtcgtcgggcaaggcgctggagggcccggtgctgtgggcggtgtccaacgcgcagacggcgttctgcggtctcgtagtggcggcgctcgtcatcgacgccgtggactccatcgtgaagacggtgcgtgcacggtaaggcggccgtcctgtcggcccgcgcgcccctcgcggaaaggcgcgcgggcgttgctagatcgcgtccgacctcagagcctccacgatgttggaggcgtgcgagcggcgcagcgcgtaggccacgctgagcgccagcacgacggccacgatggccacggcgagagccacgtagtcccacggcagcgtgaactcgaggccggcgaacgccatggacgttgctgcaaacagcgcgaatgtaaccgctacggctgccgccagccctatccccaaaccgcgcagggcgtagctcgcgcactcgtaggccagcattcgggcgaaggcgcggttgcccatgccgatggaacgcagcgcggcgaactcgcgcgtgcgcaggatgatcccgttcgccagcgtgttgaacacgttggccacggcgatgagcgtcgtgatgacggagaagcacagcacgaacagctggaaggcctgcgcgatcaggcggttctggcgcgccgcattctcgatgtcgctgacgttgaccacgacgtcgcccaagtcgcgcgccagcgcctccagctcgtcggaagccttcgcgtgatcctccgccgtgaacgaggctccggcgaacgagtacgtgtacgggttcgagtggtagtcgcccagccctgcggctctctccgcaacgctctccggcaggatgatcgaggggaagtggttgttggccgcgatggcgttcagcacggccggctcctcgtcgcagagcgctcctatctcgatgcggaaagccgtggccgcctcgtcgatcggggcggtgacgatgtcggccgtcccgctgaccccggcctcccggtcgaggtaccccaccaggggccgtccgtccgggccttcctgcaagcccatgttggagaatccttcgcgctcctcggtgacgtacaggtcgacggcgccggtgcccgcgaagggcttcgtggacacgtacgtgccgtcgggcatcctgtcctgataggtgttcaggccgatggcgcgcgggttctccgggtcggtgtaggcggctacgtccaggtcgagctcgtccagcagcgcgcgccacgaggcatcgtcgacgaagaaggtgtacagggccccgtagtaatcgccgtcctcgccgaagctgtcgggcacccagtcggcgctcgtctgggagttgtaagcctgccgagcagcgcgcgcctcttgcgatatcatgcgaccgtcgacgacgctttcggcctgaccttggcggcacgagcctatgagctgcaagccctcgatctcactcgcccgcgccaggaactcgtcgtattcggcggcgtagtcggacaggtcgttcccttcgcgcggggtggtgtagtcgggatgcgccgacaccacgatgtcggctccgctcccagcgccgcgcgagctgctggcgcggtcggacagcggcgcgaggtacagcgccgtgctgccggcgaccaccacgagggtcacgctgaccgcgagcgatgccaccacggtgcgcccgcgcgtcgccgagcgcgacaggttgcggtgtgcgacgaacccggggatgccgaacagcctgcccgcgatgcccagcttcacgcgcccgacgtcgggcgcgtgcgatggtgccgaccgttctgcgcgcttcgagaggcgcacgtcctgcgtttggcggatggcgtcgacggctgagacgcgggcggcgcgggccgacggcacccaggcgctcaccagcaaagtggctatcgacagtgccgcggccgcagccaacgctccggcatccacgtgcaccgcgagccccgccgatcccgatcccaacatcgcagcgaacgcctcctgcgacgacgagaacgcgcctgccgtgcccgccacgcccgctaagaggccaatcggcacgccgacggctcccagcagcagcgcctctgccagcacggtgctgcgcagttgccgcttcgaagcgccgagagaggtcagcagtccgaactgccgcgtacgctcggccaccgagatggcgaatgcgttgtagatcagcgatgcggacgccgccacgatgacgatggccaacacggcggcaaccgcccagaggcttccccagatgggcctgccgtcggagatgcccaagtacgagaacaggctggtgtggtacagagtggcggccgtatcgtccaatccggtcgcgtcggcgaagaaggccttcatctcgtcgagggttcccagaccttgcgtgaccagatacgcgcccgcagccgctccttcctcagacgcgtcggccacggtgagggcgacgctgggcgcggaagaggccgtgtagttgttggcgaggaaaggcgcttgtcgcttgtagaatccggtaaccgtcagcgtgcgctcgcgggcgttctcgacgcgcgtctcgtttccgtcggcgaggcgcgcgccgtcttcggcggctgcgaggtttccaaaacctcccgtgagggtggaacccgtttcaagggggccgttcgaaacaacgccctcggcgcctcccgcgcccagctcctcgccttggagatagtcgggcagcacgatctcgtccgctgtctcgggccatcgcccgcttgccagctcgggcatcagggagtacggcgcgccgcccggctcgtcgacgcccttgacggtggtcggcgtcgtcttcagcgcgatgaacgcacccagacggttggcgtcgtcgggcgcgagtgcggccgatccgaggtcgcggaaggtggcgaggtcggtcacggcgtcgctttccacgagcgcatcgatgccctgagcgggcacgtcgggggaaaacacgtgccatgatccttcagttaccatcgtgcgctcgagcaagccctgctgcacgcttgccacgctggtcagcacggcggccagaagcgccgtggacagcgcgatgccgacgacggtcacggccgtgcgcacgcggttctgagcgagcgagcgcagggtgaaacgcgtgaatatgccggccatcagcgcctcctttcgtcggaggcgatgcggccatcctcgatggcgatgacgcggtcggccatgcaggcgatgtcctcgtcatgcgtgatcaccacgagcgtctggtcgaagcgcttgttcgactcgcgcaaaagcgccatgatctcgtgcgagttgcgcgagtcgaggttgccggtgggctcgtcggccagcaccacggcaggcgcgttcatgagcgcgcgcccgatggccacgcgctgttgctgtccgcctgacagctgattgggcaggaagcgctcatggccgcgcagtcccaagccgtccagaagcatgccgaggcgctcttcgttcacggcgcgtccgtccatgagcacgggaagcgtcatgttctccaccacgttgagcacggggatgaggttgtagaactggtagaccagccccacgtcgcgacggcgcagcacggccagctcctcgtcggagcgcgcgtacacgtccgcgccgttcagcagcaccgtgccggaggtggggcggtcgacgccgcccatgaggtgcagaagcgtcgacttgccggagcccgacgagccgacgatggccacgaactcgcccgcggccacgctgaacgacacgtcgtcgagcgccttgagcgccgtggggccgcttccgtacaccttggtgagatggtcgatggtcagaatgtccatgaggagcctttctcgctaacggtctacggaatagtgtgccatcccgcgcttgcgcgggcatgaacgccgcatgacggaattgtcatattcggccagcccgccgttccgggcgaagggcctcctacacgaccaccttcgggaacgtcaggtcgaagcgagcgccgcccgtttcgcggtcgttgcccgcgcgcagcgtgcctccctgggcggtcacgagcgcctgggccagcgcgaggccgatgccgaacccctccgatcccgcgccgcggtagaagcgctcgaacaggcggggaaggtcctcggcggcgatgcccgggcccgtgtcggcgacggacaggcggaaggccacggcgtcctcggacgcctgcacgcgcacgcatccgccggcgggcgtgtgctccatgcagttcttgaggatgttgcccagcgcctcggccgaccaggcggcgtctccgttgaacgacgctccctcgtcgacgtgcgtctcgcaggcgacgtcgcgcagatcgaaggcgccggccagcggggccagcgcgtcgcgcacgagccgcgccgcatccacggggcgagcctgcacgcggatggccccggcatcggccttcgccagcttcaacagcgccgtgaccagccatcccacgcggctcacgagcgtttccagctcgtgcagcgcgcggatgcgctcggcctcgtcgctcgtgcgctcggcggtgccgatgagcagccccatggccgtgagcggggtgcgtatctggtgcgacacgtcggccagcgcgtcggccagcgcgttcttctcggcgtcgaggcgctcggtggcggtgcgcagggcggccaccatcttcgccagctcgtttctgagcacggccagatctccctcgcggtagtccgagaaggcgatgcgccggccgccgtgcagcacctcgtcgacctcggacgccaaacgcgcgatctgccggtaacgccgcagcgagaacgtcgcgaacagcgcgcaggccagcgctccggcggccagcacccacaggcccgcgcgcggtccttccaccgcggcggccgctgcggcgaagacggcaagcgcccccgcgagcagcgccaactggcaggcgaaggcccggttcctcgtcaggcccatgtcacgcccccgtccggtagcccagcccgcgcacggtgaggatgaggcggggttcggccggatcgtcctccaccttgtcgcgcaggcgcttgacgtagacgctcagcgtgttgtcgctgacgtattcgccggcgctgtcccagatggcgttgcgcacgtgctcgcgcgtgaccagcttgccccggctctgcgcgaacagcaggagcagccggtactcgagcgccgtcagcgccaggtcgcggcccgccttgcgcacgcacgcggtgccggcgtcgatctccacgtcgcccaagcgcaaaagcgacgaggcggcgttcgtgcggcgcagcaccgagcggatgcgcgagagcagctcgcgggcgcggaagggcttggcgatgtagtcgtcggcgcccatgtcgaggccggccacggtgctgaactcgtcgtcggaggccgtgaggaagatgacggcgggagccgggtcgcacgccttggccgccgcgcacacggcgaacccgttgccctgggcgagcgccacgtccaccagcgccaggtcgaaacgttcgctgcgcagcaactcgacggccgcgtcctggccgtcggcacagcgcgtctcgtatccttccgatcgcagcaggtccgtcaagctggcgacgatggccgcgtcgtcttcgacgagcaacatgcgcatggggcgtccttcccttcgggtgcatcgtctccacggtagcagaaaacgcgggaaaggggaggggaggatcagccttcttcgtcgtcgacgaactccaggatgtcgccgggttggcagtccagctccttgcagatggcgttgagcgttttgaagcgcaccccgctgaccttgccgttcttcagcttcgacagattgccgtcggctatacccaccttctcggccagctctcccagggaaaccttgcgatcggccatcatccgatcgaggcgcagcacgatagccatgctgccctcctagatgatctcgaagttctcgtcttggacgagatagccgtactcgatgatctgcccgaggcagaacacgatggcggccagcatgaaggcgaacatgaccgattcgtccacgagagcgccggacagcgttccggtttggatgctgacgactgcccagtacagccacttcggcaccgcgagcgtcgcgaaaaggagcacggccaccgctttgatcttgcgcggcaggtttgcgaagaacggcgtctcctcgcgattgatgcgcagaaagacgagagcgacgtacacggccaacgcgacgagaagcccgtccccgagcaatcccatgccgtggcgcacggagtcggggttcgacagcgcttcaccggtcgtcagccagtcgaagatattgatcgacgtctgaatgccgaacagcagcgcgatggcgaggatcgcgacgaatgcggtcatgctggtcgacttgatcttggcgcgcgtcttgtccataggggtctcctcgctatcggatggctcccagtatacgccgaaacatgacgcaaaatgatatgaatatgacgttttacgtcaaaacatgcagccggtcgatctacagatccacccagaacctcgagttcttgtacagctcctccactttgctgcgcgcccacggggtcttgcgcaggaacgtgagcgagctcttgaagttcgggttcttcttgaagcagttgatcctgatgcgcttggccaggccgtcccagccgtacttgttcaccagctgcttgagcatcgtctccagcgtgatgccgtgcagcgggtcgttgggatgctgccgatctgcggggttgtcgggcatgggctctccgtgttcctcgaaacgtgtgcgctccatgatgacgcatgtgcgcggcgtttcccgccggaaacgaccgcaatcagcgaaacatcgtgcaaaatcaggcgtatcttcgctccaaaaacacgccccagcggacgaagcgtgtttttggagcgaagatacgcctttctctgtttgcgtttaccgacggcgccccatcgccagcaccgcgcgcacgccgaggagcgtgaacgccgccacggcgacggcgcccgccgctccaccggctatgagcccgccgacgagccctgcgctcttcccgtgggcatgctcggggtcttggcatcgccgggcgtccggcgtcgcgggtcgatgcggcccctccggc

SEQ ID NO: 9874 - DNA, 713 bp, Unknown
  gut microbiota DNA sequence
agggctgcgggacgggcgcttccttctttcgcgttcatggctgcctccttctgcttggcttgtccttccgctcggcaccttacgcttcgggcgcgtcggcgcagcgggcgggcgcgcggcgtgggcgaggcgagtcgcagctgtaacgttcggttggaaagcgtttgctcggatcgaggccgaaattaaagatcggacgagacgaagctgtcgatgaggcgcagggcgggatgggccacgatgccgcccgccagcgcgcctcccgcgcccacgagccaatcgaagaagctgaaggggtggtcgggaaccatgagcgacaccgctccgtcggcgatgcccagcatgcacgtgatcaggacggccgctgcgcaggcggtgagcagtcccatatgctgccacagcgcgttcgccagcaggaagccgagcaccgcgaactcgacgaagtacgccactgccgaaggcgcgctcacggcgggcccgaagtacacgaccgccgcccatgccgcggccagcgcccagcgcccgaccacgatgaagcgccgccgcttcgacatgcgcggcttcgcatctccgatatcttgcatccgatcgtccatgcccccaccataccacgccccccgatccgacccccgacacgggcaccgtaccgttgcctgcgacgtttccccggacgtcgcaggcctgtccgaacggatgtttcacgtgaaacatcg

SEQ ID NO: 9875 - DNA, 377 bp, Unknown
  gut microbiota DNA sequence
acgctgccgggcgctgccgccgaagaagccgtcgccgacctcgagcaggtgcgcgctctcgcggcgcagcgagcagccgagcagtccgccgaacagcgcgacaagcgcctcgactacgaccccgccctcatcgccgccatcggcaaccagtcgacgggcggccacaccatctgctgccccgcctatgcgtgcgcctacggcgacgcgatcctcaccggccaggccaacgaccacggcgcgtacggctgcggctgctgcacgtggcccggctggggcggcggcaattcgtcgttccgctcgctcggctccgacgaggctttgctgcgcgaggcctacgacgagatcgcggccggacggcccacggtcgtccacgtggc

SEQ ID NO: 9876 - DNA, 210 bp, Unknown
  gut microbiota DNA sequence
cacgactccacgtccttcgccgcaagcgccgtctcgcccgcctcctccatgaccttcttcagcaccccgtcgagagagccggtgagcagacgataggtgtagctctcctcccccgcctcgcgccgggctgcgatagttgcggcaagcgcctcgaacgtcgccccgatctgcgacgaaggcggcatttcgccggaagggatataggttttc

SEQ ID NO: 9877 - DNA, 168 bp, Unknown
  gut microbiota DNA sequence
gagccgccgccgagcagcacatcggccgcataggacaccgcattgcccgttattcccgcgatgaagtacagcacaaggtagttgccccgacccagcgtgcgctccaacacctcgcccacgctgtacagcgccaccatgttgaaaccgaggtgcatgaggtccatatga

SEQ ID NO: 9878 - DNA, 310 bp, Unknown
  gut microbiota DNA sequence
gcacgccgccacgcgcgcgctggcgaaccacgaggccagcctgttcgtgtacccgctgcgcgcgctgatcgccgatcaggcgttccacctgcgcgaggcgctggacgcgttcggtatcggcgtgatcacgctgacgggcgagagcacgcccgacgagcgccgccagggcttcgcgggcctggccgacggcacctacgacatcgtgctgaccacgcccgagttccttgcgtggcacgctgacgagttcgcggccgcgggccgcgtgcgcttcgtcgtggtggacgaggcgcaccatatcggcctggcgaag

SEQ ID NO: 9879 - DNA, 302 bp, Unknown
  gut microbiota DNA sequence
ctggctcgcgcggccgagaacgaccccacgctgatcatcaaccgtagcgaagagacgcaccagacggtgatcacggccatgggcgaggcgcagatcgagacgctgatcgcccggctcaaggagcagacgggcgtggaggcgaagctcatccccgtgcgcattccgtatcgtgagaccatccgcaagacggccgaggcgcagggtcgtcacaagaagcagacgggcggcgcggggcagttcggcgattgctggctgcgcatcgagccgaatccgggagcgggctacgagttcgtcgacgagat

SEQ ID NO: 9880 - DNA, 254 bp, Unknown
  gut microbiota DNA sequence
caaatcgctggcggcgaagggcacggtgacggccgatcccatcgagttcctggcggtcggcgcgccggaggagccgcggcagcagaaggcggcgaaacctgcggcaaagcgccgacggaatcgcccttcggcatccgaagacgcgggcgtcatccgcgatcgcacgtcgaagcaatgtctcatgctgcaggaggcgcacgggttgtcgacgcgcgaaacggaggtcatggagcttatcgcgcgcgggaacagca

SEQ ID NO: 9881 - DNA, 404 bp, Unknown
  gut microbiota DNA sequence
atgacgcccacgccccgatccatcccgccgggtcgccgcccgcatcggacgagcgcgcccacgacggctgcgcagactcctccgccgtcacccgcacttcgaggttgccgttgccgttcacgatgccgagcaaagcgccgccagcatccagcagcggcagcggacgagcctcgttcgcgatggtgacgcgcacgacgtcggagcgctcgtcgccttcgaaccggatgtcccagctgcacgcgccttcgtgcacgtggaagcagggtacgggagggatcgctcccaggcgatggcggacgaacgcctcgcagctctcggccatgtcgcccgctgcagcggttttggtcgccagcaggcggcatccctccgacgcggccgcctgcatcaccagccgatcgtacaaa

SEQ ID NO: 9882 - DNA, 234 bp, Unknown
  gut microbiota DNA sequence
aatgggcgcgcgcagcgaggatcggttcgcgtacgcccagtcgtacagcgctgcggaatcgacgaatcgctgcggcttcgaggacgaccccagcaccacggcgtagtacttgtgcccgtctccgcggttcacggccgacgccgcgcagggcccggcggccaacgtgtagccggtcttggccgcgcacgcgcccgggtagctgcccagcagggcgtcggtgttctccagcgccag

SEQ ID NO: 9883 - DNA, 239 bp, Unknown
  gut microbiota DNA sequence
gcgcacgcgatggtctgcgaaccgtcgtggtagtggccgacgaagcacacatacccatccttttccaagcggctcacgcgcagaggagaggagtcgttccccttcaggcacgcggctcggcaacgccgcagctcctcgtcgctcaacggatcgggcttcggcggacatgcagtcggcatcggagtcgtacctgcctcctgtctgacgtcgtcgaccactacgccgttgcgcaatcctat

SEQ ID NO: 9884 - DNA, 169 bp, Unknown
  gut microbiota DNA sequence
gcacgatctcgactgggaagagcacgacgacgagcccgagctgcacaccatctacgcggcgccgctcatcgaagccgctggcggctcgcccgagctcatccgcgccatccagagccacacctccgacttcaacccggagctgccgaagcccgagctgcagatggagaag

SEQ ID NO: 9885 - DNA, 202 bp, Unknown
  gut microbiota DNA sequence
gccgttgctgtccacgccgtccccttgagcatcgagcacggtgtagccgccgttgatctggatgaggcagttctcgtcgcccatgcccatgtcgcccgcgccgccttcggcgaatacattgtcgggcgcgccgccgttgagctcgcgctcgttggcgccctcgccgtttcgctgcggagcgccggacggcggcgtgccgccc

SEQ ID NO: 9886 - DNA, 197 bp, Unknown
  gut microbiota DNA sequence
cggcgatgaccacggccagcatcttcggcggcttctcgttgatgagcgacagcttcacgcgcttcttgcccgtgccgcgaaacagcgcgaacacgtcccacagcacgtcgtccgcgccgaacacgatgaacgcgagcgcaacgaagaagccgatccaatagacgacctgctcgtccatgcccgcttccgcctccttt

SEQ ID NO: 9887 - DNA, 199 bp, Unknown
  gut microbiota DNA sequence
gaagaagctcggctggctgtccgccatcatccgtttcagctggtcgtcatcgatgaccgccctttgttgcggttccaccggctcgttcaccttgtatggcacgtctttctcctcgaacgtcgtatatcgaaagtcggaacatactaccacgaggatagagccggtcgatgattctgcacttcacgtccattcctcccga

SEQ ID NO: 9888 - DNA, 235 bp, Unknown
  gut microbiota DNA sequence
cgtgtacttctgcgcggcgcgcttgcacacggcgacgaggcgctgcagcgtgacggcgtaccacgcttcggcgtcgtccacctgcgacagcacgagctccatcttctcgcgcgggtagtagatgagcgtggccagcgaacgcttctcgttctcgctcagcgagtcgccgaacacgtcgtcgatcttgagccggatggagcccgagccgttcctcagggtgtgggagaacgcctcg

SEQ ID NO: 9889 - DNA, 185 bp, Unknown
  gut microbiota DNA sequence
atgttggcgatctcggcgagcaggctctcgtcgatgggggaaagatcaacagccatgatggcctccttctgggttcaaagcggcggcttcgtgcagctgccgcgtgcgtgaaagcgaacgaatgtttcacgtgaaacattcgcagcgcggcgtgggcgggttagcaggtggtggcgatctccgtg

SEQ ID NO: 9890 - DNA, 175 bp, Unknown
  gut microbiota DNA sequence
tgccggactcatcgtggctggcggaaccgatgcgccggtgtgcacagtgaatcccttctacggcgtcgaatgcgcggtcactcgtcaggccgtcggccgcgatgacgtgactctcggtgctgatcaggcgatctctgtgtaccaggcggtggagatggtgacgaagaacgccgcc

SEQ ID NO: 9891 - DNA, 1669 bp, Unknown
  gut microbiota DNA sequence
ctgttcgccgcggcgatggccgtcgtggcggcgttgattcgataaacggtggaggctcgcagacgcggaggcgagctcacgggcgcttcggtatactggtcgtgcgaagaaaggaaccccgcatgaccgagtccgcacgccgatctgccgatacccggccgcctcgtccggcccgtcccgacattccgggcgagctgacggaggtggacgacctcgccggctggatcgagcgcgacaacggcggcgacctgcgcgtgtcccatgttctcgtgcgcggggacgcggccgagggggccgacttctccctcgtcgagctgaccgagtcccgcgtggaagggcgctcgttcgtcggctgcgatttcgaccgggccatggcgtccgacgtggcgttctcgaactgcgatttctcaaattccacgttctcccaggcgaatttcacgcgctgcacgttctcgtcgtgcaagttcacgggcgccgacctgctggaggcggtgctgtcgcgcgtggaggtgcgcgattcctcgttcgcctacgcgtccgtcgcgaaggggaagctggaagacgtgagcgtgagatccaccgacttttccggcgctgacttggccgagctgcgacagcgccgcgtcgaattcgacgacgtgcgcttcgcgggcactagcttcttccgtgcgagcttgaacggtgtggatttatcctcgtgtcgattggccgatatcgtgctgtcggatacgatggaggagctgcgcggctgctcgatggacctgttccaggctgccggcatcgcgcgtcgactgggcgtgaacgtcaaagactagcgaatcgcgcggcgccgggcgcccgcgcaacgtgaggagtttcgaagcatggacgaacaggtgcaaccgcgcgggctgagcgcggcagaggtagaggagcgggttgcccgcggcgaggtgaacgtggatgccggcgtgcacacgcgctccgttcgccagatcgtgcgcgagaacacgctcacgctgttcaacgccatcaatgtgatcctggccgtgttcgtgctggtcaccggttcgtacaagaacatgctgttcatggtggtcatcgtgtgcaacacggctatcggcatcgtgcaggagattcgctcgaagcgcaccactgaccgtctgtccatcgtggccagctcgaaagccaccgtgctgcgcgacggcgcgcggacggagctgccgctcgaccagttggtgcgcgacgacgtcatcgaactggggcgtggcgaccagatccccgccgacgccgaggtggtatcgggcacgtgcgacgtgaacgagagcctgctcaccggcgagagcaagctggtgaagaagcgcccgggcgacgagctgatgagcggctcgttcgtgaacgcgggcatcgtcctggcgcgcgtggtgcacgtgggcgctgagaactacgcggcgaagatcagcgccgaggccaagcagcacaaggtcgtgaactccgagatcatgaacagcctgaaccgcatcatccggttcgtcagcttcgtcatcttcccgctgggcgcgttgctgttcgcgcgccagcacttcctcggcggcgtcgagaccaacggcgccatcctatccacggtgtcggcgctcgtgggcatgatccccgaggggctcatcctgctcacgtccacggtgctggccgt

SEQ ID NO: 9892 - DNA, 120 bp, Unknown
  gut microbiota DNA sequence
cgagaactacgcggcgaagatcagcgccgaggccaagcagcacaaggccgtgaactccgagatcatgaacagcctgaaccgcatcatccggttcgtcagcttcgtcatcttcccgctggg

SEQ ID NO: 9893 - DNA, 142 bp, Unknown
  gut microbiota DNA sequence
agccgtggtgcgtttggcgaagtcgaaggtgctcgtgcagcagctgtactgcatcgagacgctggcacgcgtggacacgctgtgcctcgacaagacgggcaccatcaccacaggcaagatggaggtggaggcagtgtgtccg

SEQ ID NO: 9894 - DNA, 3765 bp, Unknown
  gut microbiota DNA sequence
ggccgtggtgcgtttggcgaagtcgaaggtgctcgtgcagcagctgtactgcatcgagacgctggcacgtgtggacacgctgtgcctcgacaagacgggcaccatcaccacaggcaagatggaggtggaggcagtgtgtccggtgaagggcgtcgggcaggacgcggtggacgcggcgttcgcctccatcgcccgtgcggacgatgatccgaacgacacggcgcttgccatcgtcgagcactatgcgcgaagcggcgtcggctcgctgcggcccgtccgaaccgtcccgttctcgtccgacaagaagtggtcgggcgcgacgtttgcgaacggggagagctacgtcatgggcgccggccagttcattctgggcgatgcgttcgtcgaagtggccgagcagcaggaacggctggccgccgacgcgcgcgtgctgttgctggcgcgcgtggagggcttcaccgaggacggcgatctggcggggaggcccgaaccgctgggattcgtggccatccacgaccagatccgcgcgacggccgcgcagaccatcggctacttcaaggagcagggcgtcgacctcaaggtgatctcgggagacgatccgcgcacggtgtcgggcatcgcgtctcaggtgggcgtgccaagggccgaggcgtacgtggacgcgaccacgctggccgacgacgcggccatcgccgaggccatcgagcgctacagcgtgttcggccgcgtgaagcccgagcagaagaaggcgttcgtcgtggccctccaggagaagggccacatcgtggccatgacgggcgacggcgtgaacgacacgctggcgctcaagcaggccgattgcagcgtggccatggcggccggttcggacgcggcgcgcaacgtggcgcagctcgtgctcgtggacaacgacttcgcggccatgccgaaggtggtggccgaggggcggcgctccatcaacaacctgcagcgctcggcgtcgctgttcctcgtgaagacgctgctgtccatgacgctggccgtgctgttcatcctgctgccgtggcagtatccgttccaacctatccagatgacgctgatcagcgcgttcaccatcgggctgccgtcgttcgtgctggcgctcgagcccaacaaggaccgcatcaaggggcgctttttggagaacgtcatcgtgaagtccatccccggcgccatctgcgcggtgctcaccatcctcattgtgaacacggtgggctacaacgtgctgcacctcgattacgagcacgtgtccacgctgtgcgtgctgctgacggcctggatcggcgcgcttctgatcgtgcgtctgtccatcccgttcacgcccatccgcgcggcgctgctggtcgtggtggtgggcggcacggtgctcggggccacggtgctgcacggcctgttcggcatcgagccgttcacgttcggcatgaccgtgctgttcaccgtcctcgccattggcgtgacaggcctgttccacgtgctgttcggcatcttcgacgcctggcatgccaagcgcctcgcgaacatggtgtagaaaagcggctgacggcttttcgatcgtcctgcggcatatagtgattgcattacgtaatgcaatatgttagcatgaaggggaacggagcgaaggaaggcggtgaggctatggcggctacggcgactttgaacgtgcgcctgccagaggatctgaaggatcgcggtgcccaggtgctcaggcgcgaaggcgtgtccgtttccgatgcggttcgcggcctgtacgagtacatggagaaggagcagcggctccccgaattcatcaagccggcgaacgaggatgcccgtcgctcggcggtggagcggaaacgatcgactttgcgcgacatggcaggagtcctgtcgccatcgccttgcaccgaagctcgggacgagtggcgcgagcatcttgaatggaagacccgtccaggcgttcgcacatgaaggtgctgttcgacgtcaacgtcatcatcgacgtctggggcaagaccgaggatttcgcttactcgttcgaggcgatggacgtggccatcgtgcgcgaattcgaattgtgcatcacggcgagcatgacccccagcatcgtgtacctcttgtccgcgcggaagctcatgtctcggaaaaaggcgcacgaggttttcgggaacttggccagcttggtcgacattctcgacgtgacggagtccgattgccttcgtgcgcacgaaacactccaaggcgattacgaagacgatctgatcgcctgttcggcgaagcgcaacgacgtcgacgtgatagtcacgcgcaacaaacgcgatttcgcgaaatcgccggtgcccgcgctcacgcccgaggagttcgtgagcgcctacaaacccgtcgacatggaatacgagctggtggagttctgataagctgctagcgcctgcggccgaagccgcttgcgccgttgcggcgcagggagcgcgagaacgccgcgctgcccaccgtcgccttgggcacgaactggcttgcgagcgccttctccgcctccgtcgcgtcgtagccgtcgatgtccagcgtggggatgcgctcgcccagcagcttctcgatatcgagcagctgcgccttcgcctcggggctgacgaacgagatggcgtagccggtctcgccggcgcggcctgtgcggccgatgcggtgcacgtagtcctcggggctctcgggcagatcgtagttcaccacgtactcgatgttcgacacgtcgattccgcgggccagcacgtcggtggcaacgaggacgtcgatggcgcctttgctgaagccctcgagcgcccgcttgcgctgcacctgcgtcttatcggaatggatggagtccgcgcggaagcctgcacgcttcagctggccggtgcatatctcggcgcgcgtcttcgtgtcggtgaacacgatgacgcgcttgctgccgcgctgctggagcacgaggcgcagcagctcgggcttcttcatcgggccgacggggatcatgaactggtcgatggtgtcggcggtctcgcctttgtgggacacctcgacgaacgcgggatccttcaagatggaggacacgctctgcatgaccttgcggtcgagcgtcgccgagaacagcagcgtctggcgcgaagagggcgtggcggccacgaccttcttcatggtgggccagaaacccatgtccagcatgcggtcggcctcgtccagcacgagcacctccacgtcgcgcagcttgacgacgccgcgttccatgaggtcgtacagcctgccgggcgtggccacgaggacgtcgatgccgcggtcgagcttcgcgatctgccccttgtacttcgtgccgcccatcacggtgagcatgcggcggttcgacgctttcgccagctgcgtgcaagcggcgtcgatttgctgggtcagctcgcgcgtggggctcacgacgagcgcccgcggcgatcccgggcgcttggcgcggccgatgcgctcgaacaggggcagcgcgaacgcggccgtcttgccggtgccggtggtcgcggcggccacgacatcgcgaccttcgaggaccaacgggatcgcttgctcctgcacgggggtgggggcggtgaaacccatccgctcgacggcggacagggtcgtctcggacaggccgaggtcttgaaacgtcgaactcaaagcgtatctccaagcatcattgcgggattcgcgcgacgcgccggcggctctcatcgcgtgcggcgcggatgtgggtgcgcgccgatcacctgcgtctatgatagccta

SEQ ID NO: 9895 - DNA, 698 bp, Unknown
  gut microbiota DNA sequence
cgccggcggctctcatcgcgtgcggcgcggatgtgggtgcgcgccgatcacctgcgtctatgatagcctatcatgcgcgtttgcgggaggttccgcgcgaataccccgcaacctgaggcgttgccgacgcgacgggcaggggggggagtgcgtccgggctagcctgtttcgaggggatacggatcttcctcgctaattgcacgcttttgtcaaccatttcttggcatttgaggccgttttggttgacaaaagcgtgcatgagcagaccttcgccgtgttgtccgcaggtatcgagcgggatggagcatcgtgcaacagggaaccttttcgcagcgtttgccggcgggaaagggccctggctacctcggctcgcgggcggttgccgcagtgcgagcggcctcggcggcgctttcgacgctgcgacgcgcggtcatgcgcacgagcgccagcgccaacgcggcggcggccagggcgaacagcgcgcccgcagggccggtggccagaagcccgcccgcgttcaccacgagcccgcccgcgaacgaacccagcgcgatgcccgcgttgaacgacatgggatgcagcgacgccgagaacgtgagcgcgctggggtagtcggtgcgcgcgacgctctggaacagcatctgcacggtggagttcatcacgtacatgagcaatcccaccgcgaggatgttcgcgat

SEQ ID NO: 9896 - DNA, 996 bp, Unknown
  gut microbiota DNA sequence
ggagaaggccatcaacgtgcacgtcagcaacatccgcagcaagctgcgcgccgcgcattcggccggcgagatcgaaacggtatggggcatcggcttcaagctggccgaatgagcggttcgcttgccgtcgcgcgcattcttacaactttcttaacgttttcgggaaggttccctaacgccttctccgtatcgtggatgacagagcgttcacggcaggagtaggcgggattgctgcagcgagccgcataaccttgaaggttctgagggtttgagctaagcggcctgatgggccgtgtgcgaaaactctcagcttctgaaaggctaagcggacgttgcggcaagccgtcaggaaggagaatcgcgtgctggcaattgaaacgcgaggcctgtgcaaggcttatcgcggtcgcaacgtcgtcgacgggctagacatgcacgtcgcccgcggcgatatctacggtttcgtcggccgaaacggcgcaggaaaatcgaccacgatgaagatgatctgcgggatgattcgccccacgaggggtgaggtgcgtctgttagaccgcctggttgccgacccgtcgggcagcgctgagtacagcgaggccgtccgcatcggcgcgttggtggaaagccctggactgtaccccaacatgaccgcgttcgataatatgcgctgcaaggctattgcgctgggcatcgtggacgatgtgggggaaatcgagcagctgctgagcgtcgtggggctgggttctgcgggcgggaagcgaacggagaattactctatgggcatgaagcagcgcctcggattggcgttggcgatgctgggctcgcccgacgtgctgctgctggacgagccgatgaacgggctggatcccgagggcgtgcgcgagatgcgcaacctcatcatccgcttgaacgagcagcgcggcatcaccgtggtggtgagctcgcatgtgctggaccagctggggcgcatcgccacgcgctacggcgtgatcgacg

SEQ ID NO: 9897 - DNA, 162 bp, Unknown
  gut microbiota DNA sequence
cctatgcgccagatggccgttagtcggttcaccgcggcgctcgccacgttcgtagctgccggcgtggacaccgataccgctatggagaaggccgtggccatggtggaccatgggaacttgaaatcccagctggaagcggtgcggatgcagatgacggatccc

SEQ ID NO: 9898 - DNA, 613 bp, Unknown
  gut microbiota DNA sequence
ggctgcgtcaacatgctgcttccgctcgaagctggcgcaaccttaaacgacaagactcgcggtgtggcgcacgcgtcgcaccgctcatcatgcagccggcgcgcacgccggtatttttatgcctaaaccgtggagtgcggggcggccagggggggccgcaagcggacgagaggaaaacccatgggattcgtggagctgttgttgctggcgatcggcctgtcgatggatgcgttcgccgtgtcggtatgcaaaggcctgtgcatgaagcggctcaacctgcgccaggcgacggtcgtcgcgctgttcttcggcggcttccaggcgctcatgccgcttgtcggatgggcgctgggcacgcagttcgagcagttcatcacgccggtggatcattggatcgccttcgtgcttttggccctcatcggcgggaaaatgctgtgggacgccttccatgaggacgacgaggagctgtcctgcccggccgacggtaagctcgacctgcgcgagctcgtgatgctcgccgtcgccacgagcatcgacgcgttggccgtgggcatcacgttcgcgttcttgcgcgtggacatcctcacgtccgtggggctgatcggcgtgacga

SEQ ID NO: 9899 - DNA, 786 bp, Unknown
  gut microbiota DNA sequence
caagctcgacctgcgcgagctcgtgatgctcgccgtcgccacgagcatcgacgcgctggccgtgggcatcacgttcgcgttcttgcgcgtggacatcctcacgtccgtggggctgatcggcgtgacgacgttcgccctgtccatcgtcggcgtggccgtgggccaccgcttcggcgcccgctacgagaagcccgccactgtcgtcggcggcatcgtcctcatcctcatcggcctcaagatcctgctggagcatctggggatcatagccttctagagagccggacgagacggcgctccggtcgggatggcaaccgggcgcgctcgctcaagacgacggtcggcccctacataatagggtagcttcccagcaccttgacctcgcgcagcttgaggcgcaggcagttgagcgcggtctgcacggcaaggtcgttcacgttctccttgaactcgatgaagaacatgtagtcgccgagcgcctgcttggtagggcgcgactggatcatcgacaggttgatgcccgcgtaggcgaactccgacaggatcatgttcagcgtgccggcgcggtccacctgcaagaacagcgcgagcgaggtcttgtagcgatcgccggtgaacacggggggatgcccctggcggccgatgagcgcgaacgacgtctgattcccgaaatgatcctcgatctcgcgctcctcgacgcgcgcgccgtacagctcggccgcgaacgcgttggcgatacccgcgacgcgcgggttctccatgaccagccgcgcgctctcggcggtggac

SEQ ID NO: 9900 - DNA, 14822 bp, Unknown
  gut microbiota DNA sequence
tccgaaatgatcctcgatctcgcgctcctcgacgcgcgcgccgtacagctcagccgcgaacgcgttggcgatacccgcgacgcgcgggttctccatgaccagccgcgcgctctcggcggtggacgacgtggtgatggtggacctgcccggtaggcgctcgctcaggaagcggcggcactgcgcgagcccctgggcgtgcgaggccaccgtggcaacgtcctcgatcttcgcgtcggggtgcatgacaaggcaatggtggatgtcgatgacctcttcgccgaggatggtggccgagcttttgaaggagaagttgtccagcgtggccgtgacggacccttcgagcgagttctccttcgccaccacgccgaactcgcatttgccgcgatcgacgcagtcgaacacttcgtcgaacgaggcgcactcgaacaggtttggctcgtcgatgccgaggcgggctgcgaacgcgcgcgcggcttcgtcggtgtaggttccggcagggccgaggtaggcgaatacgggttcggttgaagccatgggtccaatccttctatcggggttctcggttattcgtgcttgtgctatcatacccgtcttcacgacaagatgaacggcggtgaacgagaaaccaacgggagttctcacctgttagcggtatgcatagagaggggcgaaaaaagtatcaccctgcatgaaaatgcataaagtagctaatcaagtgtataactcatgttacgtggatgttgatgcgtaacatttttcagccacttgcgggtcaaacgttgcgctcgcgccctcgctgtgcgttttaattctggagtcgtggaaaatactgaatcagcaagcattggaagacgagagcacctgaggaggtgtgcacatggaaacagaggccacagtttcagagtttcagaacatgctttccgcgcgcggcgtcagccgccgcagcttcatgaagctctgcggcgccgttgcggtcgcggccggattgtccgagctcgctgcgccgcgcgtggcgcaggccctcgagaaatctgtgatcggcgcaacgaagggcaagctgtatccggttatctggatcgagggcgcgtcgtgcacgggttgtaccgagtcgtttgcgcaggtcgagacgccggatgcggcttcgatcgtgctggacatgatctcgctcaactactccgagaccctgtcggcggcagccggctggtcgatggaggaggccaaggagcagacgatcgaggccggcaattacatcctcgtgtacgagggagctgtgctggaaggctggggcggccaggctctgcgcgtcgccgacaagcccggtacggagcatctgatcgaggctgccgagaaagccaacgccgtagtcgcgctgggttcctgcgcggtcaacggcggctggatgggcgctcatcccaaccaggcgggtgcgctcggcgtgcaggcgttcctgaagaaggccggcatcaacacgccggttgtgaacgttcccggttgcccggccaaccccgagtggctcgtggccgtgctggcggacgtgatcttccttgagaagcttcccgcgctcaacagcgaggacaagcctgccggcatcttcgaccagacgatccacgacaactgcgagcgccgcggccacttcgagaacggcgagttcgtgtacaagttcggctccgaggaagaggccaagggatactgcctgtacccgcttggctgccgcggacctcagacgaaggcgaactgcggcgtgaccatgtggaacaaccgtcgcagctggtgcgtgcagtccggcgctccctgcatcggatgctgcgaggccaacccgaacgatcccggccataactgggtcgaggtcaacaccccgttctacaagcgtcatcgcgacctgcgcatcggcgactggatggttcagcccggcactatcgcgctcggcatcaccggcattcttgccgcggccctcgtggtgcacggtttcggcatgaagatcaccggccgcatggacggcggcgccgacttcgagaaggtgcgcggctgggacgcgaagcatcccgacaagtccatcggcaagtacgacgaggccgaccttaacaacgacgacaaaaaagaagggaggtaagcccttatgactcgttcagtcatcgacccgattacccgtatcgaaggccatctccgcgtcgagatggaagtgaccaacggcaaggtttccgatgcctgggtgtccggcggctgcttccgcggcatggagatggtcgtcgagaaccgcacgcccgaggatgctgcccagatcgtgcagcgcatctgcggcgtgtgcccggtgtcccacgcccactcgtccgctatcgcggccgaaaaagcctacggcatcaagatctcgaacaacgcgcgcatcatccgcaacctgctggaaggcgcgcagttcctgcacagccatatcctgtggttctacaacctggctgccctcgactacgtgaacccgctgaacgccctcaaggccgatccggcggacgcttacgaccttgctcaggctgcaggcacctccatgaacagcgacttcgtcgcgctcaaggagcgtctggcgaatttcgccgacaacggccagctgtccatcttctccggcaactggttcgacgcggaggacggcacggcttaccagctgccgcccgagctcgacctcatctgcacggctcactaccttgaggcgctgacgatgcaggccaaggcttcgcagatctccgctatcatcggcggaaagatgccgcacgtcatgacgctggtaccgggcggcacggccttcgtgcccaccgatcagaagcttgacgagttgaaagcccttgccgatgagatttacgactgggtcgagtcgaccatgatccccgacacccttgctatcgcgccgtactacatcgatgcgttgaactggggcaagggctgcggccgctatgtggcttggggcgtgttcgagggcccgggcgactacgccagctacaccgagcagatggcgaaccgctacctgcccatgggcgtcatcgacgacaagctcaacctctccgacgtgcaggagaatctcatcaccgagtacatgggccgctcctggtacaagggcgatgccacgtacacgtcgccgtacttcgtcaccgagccggagtacaccgagtacaacgtcgaggaccgctacacgtgggtcaagtgccccgcctacgacggcaagccttacgaggctggcgggctttcccgcgtcttggccgcgtacaagcgcaacgtgccgttcgtggtcgagcaggttgacggccttctggaagcgctcggcgctcccgggcagatcggggtcgcgcagtcgacgctcggccgcaccgccgttcgccagatcgagacgctctacatcgccggcctcatgaaggactgggttgccgagctcatcgaggcgctgaagagcggcgacagcgagtacttccgcgagccgtccaccatcaccggcgccggcacgggcttctgggaggctccgcgcggcgcgctctaccactccgagagcatcaaggacggcaagatcgagggttatcagatcatcatcccgacgacgtggaacctcgctcccatcaacgagagcggcgagcacggcccgatggagcaggcgcttatcggcaacccggtgggcgacatcgagaagccgatcaacgcgctgcgcacggtgcacagcttcgacccctgcacggcctgcgcggtgcacatcaccgagccggcgacgggcaagagcttcgagaccgtcacgagcccttggggggtgaagtaacatggcgcacttggcacattaccgcgaagcgcatccgatgcccttcgtcatcacgcactggatcaaccttgttgcgatgatcctcctgatcatcacgggcttcagcatccacttcccgttctggggcggcttcatgggcatagcccgcggagttcatgtgttcctgggcttcgtgctgttcatcaactgcatcgtccgcgtgatcatggctttcttcgtgaagtccgcgccggatggcggcacccgctaccaggtcacggactacaagacgtggctgccgcaggctgacaaccgtcaccagctgggcgcgtggattcgctactatctgttcttcaagaaggatcacccgctgggcgccaagctcggcgtgcctcagaagatcagctacctggccatccccatcctcatcatcgtgatgttctacacgggtctcgccctgtgggctccgacgatgaactgggcgttctttgcggcaggcactgatctggtgggcggcctcatgtcgatgcgcatcatccactacttcatgatgtacatcttcatctgcttcatgctcatccatatctacctggcgaacatcgagggcatctctccgacgctgctcatgttcttctggaaagagcacggcggtctggtgtacgaccccgagaagcacaccatcgtgggcgaggacgacctcaagcacggcgaaaaggcgtaagcttccagcttcggcactgacgaaaggacccgggaaaccgggtcctttcacgtccggagtggggcggggaatcgcgtgccaggggtgtgtggaggggacgggggatttgacgcaccaggggacttcgtgtgtcaaatcccccgtcccctcgacacgcgctcaagatgagggaggtcctcgctagccctgttcgcgctcgacgaacctgacgaaggcgtcggcttgggcttcgaggtagggtgccgaggattccagcttgaggcgcccctgctcgtcggcctgcgtggcgatatgggggatgcacaggcgcggcttgttcatcacgtgcgcgtcgaggaagctcagcatgcccacgagctgatcttgagcatgcgaggcgccgctcatgccgatgctcgcgccggccagcgcgacgggcttctccgccagcacctgcgcttcggtggcgcttacggggcgcgacagccagtccaggaggttcttcagcggtccggggatcgcgtggttgtactcggggctgaacagccacaagccgtctgcttcgcgaacggcctcgcgcacgcgcatcaccgcttcgggggcgggatgctcgatatcctggttcatgaacggcacgtcttcccagcggagaatgccgtatccgacctccgggtgcttctcgcgcatcagggctccggccgcttcggccagttgccggttatagctgttctcgcgcagggatcctgcgattgccagcagcttcatgacgtctccttccgctcggctaaagccccctcatgtgcgggacttcctcgtctataatggcagacaatcgacgaaggcacgaaagggataacgaattgtgactgaattgaccgacgaacagatcgctcgcgaagagaagttcctcgagggtattccccggctcaacatcggcgcgctgttcctgccgcctatctggggccccgcgcacggcatgtgggccgctatcctgttctatcccatctggctgttcgccgacaacacgttctatgcggcattcaccgagcgcacgccgctggcaataggcatcgcgttgatcgtattgctcacgctgacggtgggcacggtggtgttcgccatcctgggccagcccttcgcggcgcatcgcgcggcgagcctcggtcaggacaaggagacgtacctcaagcgcgagcgcatctggacgatagcgagcgtgatcgcaggcatcgcgatgatcgcggcggcgacgtactacaacttggtcatccgcccgacggtgggggcgtaaggtgggtgctgcccggcgcatcgcggtgttctgcgttggcaacaagcttatgctcgacgacggcgtaggccctgccgtgtacgaggagctgctgacgcgatacgatattcccgacaacgtggagctgttcgatttgggttgcctctcgctcaacatgatcgagcgcgtgcgcgagtacgacgttatcatcacggtggatgcggttgacggcaccgatgccgatcctggcacggtgtttcgcttcgagcccgatgccatggcgcgccattcgggagcaacagcgtcgctgcacgatctcaagctggtcgacctgttcgacgccgctgcgcttttaggctacgaagccgagggcctgtgcctgggaatgcaggtggagaacccatcgcctgccgtggtcaccgtggggctgactccgaaagtggatgcggcgctgcccctgttggtcgagacggtggcaggggagcttgcgcgcctgggctcgcctttgcgagcgcgggcctagatcgatctgatgcgctggaagacgcgggactaagaggccgtctgcggcgtgatgaaccgttcctcgaagctatgcgccggaatggggcacgagacgaagaaaccctggatgctgtcggcgccgatggcgcgcacggcgtcgagctcggtgggttcttccaccccttcgaccgtcacctcgatgcccacgctatggcacagctcgatgaccgcatctatgaacgcgcggttgaacgcttcccggtggatgtccttgatgaacaggcggtcgatcttcacgatgtcggcgggcgactgggccagtaggccaagcgacgagtaaccggtgccgaaatcgtccatggcgatgcggatgccgatggagcgcagacggtcgaacgtggcgcgcagcgcgtccatgtcggtgacgaagtagctctcggtcatctccagcacgatggacgccgggtcgaccccggtgcgctcgacgagctgctccacgaacggcacgaagtcggcgtcgagcagctgcaggtaggagatgttcacgtccatgatgaagccgggatgcgtttccgaccagcgcttgcactgtgtgaacgaccgctccagcacccagcggcccacctggccgatgagcccgtacgactccagcacgggaatgaactccaccggcgagagctggccgtgctcctcggaattccaacgtaaaagcgcttccgctccggcgatgtccatggtttccgcgcatacgagcggctggtagtacagctcgaagttcttcatatcgtcgaggacggaagactgcatgtagtcgctgatctccaggcggcgaagtttcgtcgcgatcgtcgcggacgagaagaacgtggaagtgttcttgccgcgctgtttgctctcttccaacgcgttctccgcgttgcgcagcagatcttgggcgctctgggcgtcttggccgatcatcgcgatgccggccgacaccatgcagaagaagctcaagtcgtcgatggtgtgttggcggttcgcaaccacgtggatggcgtggtagagctcttccatggcggcgcagccggcgccgtccatcacgatagcgaacacgtcgccatcgaggcggaacatggacgctccttcggggatgaggcgttgggtggactgggcgaacattctgagcacggtgtttccgaaagcgtggccgttcagcaggttgatgcgagaaaagtcatcgagccccaacagcatgacgccgccctgcgattcgcaggcgatgagccgatcgatgaggttcatgcattcgtcgtgcgtgaacagcccggtgactgagtcgattttacccttgcgctccagacaggtgaccacgccggcgaacatcgtcggctggccgttctcgtcgcgcttcagaagtccgcggcacatcacccagatactttctcccaaggcgttcttcacctggtattcgagatcgtggcagtcggtttcccctgagagcatgctgtcgatcgaatcatcgaagcgcttccgatcgcgttcgacgatgagttctctccagagagggatgaggccgggaacgaggctgtccggcaggtcgaagtcgtcgcgcatgttgtcggagacgagcgcgatatcgcgttgcatgtcgatgatgtacaggtagtcgtccgtgctgaacgctatagcgtcgtagaacagtcgcgcgtcgagctcgaacgacttcagcgcttctttcgtgtccaagaagtgcgctccgtttcaatgatccgttgagcatgccttctgtattgtaaacgcaatcggtgcgttttcgagcgtaaatgcttatcgaagagggggagattttcatcgatgggaaaatgtgccggatggcggcgcaatgacgaaggcttctcgttttgtccacagtgcgccgttgcgaccgcgcaccggcataacttggggtaacgtaccggaggaaacgattgacgcgaaggagcatccgctcatgcacatccacaccatcagcgcttacgagacttcggcagaagagttcttcaagcgcctcgtcgactggaaggtcgacctcgtggtggacacgaggctgaagaacacgaaccagctggccggcttcacgaagcgcgacgacctggcctatttcgtcgaggagctcgtccatgcccgttatgtgcacgacaagctgttcgccccggcgcccaccatgatggagcgctatatccacggcaacatcgggtgggacgcctacgccgatgcctaccgcgaggatatgcgcgagcgtgaggccgtgccgcagttcttcgaccgttacggggactgcgagtccgtggcgctggtgggaaccgccacgcgctctcgccgctcccatgtagaagtgcttgccgagatgttggaggagttccagaaggagtagggaggcaactcccctgtcgtcctgatcgagcgcaagcattcgacagtccggtgtactgtcgaactcccgagcacacgaagcgagcgcagggaggcaccgcgaagcggggacgcgaaggatcccgtgcggcgttagctgttagcgttacggctgtcgtcacgcgggatccttcgactacgcgcctgcggcgctccgctcaggatgacaaagggaatgagcgacatcccttgaaaaactagcgatcgttagttaatatactagcagtcgctagttttgtagaggagagaccatgcgggggaaggacacgaaggaacgcatcgtcgaggaggcgttcgcgctgttcgcatcgcgcggcttccatgcggtgtcggtgcgcgacatcgcggctgccgtcggcatcaaggacgcgtcgctgtacaatcatttttccggcaagcaggccatattcgacgccatcgtgcgcgatgcgctggagcggacgcgtcggttcttcggcgagcgcaacatcctgttcgacgtctccgacgacgcgacgccgtacgaggagatgaacgccgagcgcatgcacgagatggtgctgccgtcgtttcgctacttcttcgaggatccgtacatggtgcgcctgcgccatttgctggtgatcagccagttcgagagcgaggaggcggggcgcgtctaccgcctcgtgttcgtcgagcagcccatggcgctgcagcgcaccatcttcgagcacctcatggccacgggcgagttcgtccgcgacgacgccgcgcagatggccgtcgaactgcagggcgtcccgttcatgctcatgcatgcgggtctgacatgggaggaagccgaaccgcggctcgccgcccacgtcgagcggttcgcgcgggcgcatacggcggcggggcggggcattcgaggaggggagcgggcatgagcacggtggttgtgtattcgtcgcagacggggttcacgaagcgctacgcggagtggcttgcggaggagctggggtgccaggtggtgtcgctcggcgacgagccgcggttcgacgcaagcggtttcgacgtggtggtgctgggcggatggcttcatgcgggagggctcgcgggcaagaagtggcttgcgcgcgcccgtgagaagcatctgcagacgcggttcgtcgtgttcgcagtgggcgcgacgcccgtggaatggaccgacatggtggaagaggcgcttgccaaggagctgccgtcgccggagttcgatgacgtggagcgcttctacctgcgcggcgggttcgcctacgagcgcctgggcttgccggacaagctggccatgaagctgttcttcaagatgcaggagaagaacgccgccgccgacccgcgcgccgccgagatgctcgagggcatgcgcggcggctttgacggcaccgaccgcgccgccatcgcgccggtcgcggcgcgcgtccgcgcgcttgacgccgccgcggtgtcggcgggaagcgcggagcgcgcatgaacgcggcgcgccgcatcgtgcgtgtcatctgcgtgttcaacggggtgtgcgcggtggtgtgcggcggcttcatgatggcgggcgctgcgggcatcctgccgcccgcgttcggcgagctcttcggcttcttcgacctcatggtgcccttgattcagcggatgccgctgcctgcgtatatgacggccgatctgttctggccggggcttgcccttgcgctcgtgaacggggtggcaaacctcgtggccgctgtgctgttcgcgcgcagcgatgggcgcgcgcgttcgtgggcgctgctggccggcgcgctgctcatcgtctggtgcgtgttcgagctcgtgtacctgccgaatccggtctcggtgatctacctggtgatcggcctcgtgcagacggcatgcgcggtggtgatgcgtcccgcgcgctagcggcgcgcgggttcgtgccgcatgaggccgtgggccgtgcagtacgtgtagagcttcgcgccggcgaggcggggcaggcgcgcttcggcgccctgctcggggtagagtttttcgacggccatgcggtcgaagcccacgacggcgacgaagccgaggtggtgctgcttgttcatctcgtggtcgaaggtgacgtaccagtcgccctcgatcggctcgacgtgcacggcgtgcgcctcgtcggctggcaaggcgacgagcgggggcagcttcctgccgcagcaggacacttcggcgtcgccggtggtgacgatcacgttgtcgcaggcggggcagacgcggaatgcggcgcgtttcatggttcctcccgttcggacatcgacggccaggcggccgtcgagcagcgtttccacgggagttcccaagcgttcggacaggccgggcaaaagctcgatgtcggggcagccgcctccgcgctcccatttggacacggccttgtcggtgacgccgagcgcgtcggcgagctggcgctgggtgagcccgcgctcctcgcgaagcgcgcggatgagcgtgccggtgtttctggcgtccatggcgatcctccctggttttttcggacggcgtctacgatacgcgcgcgccgcggccggcgcaatgaacgctccgtagagtcgcgtctcccggcgtagcggaggcggcggacaagcccgtcagcgccggagcgcctcggctcgcttcacgcgttcgacgagcacgtctttcacgttctcgcgcggaacggccagcgacaccgcaagctcgtcgcacagcaggccttctgccaggtcgaagtacttcttgtccgtggcggtgatgcggcggcccgaatcgacgcgccggacggtgcgctcgtggacggacttcatgatgggaaccagatcctcgggcgcgaacgttctgaggcgcttgtcgtattcttccttcatgcggcgctccaacagggtgggcatgggcgcgtcgggcttgagggcattctcgtcgatggtgtcggcatccacgatggaatcgatcagggcgagtgccgcgcgcttcgacatgatgggacgcaggttgtcgggcgtggcctcgtcgacggcaacgaacagcttgagcgagttctcgaacagcgcgcgcagctcgaggtagtcctttccttcgaagtagttctcgcgcagggcggcaacttcgcagacatgatgacggtagacgaccgtatctccgcatgcgtacatggcaacctccgatgatgggtgggaacggtaggtgcggttcagtcgcgtcgcggtgacgtcgcagaatcagcacttcgattgtaccacttcgcgggaagcgtgcgcgcatcccgcttcggcgagcggcggagcctgactccgtccagttacgggtagcggctgacgcgctgtcgcttggaacagacgattctgcgggaaaagcgtccgcttcgggcgacagcgcgctcccgcgggccacggcctctgcaggagcgcggcaaagcctgcgcgctacgcgaacagctcggccgccttctccatgcgctcggctatcggcacgccgaaggggcagcgcggctcgcaggcggcgcaggccgtgcagtcgtcggcggccgcgtcgagcgcgcggtagtgctcgcggatcgaggcgggcacctcgctttgcatgacagccaggtcgtagaacttgttgacggcggcgatatcgatgccggccgtgcagggcgcgcagtggccgcagtaggtgcactggccgaagtaggcgtgtttcggcgctcccgccaacacgctcgcgtagtccttctgcgcttcggtcgccgtttcgtaggccacggcgtcgtcgacgtgcgccggctcgtcgaagcccgccaggatgctagccgcggcggggcgggtgagcgcgtaatggatgcactgcacgggcgtcatcgccgcgccgaacggagacgcctcggcgctgaacagacgcccgccggcataccccttcatcaccgtaaggcccacgccctcgcgttcgcacagcgcgtacagctcggcgcgggtgggatccatgccttcgagcgcgtcgtcgtaggcgaaggtgaatgcgtcgtcgaggctggccgtggccggcaggaggtcgaaggcggggttcacgctgaacatgacggcttcgatctcgccggacagcgcggctcgcttcgccacctcgggcgcgtgggtggacagcccgatgtgcccgatgacgtcggcggctttgagcgcgcgcacgtattcgatgaactccccggccatgatgccctcgtactcgttgatgtcgtcgacgtagtggatcatgcccagctccacgtggtcggtgccgaggcgcgcgagcaggtcctcgaacgcgggacgcacgagattcatgtcgcgcgtgcgcacgtactggccgtcttgccaggtggagccgatgtggccctggatgatccagcggtcgcgcgtgccggccaacgcagctccgaggttgctgcgcacctcgggtcccgccatccagcagtcgaggatgttgatgcccgcttcctcgcagcgctcgaccacggcgcgcacctcggcggccgatttcttctccatccattcagctccgaagccgatctcgctgatttcgagccccgtcctgcccagttcgcggtagcgcatacaaacccctctcgcgatagtccttcgcgttcgcatgcagcacgcttccgtactgcttcttggagcgaactctaatccaagttttttcttcttacgccttcccgcagctggggcagaggtcgcagaggaaacatgtcgcgcacttcgggttgcgggcgatgcacgtttcgcggccgaacagcacccattggtggttgatgggaccccagtattcgcgcgggtacagcttgagcagggcggcctcggtcttcgctggcgtgtcggccgaggggccggcgaacttcaaccgatgcgcgatgcggaacacgtgcgtgtccaccgcgatgccttccacgatgccgaacgcctcgttgagcacgacgttcgccgtcttgcgccccacgcccggcagcttctgcagctcgtctatgtcgcgcgggatctcgccgccgtagtcggccactaccatctgagcgcacttgatgacgttcgccgccttcgtatggaagaagccgatggtgcggatgatgccttcaacgtcgcggacgtcggccgctgcgaggtccgcgggcgtggggtagcgctcccacagcgcgggcgtgaccttgttcacgcctttgtcggtggtttgggcgctcagcagcacggcgatggtcaagcggaacgggtcgccccagtagtgcagcgcgcactcggcggcggggtaatgctcgttcatgcgctccgccaccgcgagggcgcgctggcgtttggcggtcatggtctcgcgtggcataggatctcctcgggatgcggttttagcgaaactcctcccagtataatgaagttcttcgtccgtgtcccgctttcgaggacggcgaacggcggatgcgcgccgcgattgccgttcgccgtccgattgctggtaccgctcttgccgtcggcgtcgtggggctagccctcgtgcacgatgcggccgtcggagatcgtgtagcgcacggtgctgtcggagatcttcttcgggtcgcaggtcaggatgttctggtcgagcaccgcgaggtcggccttcttcccgacctcgatggttcccacgaggtcctccatgaagttctcgaacgcgacgttcttcgtgtaggcttccagggcctggtacggcgtgatggcttgctcgggccagcgatgcatatcggtgtcctcttcgccgggataggggctgttgcgcgtgacggcgacctcgatctcctccaggggcgcgaacggggtgaccgggccgtcgctggcgccgctcacgatgcagccggcttccagcatgttcttgaccgggtacatggccatcgcgcgctcttctccgatgtaggcgatctcgagctcgcacagcgggtcgcggtacatccacaggaactgcagcgcgctgatgaccccgaggtcggcgatcctcttgatgtcctcgtcggccacggcgcacacatgggtcatggtgtagcggcggtcggcgcgctcgccgttctccttgatcgcgttctcgaaggcgttcagcgtgttgcggacggcgccgtcgccgatggcgtggacgtgcacctgcacgcccgccttgtcgagggcggccaccatggcgtcgaactcctgctgatcccattcggattcgccgtaccagtccga

SEQ ID NO: 9901 - DNA, 181 bp, Unknown
  gut microbiota DNA sequence
gtggccgctcacggtggcgcccgcgcacgtgtgcgtcatcccgctgacggtgggcgacgacgaggtgcagcccgcggccgagaagctggcgagcgacctggcgaagcttggcctcgaggtggtcatcgacgaccgcaaggagcgcgccggcgtgaagttcgccgatgccgacctcatcggc

SEQ ID NO: 9902 - DNA, 231 bp, Unknown
  gut microbiota DNA sequence
cagcgtttccacgttctcgatcatcgggctgcctcctcgaagcatgcctcgcgcactccgcccgccacgtctgcgacgttcgccagaccgcgttcgcagaattcgtcgcaggtcatgatgtgggcgccgatgaaggccatgtcctcgatgttcgccgcctgcacctccggcgtgcgcgacgacgtgcagtcttccagcagcaccacattgtagtcgagcgacagcgcgtcg

SEQ ID NO: 9903 - DNA, 281 bp, Unknown
  gut microbiota DNA sequence
acgggcatgaccttcgccagcggcctgcgcgccatcctgcgccaggaccccgacatcgtggcggtgggcgagattcgcgacggcgagacggccgagatcgccatgcgcgccgccatcaccggccacctggtgctgtccaccgtgcacacctacgacgcggcgtccaccatcgaccgtctcatcgacatcggcgtggagccgtacctcatcgccagcggcgtgcgcggcgtcatctcgcagcgcctcgtgcgcaaggtgtgcccccattgccgcgaggagta

SEQ ID NO: 9904 - DNA, 193 bp, Unknown
  gut microbiota DNA sequence
gatgcagcccgactgcacgtcgtagaagcgcatgagcagcttgaccatggtggtcttgccggcgcccgtggggccgaccagcgcgacggtctggccttccgacacctgggccgagaagtctttgatcaccggcttctccggatcgtagccgaagcgcacgtggtcgaactgcacgttgcactccacgtcggcg

SEQ ID NO: 9905 - DNA, 203 bp, Unknown
  gut microbiota DNA sequence
aagaagcctacgacgtgcgcatcggcggcggcgtgctggcgaatctgggcgcgcatctgcgcaagctgccggtgttcgccgagtcggaccgcgcgctcgtcgtcaccgacgagaacgttgcgccgctgtatcgcgccgacgcgaaggaagcgctcgcgcaagccgggttccgcgtgagcgacatcgccgtgccggcgggcgaa

SEQ ID NO: 9906 - DNA, 358 bp, Unknown
  gut microbiota DNA sequence
cagccagcccatggtgcgcgccacgggcgcgcatgactccatcgtgacgtcgccggctacggaaggctccgctcccggatcgttcaccatcggcgactacgccatcgtgttcaacggtgagatctacaactaccgcgacctgcgcgacgagctggccgcggacggctggacgttcaagaccgagtccgacaccgagacgctgctggtgtcgtacctggcctggggcaagctgctgttggataaggtgcgcggcatgttcgcgttcgccatctgggacaagcagcgtggcgagctgttctgcgcgcgcgacttcttcggcatcaaaccgttttactacaccgtgcagaacggcgaggcc

SEQ ID NO: 9907 - DNA, 1125 bp, Unknown
  gut microbiota DNA sequence
ccccggatcgttcaccatcggcgactacgccatcgtgttcaacggcgagatctacaactaccgcgacctgcgagacgagctggccgcggacggctggacgttcaagaccgagtccgacaccgagacgctgctggcgtcgtacctggcctggggcaagctgctgctggacaaggtgcgcggcatgttcgcgttcgccatctgggacaagcagcgcggcgagctgttctgcgcgcgcgacttcttcggcatcaaaccgttttactacaccgtgcagaacggcgaggccggcccgcagttcatcttcgcctccgagatcaaatgcatcctggagcaccccgcctacgagcgcgagctcaacgaggaggcgctggagcagtacctgtgcttccagttctcggcgctgcccgagacgttcttcaagggcatctacaagctggagcccgcgcactgcatgaccgtgcgcgccgacggcacgacggaaaccgagcgctactggcgccccacgtacgacttcgaccagaaccgcagccgcgaggacaccgtgaaggccatcgacgccgctatgcgcgaaagcgtgcgctaccacaacgtggccgacgtggaggtgggctcgttcttgtcgtccggcatcgattccagctacatggccgcatgcctggcgaaggagaatcccgacatcaagacgttcaccgtgggcttcgccgagtacgagggcgagcgcgacgagatctcctgggcgcgcgagctggccgacgaactgcatatcgagaacaactccaagcacatcggcgaagaggagtactgggaaagcctgccccgcgtgcagtggcacatggacgagccgtccgccgacccgagcgccgtggcgctgtacttcgtcgaccaggaggccgcgaagaaggtgaaggccgtgctgtccggcgagggcgccgacgagttcttcggcggttaccgcatctaccagacgccgttcgccaacgcgaagctgtcctgggtgccgaagggcctgctgcgcggcgcgtcgaaggcggctcacgcgctgggcgtgcgcggcgcgaactacctggagcgcgccagcgagacccccgaggactggtactacaccaacgccaacggcgtggcgtt

SEQ ID NO: 9908 - DNA, 278 bp, Unknown
  gut microbiota DNA sequence
tcaacgtctcgcgcaccatccccaccccgttcaaagcgaacggcgagcagacgaagatcgccctgcgcgaggcggccgagcgcaccatcccgaaagactgggcgcagaaggagaagctgggctttcccgtgcccatggtggactggctgcgccaggaccgctactacaaccaggtcaaggaatggttcaccggcgacatcgcgcaacagttcttcaacaccgacgagctggtgcgcctgctcgacgagcacaggtacaagatcgaccgctcgcgcaag

SEQ ID NO: 9909 - DNA, 2663 bp, Unknown
  gut microbiota DNA sequence
gtggttcaccggcgatatcgcacagcagttcttcaacaccgacgagctggtgcgcctgctcgacgagcacaggtacaagatcgaccgctcgcgcaagatctggatcgtctacatgttcctcatgtggtacaagatctacttcgtggacaagaccgtccccaagaaaccggcggcgtaaacgaacgaagggccctacggggcccttcgcgttcgctaggcgagcttcgacgagtcgacggccacgaggtggccgtgctcgtcctcgaagacgcacagaccgccgtcgcggctttcgtacaggttgcgaaaacgcgcgaaacggcgctgccgaggcggcttctctttgggcgcagccacggactccggcttcggctccggctctggtcgcggctcctgctgcggctgcgtcgaggagggttcttccggcttcgtcgcctcaacctgcgcggcaggctcggcaacgggcgcaggatcgacgggttcgggatcggcggacaaaggagcggacggcgaatcgacgcgcgctacggcctcggccgcctcgatgaagtcgctttcgtcgggatcgttcttcgccacgagatcgcactccgcctgcacgccggccgcctggaaatcggtttcgctgggttcttccacgaaaacctccggctcgatcgacggagcctcgatgatcggaggacgccgtccccctcgatctccccgcttttcgatggcggcctcggcaagcccgccctccatcacttcgatacccgacgccatcacgcgcgaggacgagggttccggatcgaggcccaagcgcgtgtacagcgagcggttggattgggcgatggacacgagctcgcgcgccagcgagacgcgctcggcctcgtcgacgttctcttggagctgattgcctatttcgagcacgcgcgtccacgagacggtgtccatatcctctttgagcgatacgatcttttccgcctcgcgcgccacgcgctttgccgttgatgtgctgaacatgatacgccgccttcggtttatcggaggcctattgtagcacgtcagtagatgactcgccagaatacaagcccttgagctggggcgttctcccccgcaacccgacgatcgcacgcctccagcacctcgcccacccaatcggcgtcacgctggcccttccccaccatcaccagcgtgcccacgatggtgcgcaccatggagtgcagaaacgcgttgcccaccaccttgatggacatgaggttctcgcccatcaccgtctcgggatggaaggaaatctcgcgcacgttgcggtgcgtgggcttgccttccgccgaggcggccatgcagaagctcttgaaatcgtgctcgcccagcagatactgcgcacctgcttccatagccgtgatatcgaggccgccggggacgaaccacgagaagtccttcatgaagatggggcacgtgctgtccacgcacaggtggtagtgatactcgcgcgcctgcgcgtcgaagcgcgccgagaagcccagcttcttcggttcgacctcgcgcacggtgatggcgtcatgcgtgagcgcgttgagagaacggcgcaagctgggcagcgagcgtcctgcgatgtcgcggtcgtccacgtcgaagctgaccacctggccgagcgcatgcacgcccgcatcggtccgtcccgcgcacgtggtttccacgtcgcggcggaacagcatgcgcagggcatcctcgaggtcgccctgcacggtggtctgacccggctgacgagcgaagccgctgaacggcgcgccgttgtacgacaaggtcaacgccagagtatggtcgcgcacgggtttatcagctgccgcagcggccgctgcttcgcgcttacgcgcggtgtttggggtgatggtttgcgtattcatagccgacatcataaacgaacacgccccctctgcgaagagggggcgctatccgcttgccaaattgtttaaaagcgccgcgaagctacgtcgtatcgcgcgttgcccaccaagcgagttccgcacgagccgaaggccccagcggggccttcgagcgagcaggactgtttgagcgactgggcaatgcgcgatacgacgatacgtacgcgagccatcggcatcgccgcgagatagggcgccccagcgcttcgcagcgtcgaggagctccgtcgttcgagaacgacggagcatcaagaagccctccacacctgcgaaccgaacagatcctggatctcggaacgcatgacggggctgcgggaatccaccgacacgggcagttcggcgcggaacttgcggccatcgctctgctgcacgagcagaaccacgccgtcgcgacccggatacgacttcaagatgcggttgagccgcagcgacttcgactggtcgaagtccgaggacgcaactttcagctcaaggtgcgacggacgcgcatcggcctcgttcagctcgatgacctccacctcgaacgccatgatctgattgccgcggtcgttcgcctcgaacttgcccttcaccttcacgatggcgtcttcctggatagcctcggcgttgtcgtcgtacttgaagcagatgcactccacgtggcccgtcgtatcctccaaggtgaatgtggccatcttcgtgccgcgcttcgtcagcttcgtcaccacgttcgagatcatgcccacgaacaccgcggac

SEQ ID NO: 9910 - DNA, 1332 bp, Unknown
  gut microbiota DNA sequence
ggcctcggcgttgtcgtcgtacttgaagcagatgcactccacgtggcccgtcgtatcctccaaggtgaacgtggccatcttcgtgccgcgcttcgtcagcttcgtcaccacgttcgagatcatgcccacgaacaccgcggacttgatttccttcgtgcgctcggccaggtctcccagcgagaacttggtcatacgcgcgatggtgccctcgtacgggcgcagcgggtggtccgagacgtagatcttcatgatctccttctcgaacgtcaacagctggcgcttcggccactccacgccgtccggttccggaacctcctcctcgaagcccgaatcgggatcgtcgccgaacaggtcgaacatcgacacctggccgctctcacgatccttctggcgcttcgaggcgctttccagcagcggcgtctcgtcaacgaagtacatgagctgcttgcgcgtgtagcccgtcgagtcgaacgccccgcccttgatgagcgcttccagcgtcttgcggttgtagcatttcgcgtccaggcggttcacgaagtcgtgcagcgacgtgaacggcccgttcgcctcgcgctcctcgatgatggcctcggccacgttcgcgcccacgccgcgcacgcccaccaggccgaagcgcacgccctcgtcggtgggcgtgaactcggcgttggacgagttgatgtccggcggcaacacgggaatgcccgagtggttgcagcttgcgatgtagcggatcaaacggtcggtgttgcccatgtaggacgacagcacggccgccatgaagtcgttcgggtagtgcgccttcaggtacgccgtgcgcatgaccaggatggcgtaggcggccgagtgcgatttgttgaacgcgtacttagcgaatttctccgcgtcttcccagatctgcttcgcgatttccagcggatagccgttctccaccgcgccggtgttccagtcttcctgcaacgcgcgcatgacgtcgagcttcttcttgcccatagccttgcgcagcttgtcggccttgcccgccgagaagccgctcatagccatggatatctgcatgatctgctcttggtagaccatggtgccgtacgtctcctccaggatggggcggaggcgctcgtcgtagtagtggatggaggtcttgccgctggccaccttgatgtagtcctcgaccatgccggattccagcgggcccggacggttgagcgcgatcgaggcgacgatgtcggagaagcgcgtgggaggcaggcgcgcgaacaagctgacgtacagcgcgccctccacctggaacaggccgtccatgttgccggactgcatgagcttgaaggcgcc

SEQ ID NO: 9911 - DNA, 1624 bp, Unknown
  gut microbiota DNA sequence
agcgatcgaggcgacgatgtcggagaagcgcgtgggaggcaggcgcgcgaacaggctgacgtacagcgcgccctccacctggaacaggccgtccatgttgccggactgcatgagcttgaaggcgccctcgtcgtcgatggggatgtcctcgggaatcaccttcgtgccgaagcgctgctcgatgttgcggcacgcgatggtgagcacgtcgagcgtgcgcaggccgaggaagtccattttcagcagacccagctcgggcgtgtaatggccgtcgtactgggtgatgatgccgccgcccttggtgtcgcgcttcatgggcacgtgatcggccatggggtcgcggcagatgatggtggcgcacgcgtgcacgccctcgccgcgcacgtggccttcgatggacagcgcggcgtcgatgacggccttcacgtcctcttcggtctcgtaggccttcttgaggtcggggttcgtggccagcgccttgtcgatggtgatgcccagctcgtcgccgatcatcttcgtgatcttgtcgccggtgctgtacgggtagtccagcacgcgcgcggcgtcgcgcacggcgttcttggcctgcagggtgccgaacgtgatgacctgcgacacgtggtcctcgccgtacacgtccttgatgtggttgatcacttcttcgcgacggccctgctcgaagtcgacgtcgatatcgggcatctccacgcgctcgggcgacaggaatcgctcgaacagcaggccgttggacagcgggtcgagcgcagtgatgtccatggcgtacgccacgatggcgcctgcggccgaaccacggcccggacccacgccgatgccctggctgcgcgcccattcgatgtactcctgcacgatgaggaagtacgccgggaagccctgctggatgatgatgcccatctcgtagtcggcgcgctcctgcgcctcctgcggaacgggattgccgtagtgcttgaccaagccctcctgcacgcgcttgcggaagtagctttcctcggtctcgccctcgggcaacgggaaacgcggaaggatggagtcgcgctccagcaccacgttcaccttctcggccacttccaccgtggtgtcgcaggcctcggggaagtccttgagggcctcgcgcatctcctcctcggtcttcatgtagaactggtcgttctcgaagcgcatgcggttggcgtcgttgaacgccgcgcccgtgccgatgcacagcatgtagtcctgggcgcgcgcgtcctcgcgcgtgaggtagtggaagtcgttcgtggcgatggtcttgaggccggcggccttggccacgtcggtcagcatgtggttgagctcggtctgcgtgaacccggcatcggtgcggatgccctggttctgcagctcgatgtagaaatcgcccggttcgaagcagctggcgaacttcttggcccattcgaccgcctcgtctacctggcggttgtcgagcagcttcggaatgatgccggcgatgcaagccgacgagccgatgatgcccttgccgtacttctgcagcatgctgaaggtggtgcgcggcttatagtagaagttgtccacgtgcgactcgctgaccagcttcaccaggttgtggtagccctcgttcgtcttggcc

SEQ ID NO: 9912 - DNA, 2605 bp, Unknown
  gut microbiota DNA sequence
ggccgacgagccgatgatgcccttgccgtacttctgcagcatgctgaaggtggtgcgcggcttgtagtagaagttgtccacgtgcgactcgctgaccagcttcaccaggttgtggtagccctcgttcgtcttggccagcagcagcaggtggtacagcttcggcttcgtgtccttgcgcagctcttcgtcggtggtgaagtacacctcgcagccgtagatgggcttcacgcgcttgcccgtctcggcttccaccttgtcgcacatctcgcacagctgcggaacgcccgacatcacgccgtgatcggagatggccaccgcgggcatgtcgaggtcggcggctctcttcaccatgtcgtagatatgagtgtggccgtcgagcagggaatattcggtatggttgtgcaggtggacgaatgccatatcttgtgcctcttgtcagtcatggatgcgcgtcgtggtatcgatgacattctaacagcattcgtcgtaaagcgccgtcttcaaacagcgaacaaacgatggtttttgcgcgaacgccgcccgcaacagcaggcggcgttcgcagcgctcgatccgccgcttacgagacgcccgatatgacgccgccgcgtatctggcagccgacgagcttggactcgcagtacacgctttcgacgttgagcgcccgcctgaccttctcgataaggtcgaggatggcctgctcgtcgccgtgggtgctgtcgaacacgagcgtgtcgttctgcacgacggtcccgtcctctttggcgaagcctccttcggcctcgtacacggtatagcccgaccccgcctcgatgaacagcgggatggcgatatccttcgcctcctccatggtgagctcctgcttgccggtgtctttgtcggtgaggccgaagtacaggcagtacaccacttcctgccgatcggtcacaccgttgacgagcggctgcgcagcatcgtcggacaccttcgaagcgcaacccgcgcacagcgcggcgacaagcgctccggcgcacaggcacgcgcccagcttcttccacgttcttgcgttcatacgaacccctttcgtttaggattcgatccattgtaggacgcaccgcttcgctcgcgcgcaccgagtcgtgccaaaatcgcgcacaacctgcccgatttcgcacggctcgccgagcgctcgcgcatccttccccaccttgggcgcaaatcgactcccatgacaatatccggcgggatcgaacccccggaaggcgcagggggatttagccaccaggggttttgcatgccttcgcggcggtaggactcaaaggaattgccataggcatcgattcgcgcccaaaccgaaagactgcgggagcccgtcagactcccacagggcgccggtagaggcttgacggcggaaacggcgtcgagcggtaaaaaacgaacggtttggtaatcacactgattcgctttgttttacggttcgaggagtatccgacctggggaaacgttcccaatcgcactcggcggactcgaagcgccgcggccgggctccgccaggattaccaaaccgttcgatttttacctcgacgcgtgcatttcgccgtcaagcaggtgtcggcgggtgctggggtcgttcgagcccttagcctcgagcagacgacagaaatccccgattgcgcgaagatcgacgcggccgccctcgcatcgcggctccgcaggactcccctattccccttcgccctccgtcagatagcgctcggcttcgtccagatcgatgtacatgccctgggtgacgggccgcccgtcgatgcccggaagattgcattgccgatacagcacgcgtgcgacggagccgtcgcgcctgatgaaacgataggagaacggctccgactcgccggtctctatcatctcgacgctcttcttgtacagatggtcgagatcgtcgggatgcacgatcattcgaaggttggctccaacctctccgtaaaactgctccttcgtgtagccgaggatgtcgaacatagcttgattcatataagttatcagcatgtcgcccgacaaatcgtagcgaatgatgcccacgggcacgaccccgtagaattgatcgagcgcggggccttcgtccaaccgctccatatccattgccgccatctgcaaggatctatgcgaatgacccgaacggttgactcggtcgatcttcatcttggtcagaaggacgccggcatcggttgccaaacacgacgcaccgaagtagaagacgccctggtagtccacgtctccggtgaataccgcttcgccgctcaccgcgacgagatcgccggacagctcgttcaccgtgatggccttgtacgcgatggagagctcccggccgctcatcgcgcgctcgagatgcgcgcgcaccgcgtcgatgcccgagaagcagccctcctcgaaccgatcctgccactgcacgtcgtcgaagcagcagtctgcgaacgcatcgagatcctgccttacgaaggcatgatcgaacaagcgcacgatgaacgaccgcgcatcctctttgcgcagcggcgagcgcttctggggctcgtgcgccagggcgcgttccagcaagccgccgaacgaagcctcgtcgaccgggcggctg

SEQ ID NO: 9913 - DNA, 7658 bp, Unknown
  gut microbiota DNA sequence
acagtctgcgaacgcatcgagatcctgccttacgaaggcatgatcgaacaagcgcacgatgaacgaccgcgcgtcctctttgcgcagcggcgatcgcttctggggctcgtgcgccagggcgcgttccagcaagccgccgaacgaagcctcgtcgaccgggcggctgaagaagaagccttgggcaatgtcgcacccgatgcctttcacgaactcgacctgctcggcggtttcgatgccctcgcaaaccacgaccaggcccagcaccttggcgatgttcgccatcgagtacaccacggtcgcgttgcggaagtcggaaaggtcgcgctggaagaacagctggtcgatcttcacttcgtcgatgggcaggttctgcagcatgcccagcgacgagtacccgctgccgaaatcatccatggccacgctgaaaccgtgctcgtgcagccgcttcacttggccgatcacggtgtcgaaatcctcgacgaacgcgctttccgtgatttccgcgcacagatacgacggagggacggcgtagcggtcgacgatgcctttcaacgcgtcggcgaacgagtcgtccaagaaatgcaagcgcgagaagttgcagttcagcggcacgatgaccgcgcccttgtcgagacggtcgcgcaggaagcggcagcactgctcgaatatggccagatcgaggtcgacgatggcgccgctgcgctcgagcggcgggatgaacacggcggggctgaccaggccgcgcgacggatgccgccagcgcgcgagcgcttcggcccccacgatccggccgttcgagggcctgaacaggggctggaagaaggcttcgaactccccgcgttcgagcgcatcgccgatctcgacggacagctccatcgaaagccgcatatcctcccgcagacgcgcgaattccgcatcgtcggtctcgaacgcgtagcggcggctccggccgagctgcttcgccttgcgcagcgccacctcggcttgatggatgagggccgccggcgtcaaggcagcttccccgtcccacgacacgacgcccgcgccggcggtcaggctgacggacgtggattccccggaagacccttccccgtcgatggtcaggcgcacggagagcagatcgctcgtgaggccgtccaggacgtcccggtcggcgccgtcgacgatggcgaggtactcctcgctgcccacgcgtcccaccatctcgacgccggtcgagaggctcgtctgcagatagcgtccgaaccgggctatgatcgcgtcgcccaccgcatagccgtacgcgtcgttgaacgacctgaaattgtcgatatcgatgacgatgaggctgaacggacgacccttctgggcaaggcaccgctcgatgcgtcgctccaaggtcgtacgatccggcagccccgtcagcgcgtcatagccgtcttcctcgccctcgatctgcacgcatccggagaattcaagggacttccgacgactcacgagcgttctccttcatctttgcgccgcagcccgtcggcgcacaacgatttcccccttatcataccactctcgaatccgaacctctcgcattgtccgagaccatccctcttcgggacgccaacgcctcgaaaacatagccggaaaaaaggaagagccccgtgcgggggctcttccacatcttgctcgtcaaccgcagcgcatcggccgttgcgttgccaagcgaccgaagccgcgcgtcttcgaacgcgtccgccttaagccgctttggcgaccctcagctgaacgtcgcaccacgccttgtcggccgcgagcgtcgtcttgcgagcctcctcttcggagagtccggacagctgctcctcgatgccggccagctgctcgcgcacctgctcgacatcgatgtcggccgcaggcagcgcacgatcggccaagatgatgaccttgtcgtccgtcacctcgacgtaaccgccctgcaaagcgtaatgcacggtctcggaggcgccgaccgccttcacgcgcgcctcgccgtcagcaagcaccgacacgagcggagcatggcctttcagaaagcccatctcgccttcgacgccgggcacgacgacgagctcgacctcatcagagaccagcttcgccaccggcgtcacgatgtcgcacatgaacccagccattacgaggccttcttcatctcttcgtacgcggcgtacacgtcttcgatggagcccttcatgcggaagcactgctcggggatctcgtcgcactcgccgtcgaggatggcggcgaaggaacggatggtgtcctcaagcttcacgtacttgcccggcaagcccgtgaactgctcggccacgtggaagcactggccgaagaactgctgcgccttgcgggcacggttcacgatcttcttctgatcctcggacagctcgtccatgccgaggatggcgatgatgtcctgcaggtccttgtagttctgcagaagctcctggatgcccacggccacgcgatagtgctcctcgccgacgatctgcgggtcgagcgcgcgggaggtggactccagcgggtcgactgccgggtagatgcccagctcggagatcgaacgggacagaaccgtcttcgcgtcgaggtgcgtgaacgtcgtggccggcgcagggtcggtcaggtcgtcggcgggcacgtacacggcctgcacggacgtgatggagccggtggacgtcgacgtgatgcgctcctgcaagtcgcccatctcggttgccagcgtcggctggtaacccacggcagagggcatgcggcccagcagagcggacacctcggagccggcctgcgtgaagcggaagatgttgtccacgaacagaagcacgtcctggccctgatcgcggaagtactccgcctcggtgaggcccgcgagacccacgcgcagacgcgctcccggaggctcgttcatctgaccgtacacgaggcaggtcttgttgatgacgcccgagtcgctcatctccaggtagaggtcggtaccctcgcgggtacgctcgcccacgcccgtgaacaccgacgtgccgccgtgctcctgggccaggttgttgatgagctcctggatgataaccgtcttgcccacgccggcgccgccgaacagacccgtcttgccgcccttgacgaagggctcgacgaggtcgatggccttgatgccggtctcgaagatctcggtggtggtggacagctcgtcgtagtccggagccggacggtggatgggcatgtagcccttcacctcgggcatcggcttctcgtcgacgggctcgcccatgacgttccagatgcggcccagggtctcgggacccacgggcatcatgatcgggttgcccgtgtcgacgacctcgaggccgcggacgagaccgtccgtcgagctcatggccaccgagcggacaaggttgcccggcaggtgcgtctcgacctcgagcacgaggtgcaagtcgcccgccagggtcttggcatcaaccgtcagcgcgttgtaaatcgccggcagctgatcagggggaaattcgacgtcaacgacagggccgacgatacgcacgatgcgaccggtagcgcccttgctggcctcgagctcctccttcgtaagcatttgttcagccatttaatcctccaaagccgctgcgccaccgacgatctcggaaatctccgtcgtgatagcgccctggcgtacgcggttatacaatctagtcaacgtttcgagcacttcggtagcgttgtccgtagccgacatcatggcgttgcggcgcgcgccctgctcggcagcagccgagtcgatgagcgcatggtacagcgtcgtgcgcacatacgccggcagcaagcggtcgaggacggcctcggcgctgggctcgaagatcacatcgccctcgagcttcgcctcgcccgcttcctgctgcacgccttcggcggccagctcggcatcgagcgcagccgtgtccacgggcagcacgagctccgtgcgcagcacctgctcggcagcgttcttcgagtggttgtacacgacaaacacctcgtcgatcgtgccgttctcgtatccgtcgatggcgtacgccgcgacggacgcggcctcctccaccgtcggatcggcagaaaggtccgtgaacccgagcaccggctccaccttgcggtaggtgaagtacccgacggccttcttaccgcaggcgacgacctggacggacgcgcctgcggcctgcttttccttcatgagacgctcgacgtgccgcagcacgttgctgttgaaaccgccggcaaggccgcggtccgacacaaccacgacgaacagcacgttcttcacttcgtcgtgcttgcgcaacagcgcgttatcggagccacctacacgcttggcaacgttggccaacatttcgaccatggattcggagtacggcgtcgcagccgccacgcgctctccagcgcgacggatcttcgcagccgccaccatctccatggtgcgcgtgatctgcttcgtcgaagagacggagccgatacgcctttctatgtcgtgaaggttgggcatagtctacctgccttaggaagccgagggcgagaactgcagcttgaaagcttcaatagcggcgttcaggtcggtttcgatttcatcggtaaacttctgcgccttctcgagggcctcgacgatctccggcttggaagcgtggatgaagtcgaggaactcgccgcggaagcggacgacgtcggacaccgggatgtcgtcgaggtagccatgagcacctgcgtagatggacatagcctgatccatgacgggcatcggcacgtaacgaccctgcttcagcagctcggtcatgtgggcgccgcggttcagctgatcctgggtcgacttgtccaagtcgctgccgaactgcgtgaacgcctgcagctcgcgataggacgcgagatcgaggcgcagcgtgccggcaacctgcttcatggccttgacctgcgcggagccgccgacgcgcgacaccgagatgccgacgttgaccgcagggcgctggccctggaagaacaggtcggtggacaggaagatctggccgtccgtgatggagatgacgttggtcgggatgtaggcggacacgtcgccggcctgcgtctcgatcatgggcagcgccgtgagcgagcccgcgccgtactcgtcggacatcttgaccgcgcgctccagcaagcgggagtgcaggtagaagatgtcgcccgggtacgcttcgcgtcccggcgggcgacgcagcgtcagcgacatctggcggtacgccacggcctgcttggacaggtcgtcgtagatgcacagcacgtggcggcccgggttgtcggccgtggccggctggccgttctcgccgttgtacatgaagtactcgccgatggcggcgcccgccatgggggcgatgtactgcagcggagcggagtcggacgcggaggcgttcacgatgatcgtgtactccatcgcgccgtgcttctccagcgtctccaccaggccggcgaccgtggacgccttctggccgatggcgacgtagatgcagatcatgtccttgcccttttggttgatgatggcatcaaccgcaatggacgtcttgccggtctggcggtcgccgatgatcagctcgcgctgaccgcggccgatggggatcatcgagtcgatggccaggatgccggtctgcatcggctcctcgacgggctggcgctggatgacgccgggagccttgaactccaccgggcgcatgccttcggccttgatggggcccttgccgtcgatcggcatgccgagcgggttcaccacgcggccgagcatctctttgcccgaggggatctccacgatacgaccggtggtcttcacctggtcgttttccttgattgcggtgacgtcaccaagcagcacggcgccgacttcgtcctcttcgaggttctgggccataccgtagacggtctggccgttggaacccacgaactcgaggagctcgcccgccatggcgtccttgaggccgtcgacgcgcgcgataccgtcgccgatctggatgacggttccgacttcgcgagattcgacgctcgtattgagcgcatcgagctgcttgcgcagtgcctcgtcaatagactgtgcggtgatttcagtcactagcattcacctccatctgttgatagtttgagcacgttgcgagcgctttccaactgcgacaggacgctggcgtcgattcgcttgccgttggcactcatcaatatgccgccgagcagggacttgtcgatatgctcgcgcaacacgacgttcgttcccaggtcggcctcagctttcttcgtaatgacctcgcgcagatgatcgtccagttcgacgacggtcgtgacgtcgacgacggtgacgttcagcttgcgttcgagctgttctccatagctggcccatacgcgcgacagcaacgcgaagtcctcgcgctcggccatgacggccagaacgtcgacgaggacgggattgctggatgcgaacaggttgcgcaccagctgacccctctgctcgggcgtataggagctgtcctccaaggcgtcggagagatccatgttcgaacgtgcgatgcgcaggatgcgctcggcctggtcgcggacctcgagcacggcgtcttgaccgcctgcttcgtatgcgccgtccagaagcacggacgcatacgtcgcgaccttctctttgagaatttggcggttagttggcattgaaactgcccgcctcgttcacgtagcgctcgatgatcttgcggtgctcggcatcgttgagatcctcgccgatcaggcgagacgcaacggagacggacaggtcggcaaccgagccctgcagctcggagatggcggccttcttctccgcttcgatggcgttgtgcgccttctcgatcatcgcggtggcctcggactgcgccttatcggtgatgtcggccttcacggcctcgcccgtcttcttcgcgtctgcgacgatctgggcggcctgggctttggcatcctccagctggcgtttgtattcctcaagcacgcgctcgctttcgacgcgagcctgctcggacttctcaagggaatccttgatggtcatctcgcgcttctccagcatggcctcgaacttcggccaaccgaacttggccagaacgatccagagcaggatgaagatcacgagcatggggatgaactccgccatgtcgggcaagatggcgctcaggccgcccgatgactcttcttcagccgcgaacgcgagcgcagggaaagcaaacgtcatgccggcgccggcaagcgcggcaagcccgatgcgggccgatgtttctttcgctttagctttcacgtacgttacctcctatgtaagccttatacggcacggtatccgaatgaggcttagttacacgatgaaggtaagcacgaagccgatgaggcccagagcctcggcgagagcagcaccgatgatgaagttcgtgaacagacgaccctgcagttcgggctggcgagcggtggcgacgcagcagccgtagcaggcgatgccgatgcccaggccggggccgatggtcgacaggccgtagcccacgagcttcagagccgcaagagcgagtgtaatttccacagtttcctccttttaccgttctcgggcttctcccgagaaccatggacaccttctatgtcaaccagccgtggaatagccggtcaaacaccaaacgttgccgcgcgcaggcgcgtgc

SEQ ID NO: 9914 - DNA, 1256 bp, Unknown
  gut microbiota DNA sequence
ctgcaggaacgcaaccagcacctcgagcgcgtacatggcgaacaggaacagcatccacgcgatggagatgcttcccacgccgacgcccgcgccctggatggcggagccgatgaacacgctggtgagcagcgcgaaaatgccgagaaccatatggccggcgaacatgtttccgtagagtcgaacggccagcgtgagcacgcgcagcacggtggagaacagctcgaggaaccacacgatgggaaccatgaccagcggcaggcccgacggcgcgaacgacttgaggtagccgcccaagcccttggccttgatgccccagaagatgaagtagatgaacgagatggccgcgagcgcccaggtgatgctgatggaccccgtgggggtcttgcagccggggatgaggcccacgaagttgctgatcaggatgaagaagaacagcgtggccaagaacggcaggtgcttcttgtagccgtggccgatggcgctttcgcccatgtccttcttcacgaactcgtagccgtactccaccatgttggtgaacttgttcgtggggatgatcgtgaggcgcttgctggccgcaagcacgacgacgagcgtgatgaggaagcagatgagcatccacagcacgtactgcgtcatgccgaacgatcccgacccgaacacgaaggcggaatcgaaagaatgctgcaggtgaggtacctgttccgctagggattcaagaggattcacgtgtctttacctttccatcttacttccgcactagattgctgacgccgaacccgatagccgcgacggaaagagccacgacctcggcaagaacgaagggcaggacgaactcgcgcgcgaggagcgcgcaggcgatggcggttacgaagagcacagcgaccgagagcagcacacctagaagaagggcaccggcgtgccccaggttgctggtgtcggtcactcgtctcgtcatacgcaagccggcgaacagcggagcgaaccccgcagcgcccgcgagcgcccccagaacgattgctactgccatgtcccactttcttcttgaccgtcgagcgcacaagtacgcatcctaccaagccgactcgtatgataacggaacttcacgttcggctgacggcagggttacaaaaacttacaaaatttgggtgagtggaagaataaaccggccaaaaaactgcataaagcgcgggggaacggtaagcgaaaccgtatattctccaagcggaaaaggacaggaatgagacagggggacgggg

SEQ ID NO: 9915 - DNA, 2468 bp, Unknown
  gut microbiota DNA sequence
gctcgtccgggtacgggttctggtagacgatctcgtcgatgccggcgttgatgagcatcttggcgcacacgatgcacggctgcgtgttgacgtagatggacgcccccgtgatgttgatgccgtagcgcgccgcctggatgatggcgttctgctcggcatgcaggccgcggcagatctcgtggcgctggccgctgggcacgccgagctgctgacgcaggcagccggtctcggcgcaatggcgcatgccggtaggcacgccgttgtagccggtggccagtatgcggcggtccttcacgatgacggcccctacggcgcggcgcatgcacgtggtgcgcgtggcgacctcgttcgccagcgtcatgaagtactcgtcccagctggggcgatggtcgagtggttccattgcttacctctttcaacctgcgcgaccgggtgggcggcggcgcaacgcccagtcgctcggacagtcctcgcttcgctgcggcgccgcgcagcaagtccccgaaggggaaactcgcttggtgggcgccgcgccgccgctcacccttcaaggttatcgaaaccgccaagccgaaaacaccggccccgctcccaagccaacagccattctgcgggcgatcttcagaaagggagatcctacctgcggcttttctgttacttggtgccgaaaatcctgtcgccggcgtcgccgaggccggggactatgtaggcatgttcgttcaggcattcgtcgatggcgcaggtgtagatctgcacgtccgggtcggcggacagcacggcctcgatgccgacgggcgccgccacgagcacgacgagcttgatgttcttcacgccgagctttcgcagatagtggatggccgccgtggccgaaccgcccgtggccagcatcgggtccaccaccagcacgtcgcgctgggagatgctgtcggggagcttcgcgtagtactcgtgcggctcatgggtttcggggtcgcggtacatgccgaggtgtccgacgaacgtggagggcatgagctcctgcagcccctcaaccatgccgaggcccgcgcgcaggatggggacgatgaccatcttcttgccggccacctgcttgcacgcagccttgcagatgggcgtttcaacctcgacgtcctcaagcgccagatcgcgcgtggcctcgtagccctcgaacatggcaagctcgcgcacgagggcgcggaagtccttcgacgacgtgttcttgttgcgcagcttggacagcttgtgctggaccatcgggtggtcgacgacggtgacgcggtcgtagtgcatgggataagccttctttcttgcgatccggttcgggaactagtaatcgagctcgggatacaaagggtgcgcggcaaggagggcgtccaccttcgcacgcacatcggcgagcttcgcctcgctctcggcgttgaacaccgtggcggcgatgagctggcccacctcgtagaagtcgtcggccgtgaagccgcgcgtggtggccgcagcgctgcccacgcggatgccgctcgtgacgaacgggctgcgcggctcgttggggatggagttcttgttcaccgtgaggcccacgctctccaacagcttttcggcatccttgccggtgacgtcggccggcgtgaggtccacgaggcacaggtggttgtcggtgccgccggacacgaggcgcaaaccgccgtccatcatgccctgccccagcgtgcgcgcgttctccaccacgtggtcgatgtactccttgtaggcgggctgcatggcctctccgaacgccacggccttgccggcgatgacgtgcatgagcgggccgccctgcgagccggggaacacggccttgtcgatgcgcttggcgatgtcctcgtcgttggacaggatgaagccgccgcgcgggccgcgcagggtcttgtggctggtggacgtcaccacgtcggcatgcggaacggggctgggatgcgcgcctgcggccacgaggccggcgatgtgagccatgtccaccatgaagtacgcatccacctcgcgcgcgatggcggccatgcgctcgaagtcgatgacgcgcggatacgcgctcgcgccgcccacgatgagcttggggcgcacttccttggcgatacgctccacctcgtcgtagtcgatggtctcggtctgggcgtccacgccgtagctggcgaagtcgtagtggcggccgctgaagttcaccggcgagccgtgcgtgagatggccgccctcggccaggctcatgcccagcaccgtgtcgcccagctcgatgagcgcctcgtacgcgcccaggttcgcgttcgcgccgcaatggggctgcacgttggcgaagttcgagccgaacagctggcaggcgcgctcgcgcgcgaggtcctccacgaggtcgaccttctcgcagccgccgtagtagcgcttgcggggatagccctcggcgtacttgttcgtgagcacgctgcccacggcttccatgacggcgg

SEQ ID NO: 9916 - DNA, 3073 bp, Unknown
  gut microbiota DNA sequence
ttcgatgagggcgaggcgaagcgatcatgctagcacagcgcgatccgcgctgcgcgcgtgcgggctattcgttttcgagagcggcgatcttctcgacgcgacctgcatgacgaccgccgccgaaggaggtggagacgaaagcgtcgaggatctcgcggttcacggactcgtcgacgaagcgacccgagacggctacgacgttcgcgtcgttgtgctcgcgcgcgagggcggcgaacagcgggctggtgacgttggcggcgcggatcccgtcgatcttgttggcggccacggccatgccgatgcccgtgccgcacacgagcacgccgcgctcggccatgccgtcgaccacatcgtgcgccacgcgcgccgcatagtcgggatagtcgacgcggtcgtcgcagtcggggccgcggtcgatcacgtcgtggcccttggaggccaggtagccgaccagcgcctgcttctgctcgaagcccgcatggtcgcttgcaatgctgatcttcatgtgaggttcccttcctcttctctttcgtcacgtgacggctggcgccgcacgggatctttccctaaaggactggctttgcgtcggaacttcgctccttcggcgctccgctcaggatgacagggcgtccgacatcgtgcgcttcacggcgcgagcccagccttccagcagcttcgcgtggcgctcgtcctccatgcccggctcgtacacgtcgtccgaagagcgtagggcgcacagggcttccgcgtccttccagaacccggtggcgagccctgcgaggaacgcggcgccgagcgcggtcgtctcggcattctgcgggcggcgcagcggcgtgcgcaagatatcgctttggaactgtatgagaaaatcgttcgcggacgcgccgccgtccacgttgagcacgctcaagcgcacccccgcgtcggcctccatggccaccgcgaggtcgtgcacctggtaggccagcgattccagcgcggcgcgcacgatgtgagcccggccggttccgcgcgtgagcccgtagatggcgccgcgcgcatcggcgtcccaatagggtgcgcccaagccggtgaacgcgggcaccacgtacacgccgtcggtgctattcacgctgcgggcgatggcggaggtctcggccacgtcgtcgatgatgcccatgtcgtcgcgtagccattgcatgagcgcgccggccatgaacacgctgccctcgagcgcgtactcggggccggcacccggacccgaggcggcgatggtggtgatgaggttgttcgtggagcggcacgcttcgccgccggtgtgcatgagcaggaagcagccggtgccgtacgtgttcttcgcctggcccggctggaagcagcactgtccgaacagggccgcctgctggtcgcccgccacgccgcagatgggcacgttcggcacgatgcccgcggaagccgtgcggccgaactcccccgacgaagggagtacctcgggaagcagggactccgggatgccgaacaggtcgagcagccacggatcccagcgcagctcgtggatgttgtacagcatggtgcggctggcgttcgtcacgtcggtggcgtgtaccttgccctgggtgagcgtccagatgagccacgtgtcgacggtgccgaaggccagcttgccggcttcggcgtcttcgcgcgcgccttccacgtggtcgaggatccacttgatcttgctggcggagaagtaggcgtcgggcacgaggcccgtcttgtcggcgatgatgcgcgccgtctgcgggtcggccgtcagctcgtcgatgatgggggccgtgcggcggcactgccacacgatggcgttcatcacgggctcccccgtttcgcggttccacaccacggtggtctcgcgctggttcgtgatgccgatgctgtcgatgtcctttgcgcccaggttgtgcgccaccagaagctcggtgagcgcgcccagctgcgacgacaggatgtcgcgcgggtcgtgctccacccagccgggctgggggtagatttgcgggaacgggttctgcaccgcatcgacgacgcatccgttcgcgtcgacgagcatggcgcgcgacgaggtggtaccctggtcgagcgctacgacgtactttggcatgcatgctcctcaatccaaccgaccacctcagtataaacctgagcccgccccggttcgttgaggatttcgtggcgcatgccctcgtacagcttcacctccacatcctgcacaccggcgcggcgcaacaggtcggccgccgcacgcacgcccttgccgcacgcgcccaccgggtcctcggcgccggcgacgaacagcacgggcaatcccttcggcaccttcgccgcgcacgacggcgacaccacctcgcccgtgaggtcggtgagcgtggcgtagccgccgacggagaacatggcgccgcacagctcgtcggcgatgtaggcgtccacgacggccggatcggtgcagacccagtcgtgcggcgtgcgcgggttctcgatctgcttggcgaacgcgcccacgcccatgccgtccagaagcttgctgcggtagtcggcgcccttcgtcttcgcgaggaagcgcgccagcgcgttgcccgccttcgacaggacgaggggctgttggcccgtgccgcagatgacggccgccgccacgtcctcgccgtggcgcgccaggtaggcgcgcgtgacgaagcttcccatggaatggccgaacatgatgtaaggggtttggcgggagtagcgggcggtgacggtcttgcgcagttcgtggacgtcctcgatgagcgtctccttgccgtcgacgggcaggcagccaagctcgtctgcgctggccacgctcttgccgtggccgatgtgatcggcggcgcacaccacgaagccctgttccacgaggaagcgcgcgaactcgtcgtagcggcccacatgctccaccatgccgtggacgatctgaatgacgccgcgcggcgcgacacggcggctgcccctcgtgcgctcgggctcccacacgaggcctttgatggtggacgttccgtcatgagacaaaaagccgatcggcgcgactgcgaccgttgtatccata

SEQ ID NO: 9917 - DNA, 196 bp, Unknown
  gut microbiota DNA sequence
ggatcggttccatctgaatcggaagacgcgcacgcggcgcctcaaggaaatatccgatatcctgcggaagcatcacttcctgaagggtttcacgcccgaggcctttcgcgccatgctggaggatctgggccccagcttcgtgaagatcggccaaacgctgtctacgcgctcggagattttgccgaaggcgtactgc

SEQ ID NO: 9918 - DNA, 190 bp, Unknown
  gut microbiota DNA sequence
actcaggttcgccggcctcgaatggaagaacatcacggcatcgaagatcatgtgggtggtcatcgccgccatagccatcatgccgcttctgtacggcgcgctgtatctggcggcgtttcaggatccgtacgcgcgcctgaacacggtgcccgtggccgtggtgaacgaggacaggggcgcggtgatcgcc

SEQ ID NO: 9919 - DNA, 308 bp, Unknown
  gut microbiota DNA sequence
gtcgtccaccagggcgctcgacttggcgtaggcggtgctgcgggcttcgaagaagtcggtcttgatcatgttcgcgttcgagaactggctcacccacgacatgctctccggctcgcgctcgtggccctcgtacaaaggctcgaagcccagctgcgtgcagcgcaggttgcccaggtactggatgtagtcggtcaccatctgcttgttgaggccggccacctcgtcgccgatggcgtagtggccccagcgtatctcttgctcgcaaccctccttgatcatggcgcggtactcctccaccagctcgggcg

SEQ ID NO: 9920 - DNA, 535 bp, Unknown
  gut microbiota DNA sequence
attgtagaagaacatgaagccgctgtagaagtacacgccctccaggatgtagttcgccaccagcacgcgcgccagcgcctcggggctcttgtcgtcctggaactggttgtacaggttgccaatgaactcgttgcgcgccagcaggtgctcgtcctccttccactggtacagcacgtcgttgcgctcctgcggctcgcagatggtgtccagcatgtagctatagctctggctgtgcaccgtctcctggaacgtctggatggccaggcagaggttcacctcgttggccgtgatgtactcgcccacggcaggcaggttcgccgattgcaggctgtcgaggaagatgaggaacgacaggatcttgtcgtaagcgcgccgctcggccgcgggcagcttgcggtagtccttgatgtccaccccgaggttgatctcctcaggtatccagaagttgttcatggcctggcggtaccagtcgctcacccactcgtacttcatattgttgaagtcgttcaggttcgtcgtattccccccgatcatc

SEQ ID NO: 9921 - DNA, 1571 bp, Unknown
  gut microbiota DNA sequence
gttgtagaagaacatgaagccgctgtagaagtacacgccctccaggatgtagttcgccaccagcacgcgcgcgagcgcctcagggctcttgtcgtcctgaaactggttgtacaggttgccgatgaactcgttgcgcgccagcagatgctcgtcctccttccactggtacagcacgtcgttgcgctcctgcggttcgcagatggtgtccagcatgtagctgtagctctggctgtgcaccgtctcctggaaggtctggatggccaggcacaggttcacctcgttggccgtgatgtactcgcccacggcaggcaggttcgccgattgcaggctgtcaagaaagatgaggaacgacaggatcttgtcgtaggcgcgccgctcagacgcgggcagcttgcggtagtcctttatgtccaccccgaggttgatctcctcgggtatccagaagttgttcatagcctggcgataccagtcgctcacccactcgtacttcatattgttgaagtcgttcaggttcgtcgtattccccccgatcatccgccgatccagcacatcggtatcccccaaaggattgaacagcggcttcttcttcaactggctcatacaaactcttccttccagaaaatcagctacgaacaaacaaaagcctcctgggcgagcgaagcgacgcccgtccaggtcgaaccacgaccagggagggggtgcccggcgtgttcaccaagcgacctgcttgcaggcagccggggcgcagtgcccaccaagcgagttccatcacgtcggggctgggtgcggtgcccaccaagcgagttccgcagcgaagcgaggactgtctgagcgactgggcattgcccccagccccatctcacaggtggaacccggcgactgggcaccgcaccccggctgccgtcgcgcaggtggagctcagcgactgaacatgccggaccccctcccgtcccccaggttcaacctacgacgaacacacttcgcactcttccacttccaggctcttcgaccgcacgtagtagatggttttcacgccttcctcccaggccagcaggtacagatccagcacgcgcctgaacgtgtactcgttcgtgatgtacaggttcatgctctgcgcttgatcgatgtgccgctggcgcacgccgcaggcgcgcaccgaccacgtctggtcgatgagatgggcgttcttgtagtaccagaacgtgtccatcgacagctcgggcgccacacgcggcatgaggccgttcttcttctcctcgaggaagtagcggttcatcaccgggtcgagccccgcagtggtgccggcgatgatgctggtggagctggtgggcgccacggccagcaggtagccgttgcgcaggccgtgctcggccacgtcgcgcgcgagctcggcccagcgcccgtccgtaaggccgcggtcgcggaagtactcgcccgtctgccagccgcttccctcgaaaaagccgtacgcgcccttctcccgcgcgatggcgcagctggcgcgcaccgccgcgtaatgcacgtcgccgaacacgcgctcggcgaaggccagatgctcttcgctctcccac

SEQ ID NO: 9922 - DNA, 886 bp, Unknown
  gut microbiota DNA sequence
gaaaccgtacgcgcctttctcccgcgcgatggcgcaactcgcgcgcaccgccgcgtaatgcacgtcgccgaacacgcgctcggcgaaggccagatgctcttcgctctcccaccggatgccgcttttcgccagcagatggtggtagccgctcacgcccaggccaatgggacggtactgccgattgttgatctgggcgtagggcaccgggaagaagttgaggtcgatgacgttgtccagcgcgcgtaccgcgctttcggtgacgtgcgcaagctcgtgcggatcgcccatgtcgatatgacccagcgacaggctggccaggttgcacaccacgaacgcgcccggcttcgtcacggtgaccaccacctgctcgccgtccacgtcctcgatgcgctgctcgagctgctcgatggcgcccatgttctgcgcgatctcggtacacaggttgctgcagtagatcatgcctcggtgcttgttcgggttcgcccggttcaccgcgtcgcggttgaaggtgaacggcgtgcccgtttccacggcgctcttgatgatgaggcggatgacgtccttgatggggatcgcgcgcttcttgatgcgcgcgtcggccacgcactccaggtacttgcgcgtccattcctcgccgtagcagtcctccagcgcgtagcctttcaccgtgaggatctcgtgcgggcacatgaggtaccagtcgccctcgatgttgtcgcgcgcctgctgccagaagtagtccggatagcacacggccgggaacacgtcgtgcgccttcatgcggtcgtcgccgttgttcgtgcgcagagccaggaactcgggcaggtcgcggtgccacgcgtcgaggtacaccgccacggcgccctggcgcatgcccagctggtcc

SEQ ID NO: 9923 - DNA, 17985 bp, Unknown
  gut microbiota DNA sequence
atgcgccttcatgcggtcgtcgccgttgttcgtgcgcagggccaaaaactcgggcaggtcgcggtgccacgcgtcgaggtacaccgccacggcgccctggcgcatgcccagctggtccaccgccacggccgtgtcgttggccaggcggatccaccggatgacgccgccggccgccccgtcgaagccgcggatggcgctgccgctggcgcgcaccttgccgaagtacaggcccatgccgccgccgtacttgctcaccttcgcgaagttgtcgatgctgcggtagatgccgtccaggctgtcgggcaccgtgtcgatgaagcacgacgacagctgatggaacggcttgcgcgcgttcgacagcgtgggcgtggccatggtcactttcagcgtggacagcatgtcgtaaaagcggcgcacccaccccatgcgctcgtcggggcgctcctccatggcaaggtgcagcgcgatgccgaggaacatctcctgcggcgactccagcggcgcgccctgatgcgtgcggatgacgtagcggtcgagcaaaagctgcaggccggcgtaggtgaacaggtcgttgcggctaagatcgatgaagccggccgcctcgtccagctcggcgggcgtgtaatgctgcaggatgtagtcgccgtacaggccctcctcggtaaggaaggccaccttctgcgcgaacgtctcgatgtgccgggcggccaggcgctcggccaacgcgcgatcgaactgcaccatcagcaggcgcgcggcgatgatctcccagcgcggcgcctcctgcgtggtcagctccaccgccgccttcaccagcatggccagcaactggccgtcggcagcgtcgggcttggcgaacgactggaacttggcgctgaggtgggcaagctcgtactcctcgccggggaactccttctgcaccgacgccagcacgcccggcagcgcgggcacgctcggcagctgggcgcacaaacgctcgcgcgcggcgcgcttgcgggcgcggtcctcgcggtacaggatgtagcttttcagctcctcgtaatggttcgcttccatgagggcgcgctccacgagatcctgcacgtcctccaccgagacggagccgccttcgccctgctccgcgctcgccatcgcgcgctcgatgcgcgcgatgaggcggtcggcctcgtcatcatctagcaccgtgcccacgctggcgaaggccgcgcccatggcgcgcttgatcttgccagcctcgtaggcttccacggtgccgttgcgcttggaaatctgcatgatgtcgtctcgcccttcgttctccgattgcggtgcgttttgagagcgaccatcgtatcacaatatgttacaaaaatcgcaacatattggggaacggataggcaacgcccaccacatcgacgaaggcgactgacccgccgagcgcgcaaaaaacggcaggcgacgcagaacggtcgcccgccaacctgcagcttcacggccgaaagcagcgcgcagccgacgggaacgcgaccccgggcgacgagccggaggatcgatgtgcggcgaaatcgagcttttggcagtctgagcccggtttctttcgccgtttcgaaaccgcaggaaaacgcgacctggggtttttcctcgcggcattccggacaaaaacccgatgactgccaaaaacccgatttcgccgcacatcaagcgagcggaaccgtcgcacccgtcgcgaaaccaacccgaccgagcagggcggtcgcctacttcttcgcgcgatcgtactagtcggcgccgacgaccacttccacggagctcccgtcccccacgacatcccctccacgaggggctcgacggtttcgatgcccaactcgtcggccacctcctgcgcctgcgggcgattgcctcctcgctccgagaaccgtcacgagcagtgcacgccttgccaagcgcgaaggtgcggttcggctgctggggtataatcctgcatacgtgggaaggggatgcatgaaatcgctggaacgggtgcacgggacgaccggcatcaaaatcatcatcggctcggcttttttctgggcttggctcgacgcgttgttcatgagcatgtttttcgtccggccggaggccgagggcttcatggccgagatggccactatagccgtgttcggtctgagcctgccgtggctcgcgctgtcgctggccaagccggccgcatgcaacggcctgctggcgaagaagcgcgtgccgctcgcgttcgccgcgctgggcacggcgggctcgctgctgctcctgcttgccggcatcaacctcaactggatcgcgctcgtcgccggcggaacctgcgccggcgcgttcatggcagcctaccagctggcatggggcgctgcgtactgccacgacggcgagcggagcgcgacgccctacgtggccggcggcttcgcctgcgccatcgtcgtcgacgcgccgcttctgttcatgatacccgaggccgccgccgtgttctcggcgctgctgcccctcgtctcgggcgcgttgttcgcgagcatcgacccccagttgcgcacgtaccgccgcaccgcccccgtcgacccgctgccgaagcggagcgtccgctcgcgcctgaaagcgcacctcggaacctcgatgatgctgttgtgcgccgtggccctcgtcatgaccgggttcggctacctgcagcacctcgtttcgttctcgcctatcgccagcgacggctatcccaacggcatcctcgtgcaagtcgcgcgcggcgtcacggcggtgctcgtgttcgccatcgtcgtgctgggacggcgccgggcaagcgcggtgtaccgcgtggggctcctggccatgatcgccggcttcatgctgatggcgtttctgttcggcacgaacctgttctgggtgtcgggcgccatcatcatcagcggctacacgatcctcgacctgctcatctgggtcgccttctcgcaaatcgcctacgcgcagtcgcgcgacccgctgaaaaccatcgcgctcatgcggctgctggccgtgctgtgctacccggtgggcgccgtcgcgggcatcatgctggtaggcaacggcgagacgatgcacggcaacgtggcggccgagaccaccgtggttggctacctcgtggtcatcgccaccgtgctgctgctcagcagcgaggacatgtggatgctgacggggcgccagcagccgagcctttccggcgacgaccgcgccacccaggaagagcgcatcgacgcctggttcgacagcatcggcctcactgcgcgcgagcgcgagatcggcctgctgctggcgtacggccgcacgcagccctggatcgccgagcgtctcagcatatcggagaacactgtgggcacccacgtgcgccacatctaccagaaggcggacgtgcacgatcgccagcaattcatagattcggttctttcacctgatcagacggcatcacccgaaccacgtgatcaagcccgctagatcacgggacctgcctgatattcgcaaataaggtcatttgcgcgttgtgcggccgcgcgtcttcccgcaccctgctttcagcgcaacgcaccgttgcgcagcccgccccgcgggcgcaaagggagagggcccgcgaagggtcccgagggaaggggtatctggatggatatcaaccgcaggaatttcttgaagggcgcgctcgtcaccggcgccgccgcagccgccgccgtcgcgcttccggcatgcagcccggctgcgccgtccgacgcatccgacgccaagagctcgtcgaagggcggcgagacgaccggcgcgaagcacacgtgggaagtcgcgcccgagcccatcgccgacatcgccgagacgcaggacttcgacgtggtggtcgtaggcgcgggtctggcgggcatcaacgccgccgaagccgccgcccgcaacggcgcgaagacggtggtcatcgagcgcaacaccacgttctccgtgcgcggcgtggacgtggggcacatcggcagcaagtaccacaaatcgaacggtttcgacctcgacccgcgcgtggctgcgcgattcctgcaccaggcgtcgcaccagaccacgaactacgacctcatctacgtgtgggcgtcgcgctccggcgaggtgttcgactacatcgaggatctgggatccaagaacggcgtgagcatggtgcccgcgctgtccggcaccgcgaagtacggcaactggtccacgttgtccgaccgttggcgcgtctatcccgatgccgtctccttcgtgcgcggcggcgagacgtacgacatgcgcgatgacggccagccggtcaacgtgacgctgggcgagctcgtgtacaactccgccgtggacaacggcgccgagttcgtgttcgaggcgcgcgccgagcagctggtgggcgacgcggcaagcggcatcaccggcgtcgtcgccaccacgaaggacggcaagcacgtgcagtacaacgccaagaagggcgtgatcctggccacgggcgacatcggcggcaaccaggagatggtcgacgcgttctgtcccatctcgaaccgctcggactccaactgctacgcgccggccgggttcaacaacggcgacggcctgctcatgggcatgtgggccggcgcggccatgtcgaagagcgaagccgccccgatgatccaccagttcacgctggacacgctcgagttcaacctgacctcgttcatcatgagctggcttgccgtgaacgccaacggcgagcgctacggcgccgagatgcccttcgagcccatgctgacgaacgcccgcatgaacaccccgggcaacgtggcctggtccatcttcgactcggactacgagacctacatcatgcagcagcagcccgagcgctacgatcgcttcaccgacgggctggacgccgtcatggagaagtggctgggcaacggcaagctgatcaaggccgacacgctggatgacctggccaagcagctggacatcccggccgacacgttcaaggccaccgtcgagcgctacaacagcatggccgaggccggcgaggacgtcgacttcgacgtgcccgcgcagtggctcgcgcccgtgaagaccgcgccgttctacgccacgaagaacgtgtgctccacgctgaccatccccttcggcctccacgtgaacgccgactcccaggtgctcaccgccgaggacgagccgattcccggcctgttcgccatcggcaacgtgcagggcgacttcttcggcaaggactacccggtgcactgccccggcgtcagccacggccgctgcgtgacgttcggccagctggtcggcgaagcgtgcgccaaggacacgaccatcggcgagctcgacttcgcctaagcgcgagcgaccgacccacgaaggcgggacccctccctcttccgccttcttctcgatgcggccgtcctccggggcggccgcggtcgtttcgcgacccacagggttcccgccgataccggaggctcttgtcagccgatcgccgccagctccagccgcaagcacagccagcgctcgcctccgcgctgttccaggcacgcgtccagcgtaccgcccatctgcccgaccagcgagcgcgcgatggccagccccaggcccgaccgctcgcccgagcgcgccgcgtcggcggtgtagaagggctcgaacagccgatcgacctcgcaggagaacgccgcgtcgacatcgttcgcgaacgtcaccgtcacgcgaccgccgagggcctcccccacctccacgtcgaaggtcgagcgcgcgtacttgccggcgttgtgcacgaggttctccaccacccgctccagcgcgccctcgtcgccccgcacgcgaaccggccggtcgggcacgcgcaggcgcacttccaaaccgcgctccccgaacagccggtagcgccccgccaccgactcgcgcaccaaacggcccgcctccaccggctcgcacgccagcggcgcatcctcgttgcgtgcctgtgacagctcgtagaactgcgcgatcagccgctgcagcgcgtcggctttgcggcgcaccgtggcaagcgacgcgcgcgtatcggcgtccatgccctcttcatccagaagcgccaagtaccccacgatagccgtcagcggcgtgcggaggtcgtggctgatggattccacctgggccttcagctcggcctcgtggcgcgcgtacgcaaccccctgctcgcgcacggccgcaagcgcctggttcacggtgcccagcagcgcctccaagtctttgtcgggctgcggcagcttcacgatgcggttgtcctcgaggccgcgcacgatttcggccagctcgccgttcgcccgccaaagcgagcgcttgagcagcgcacagcgcacagcgaagaacaccgccgatcccagcgccagaaccgccaccgccccgaggactgccgtcattgccgcatcctttcccgtcgcgcccctacagctccgtcttgcttgcgcgccacagacccgcgatgccgaacaccgctacgcctgcgaaccccgcgatcaggcacttcgccaaacccgccggcgtgtcccacagaaactcggccaggccgctctggttgatggccacctcgttggagaagaagttgtacggcaaccagctggccagcgcgccaaccggctccacgaccattcccaccgcgtgcagcgccgaaggcacgatggccacgatggccaaccacaccagaaacgcagcgctcgtcttcggcagcacggagcacaccgcaacgcccagcacaacgcaggcgacggtgaacggcagcgccgccgccacgcccttgagcaggatggacaccgcgtccgcgggcccctccagcagcagcacggcgctgcccacgtacaccgccaggatcaccgtcatgctggccagccccagccccgtggacacaaggcacttgcccacgaacagatcgcgtcgcgagcagccgtccgcgacggcgttcttgaacgtgccgtccttcctatcgtcggcgaacagcacccagacgagcagccccgccagcagaaacagcgagggcagcatcgagatcagattgctgagcgagaaccgcacggtggcgtaggggaagtcgggcgtgctcgccatcgcccacagcaatacgctcgatgccagcacgatggcgcacggcacgccggtgaacaggtacagctcccggccgtgcacgatgcggtagagttcgctcttcatgtagttcagcatcatgcgacccccttctccttcagctcgagatagtactgctcgagcgacatcttcctgcgctccagcttggacacgtccatgcccgctcgggcggccaggccgctgtacgcctcgatgcccgccgccgggtcgaagatgcgcacggtgccgtccagcagcaccaggtagcgctcatgacgcagctccttctccagcagcgcggtgaagcgcgcggcatccgacacggcgatgtccacgtagtcggcgcaccgctcttgcagcgtgcgcgcgctcacctgctccaccacgcaaccccgtttcaggaacgcgtaggtcgtggccatctgctcgagctccgccaagtggtggctcgatatcacgatggtaatgcccttgtcgcggttgagcccttggaggaacgcgcgcatctccacgatgccgctggggtcgaggccgttcgtgggctcgtcgaggatcagcacctccggctcgcccaaaagagccatcgccaaaccaagacgctgcttcatgcccagggacagcgtgcggcagcgccgatccttcgcatacgccagccccacggtgtccagcacgcgcgccaccgcgtccttgcccggcacgcccttgcgtatgcggcagcattccaggttcttctccacgctcaaacccggatagaagccggggctctcgatgatggagccgatgcgcgtgcgctggcgctccaactcgcgcggctcgtgcgcgccgaacaggcgcacctcgccctccgtgggaaacgccagcccgcacagcagcttgaacagcgtcgtcttgcccgcgccgttgtcgcccaccacgccgaatatgtcgccgcggcggacgctcacgtccgcgtcgtacagcgcgcagacgtccccgccgtagcgtttcgtcagccccctcgtctcgatcaccgtgtccatggaatcgtttctccctttcttccgcttgccttgtcgttttggggaaacgatacgatgcagcctggaaataagtcctcaagaaaggttaaggaaagcgtaaaggcccgcatcatgccagcttgaagccgatgccccacacggttttgatgtagtcgcccgcccctccggccgccgccagcttcttgcggatgttgctgacatgcacgttgacggcgttctgctcgccgtaatagccgtttttccacaccagctcgtacagcagctcgcgcgagaacaccttgtcgggcgaacgcatgagcacgtgcaggatgtcgaactcgtgcgcggtcagcgccacctcggcatccccgagcgtcacgcggcggcgcgcgacgtccagccgcaggtcgcgatggacaagcgcctcgtcgtcggggcagacgccgcccgcgcccgcagccgcgctcgctcccgcagcgcggcgcagcaccgcatgaatgcgcgcggccacctcgtcggggtcgaagggcttcgtcacgtagtcgtccgcgccggccgcgagcatgcccaccttgtcggccgagcccgccttcgccgacaccacgatcaccggcacgcgcgaggccagctcgtcgcgcatgcacgccatcaacgtcggcccatccatgcccggcagcatcatgtcgagcagaaccagatcgaacgccgcgcgttccatctgcagcagcgcttcggtgcccgaatacgcctgcacacagccgaatccctcgcgcgccgcgatcttcgccagcagcgcgttgatatccgcgtcgtcctctacgacgagaatggtgcgctcgtccacagcctcgccccttccggcgccgtccttccgtaaccgtttcaggatacccgaaagggaaccgcacggccacggagagcccgcgacgcgctatcatagctgcgactgaacgaaaggaacgactcatgaccaccgataacgcctgcacgcaacgccccttcgaccgcgaagcgctcggtcgccgcgcgctggagctgcacggcatgaagtacaactgcgcccaggcggtcgcctgcacgctcgccccgctgatcggcgccgacgaggagctgtgcttccgcgctgccgagggactgggcggcggcatgggcggcctcaccgaaacctgcggagccgtatcgggcgccgccatggccatcgacctggcgaacagcaacggacaagacgaccgcaccagcaaacaggcgacgtaccgcatcgtgcggaagctcgtgagcgatttccgcgagcaaaacggctccaccctgtgccccgagctcaaggggatcaagaccaagcagcccctgcgcagctgcgacggctgcatcgtcgacgcgctccagctggctgcggacgccctggccggcctccccgccgacaaaccgctcgacgcgtagccggacgatgcacgcggttcgcgtcgtccgacgaaacggcgcgctcggcgaacgggccatccggtatcatggaggagatcgaaacgaaacgcacgcggaaagaaggcggtccacatgtcccccatcgcttccaacgtcaagttgactaagaccctcaggacggtcgcgctcctcgccgccatcgcgctcgcagctgccctcggcgcctgctctgctccgcccgcgcaagaaaaggcgcagcaagcgcagccggagccgctcgtcgtgaacgacacgccggcgcccccggtgcccgaccccgagtacatcctcgtcatcggcgacgactcctgggaagagtacacgccgggccacgccgacctcatgatgctcatgcgcctcgatttcgagaagcacctgatcacgctcgtcagcgtgcctcgcgataccgcctacgttttccctgacggcaacaccgcgaagctcaaccagatgctgaccaacgccggtcccgaagcgcagtgccaagccgtgtccgacgtcgtcggcgtggacgtctcgcagtacgtggtggtcggcttcgacggactgcagagcatcgtggagcatttcggcggcctcgacgtggacctgccctacgggctgacgtacaacttctacacgaaggaccatcccgacgaggtgtacgaagccgggccgcagacgctcacgccgtggcgcgccatggcgctgtcacgtgcgcgcaccggctacagcgacaccggctaccagcaggagatgatccgacaggtggtggatcgccagatgatgacgcggttcatcgagctggcgtacgacgaccctgcgcagaccggcgccctgctgacgcttctgcagggcttcgtggaaacgaacgtgccgctcgacgaccagctggcctgggcggacgagctggcaagcggcgacgagatcaccgtgcacagcaccaccggcccctactacggcgatttcctggaggaagccggcggcctatggctcgtgcccgaaagccgcgaggaatggaaagccgtcatgaaggccgtcgacgctggcgaggatccagcccccgccgtgagcgtctggagcgccgagacggaatccccggaagcccccgtcagcgtcaccacggtgatcgacctggggtaaatctcctctcgacaagataaaaacatctgcccgatacctggatgagccttgcgtaacgccctgctcggcagggttcgcttatgctacgatgaggttcagagaaaggacggcatgcatgcccatcaacaaggcggttcttgccgcgttcaaggcggcaacacggcttcggcccgacatcagggagttctacaaaacgcagcgcctcgccgaggacgtcagcgccaagctcgtgctgcccaacccccgctgccgcatcgacgaggctttcgccacgatgcccgacggcttcgaggtgccgctgcgcgtgttcacgccgcttgacttcgacttctcgctggccgaggggctgaaggtatccgaggactcgcgcggcaccgtcctgttcttccacggcggcggctgggtgaacggcacggttgacttctacatcgacgcgtgcaccaccatggccatccaactggagcgacgcgtagtgtcggtcgactaccggcgcgcacccgaacaccgcttccctcaggcggccgaggactgctacgaggtggcgcgccagctgtacgcaggcacgctgctggaggatgtcgaccccgagaacgtggtgctgttcggcgacagcgcgggcggcaacctggcggcggtgctgtcgctcatggcgcgcgaccgcggcgacttccagccgcgcacgcagatgctgctgtaccccgtcacgtacaacgaccacgacccgttcacgtcgtggttcgactcggtgcgcgagaacggcgaggactacctgctcacctggcgcgacatcgagggctacatggacctgtaccgctcggcgcccgccgatttcgacgacccctacttcgcgccgctgctcgaccccgacctgtcgcggcaaccgcgcacgctggtcatcagcgccgagtactgcccgttgcgcgacgagggagaagcgtacgcggcgcggttggagctggaaggcgaccaggaggtgcagtgctaccgcatgctcgacgccgtgcacggctaccttctgtatccgtcggtgctcagcctggtcaaggacacgtaccgcatcatcaagcatttcttggacggcgacgatctcacgcaggagggtgaacccgcatggctcgggatacttggtaccgactagacaacgtcggcaagttctactcgtcccaggcgggcagctcggcccagacggtgttccgctacgcagccaccatgcaagacgacgtggatcccgctgcgctgcagcatgccctcgagaagacggcaggcgtcttccccaacttcaacgtctgcctgcgcagcggcatgttctggcactaccttgaacagtccgcccaggtccccgtcgtgcagcaggagaacctccccatctgctacggactgcacgtccacgcgaaaagcgtgctgttccgcgtcagctaccacgccgcgcgcatcaacctcgaggtgtcgcacatcgtgtccgacgggcggggctcgctcagcttcttcaaggcgctgctgcacgcctacatcgaggagcgctacggcgtggagggcgtgcccgcagaatacgacggctcagaccaccagaagtccgagaacagcttcgacaaatacttcgaacgcgacaaagccgccgcaacgcgggcaccgaaggtataccggctgaaaggctggcgcgacgaggccgatcccacgttcttcgagtaccacctccccgcgaagcgcgtgctcgccctggcgcgcagctgggacgtaggcgtgaccgcgctcgtgatcgccgtcatcatgtgcgccatccgtgccgagatgccgcgccgcgaccgcagccgcgccatccgcatggacgtgccggtcgacctgcgccagttcttcaaatccaccaccgtcaagaacttcttcgggctggcgttcgtatcctacgtgcccggcgacgaggacgagccggtggagacggtcgcccgcatcgtgcaggatcagctgaaaaccgccacgcaggccgaagagctcaagagccgcatgaaccgcatgatcgcgctggagaagaacccgcttctgcgcctggcgccgctgttcgcgaaggacttcatcctagggctggcgaaccgcctggccgcgcgcgacgtgaccaccaccatgtcgaacctcggccccatccgcatcgacgaacgcctggccccctatatccgcgacgtcaacatcctgacctcgaccaccagcctgaacttcctgatgtgcgcgttcggcgacgatctgagcatcggcatctccacggtgtactcgaacccggacgtcatcaagaacatctgcaggttcttctcctgccaaggcatcgaggggcgcatcaacatcaacaagacaaaagaagaggtggcggaagaccgtcttgaagccaagatcgaggcctcggtgaagcgctggggagggcaaacccccgcacgcgaaggcgcgagcgcgaagagcgaggcgccggcgcacaacgagacggacgcgagggaggacgacggccgatgaaacgatgcgagaaatgcggcgtgcagttctcgggcgacctcgaccggtgcccgttgtgccaagccgagctttcgggcgacgcgtcgcccgcggtgttcccgcgcaacgaggtgcgcaagtcgggcgccatcgcgctggcggtgctggcgttcgccacgggggcgtgcttgctggtgatgctgttcttgggtcatctgctccagcttccgggcgacatcgtggtcacagtctgcgtcggcctcgtggtgaactacctgttcgtgcgcaacatcctcacgcacacgcccgacttcctgcgcgtcgtggcgcgctacttcctcgtgctgctggccatcgccgccatctggttcctcgtttcgcgcaacccggtggtcaccaccttcgtcatacccggcatctgcctggtggcgctcgtgttcgacggcgtgctgctggcggtgttccgcggcacgttcgtctcgggctacgcgaagtacctgctgttcgacgtggggctgggcctcatcccgctggcgctgcaggcgctggggctcactacgtgggacgtcccttcgctcgtgagcgcgctcaccgccagcgtgttcctgctagggctggtggtattcgcgcgcaagcagctgacagccgaaatccgcaagctgttctcggcgtagggacgctagcgcgaaaacgcccgaccccgcaggggatcgggcgccgatcggttccgctcgagcaatgatgcgcggccgatgcaggcttacagcttgcccaccaggtcgatgcccggatggagcacctcggagcccggcacccagcgcgcggggcacacggagtcgccgtgctcggccacgaactggctggcctgcacgcggcgcagcaactcggcggcgttacggccgatgttgccggcgttcacctcgtagcacacgatcttgccctcaggattcacgatgaagctgccgcgctcggccacaccctcctcctcgatgtacacgtcgaagatgtcggccagcttgtgcgtggggtcggccagcatcggatacggcaggtttttgatgttctcggacgcgtcgtgccaggccttgtgcgcgaaatgcgtatcgcacgacaccgcgtagatctcgcagttcgcctcctggaacttgtcgtacagcgcgccgaggtcttccagctccgtcgggcacacgaacgtgaagtcggccgggtagaagaagaacacgctccacttccccagcacgtcgtccttcgtcaccgtttcgaagtcgtcgttatggaacgcctggacggtgaagtcgtcgatttccttgttgatcatggacatggttgctgctcctatctcttgaagacgcttccggcgggatccgtcttcgccaagttgttatccaaagcgaactttctcataattgctactcacaagctatcgtattctaacgtctccggacaatctccaaaagcacgccggctctccgaggccgtccgatggaaggtttgtcatattctcgacaagtttcgcccgcccgaagcgcggcgatggcatactaagccggcttcgcgagaaacccgcgcggcaaagagcgctcctctcgccgcaatccgatactccccgtcccgaaggaaccatccatcctatgaagaaaagcctgctcgcccttgccaccggatcgttcgcgctcgggttcgccgaattcgtgatgatgggcatcctgcccgcgacggctacggggttgcgcgtcagcgtgcccgatgccggcgatttcatctccgcctacgcgttgggcgtgtgtgcgggcactctgttcctcgtgttcggacggcgcgtgccgccgaaacggctgctgctggggttcgtcgcgctcgtggccgtcggcaacgccgcggccgcctgcgcgccgagcgccgaagcgctggttgcggcgcgcttcgtgtcgggactgccgcacggcgcgttcttcggcaccgccaccatcgtggcgcgcgagctggccgaccccggccgcgaaggccaagccgtgtccatcatggtgctgggacagaccgtggcgaacatggtcggcgtgcccggcggcacgctgctggcagcccttttgtcgtggcgcgcgacgtttttgttcgtcgccgtatgggccgtcggctcgcttttgctgatcgcgcgcttcgtgcccgccgtacgccccatccccgacgcggggttggccggccagttccgcttcctgaagaagccgggtccgtggctggtcatcggcgcggtgttattgggcaacaccggcatcttctgctggtggagctacgtctcgccgtggctgaccgacattggcggctttccggccgacgcgctgcccgcactgctcgtgctggctgggttcggcatggtggccgggtcgctcgtgggcggacgcctcaccgaccgcacgtcgcccggaaagatggcggcggccggccaggccatcggctgcgctgcgctgctgctcatcttcctgttctcgggcacgccggccaccgcggcggcgctcatgttcctgtgcgcgttcggcatgttcttcgtgtccagcccccagcagctgctcatggtgaaggtaggccgcggcggcggcgagatgatcggctcggcctgcgtgcaggtggccttcaatctgggcaatgcgttcggcgccatgatcggccaaaccgtgctcaacgcgggcgcgtcctatgcctggccgagcctggcgggcgtcccctgctcgctcgccgccgtcgtgttgcttgccgtgttcttcaccaggttcgaacgccgctaccgcccttcgacccgatgacgccgatcggatgcttcgccaaggagggtgcttcccgaagacagccataacgcttgcttatccgggcataagcaagcggacggttaccgcgccccgcgagcaggactacaatagcggcgaaagacgatcttcgaaaggaacgccatgaaagagtacgacatcgtcatcgtaggcgccggccctgccggcgtgagcgcaggcatctacgccgcaagccgcgggctcgaaaccctcatcctggagcaaaaggccgtgggcggcatcatcggcggcgtgtccaccgtcacccactacgccggcatcctcgacgacgagacgggcgccaccttcgcccgccgcctcgaagcccaggcgttggaagccggcatcgagatcgtctacgaccaggtggagcgcgccgcccttgccggagagactaagacggtgttcaccggcacggaatcttaccgagctccacgcgtcgtcctcgcgaacggcagcacgccgcgcaagctgggcgtgcccggcgaggccgagctgcagggcaagggctgcgggctgaacgcggcacgcgatgcgacgacgtacgaaggcaaaagcgtttacgtgatcggcggagccgacggagccgtgaaggaagctctctacctggcccggttcgcccgacaggtgtccatcgtctgcgtggaagacgaactcgcctgcatcgcggaattccgccgcaagacggcggcaacgccgaacatccaagtggttccggccacgcgcgtgggagcgctgcacggcgcggaccgcgtggaagcgctcgacctcgtgtcgttggcggacggccgaacgcgcacggtagaggacgacggctgcggcgtgttcgtctatgccgggtcggagcccaacaccgccctctacgccggagagctgcgcctcgagaacggtttcattcccacgaacgaacgcatggagacgagcatctcgggcgtgtacgcggcgggcgatatccgcgcgaagcagctgcgccaggtagccaccgccgtttccgacggcgccatcgccgccgtcaacgccgcaaccctctagcgcacgctcgcctccgaaggctcctcgggttccggcgtgccttcgaaggcacggtcgacaggcgcctccggcatggcgccgcagcccgcgcagccgtcgcacgacccgccgcaccccgacaccgcaccgccttcgcgccgcttgcgcgctatgcgccgaaccgcgagcgccacgaggaccgcgacggccgcgcccagcgcgagcgtgcccgcgcccgccacgccgtcctccagcgcaaggcccacgccgcgcaccgcgaacgccgccgcccaggccacggccagctgcccgaacaccatgcccagcgcccatctcccgcccagctcgcgcctcaccgacgcgatggccgccacgcacggcgtgtacagcaggcagaacaccagcaaacccagcgccgccagcggcgtgatggccgccaccaggctggccgtgctgccgaacagcaccgacaacgtggacacgacgctctccttcgccatcacgcccgtcacgagcgccgtcgagatgcgccagtcgtcgaagcccagcggcgcgaacacgggcgcgatccagccggccaccacggccagcatgctgtcctgcgagtccgccaccacgttcagcccgaagtcgaacgtctgcaagaaccagatgacgatcgtggccaggaagatgatggtgaacgcgcgctcgaggaagtccttcgccttctcccacagcatctgcgccacgttgcgcgcgctgggcatgcggtagttcggcagctccatgacgaacggcaccgcctcgcccgagaacatcgacgagcgcatgagcagcgccacgagcacgcccaccgcgatgccgccgaagtacaggcccaccatcaccgccgccccgttcgccgggaagaacgccgccgtgaagaacgcgtagatgggcagcttggccgagcagctcatgaacggcgtcagcaggatggtcatcttgcggtcgcgctcggacggcagcgtgcggctggccatgaccgccggcaccgtgcagccgaa

SEQ ID NO: 9924 - DNA, 12836 bp, Unknown
  gut microbiota DNA sequence
tcgaccgcatgagcagcgccgccagcacacctaccgcgatgccgccgaagtacagccccaccatcaccgccgcgccattggccgggaagaacgccgccgtgaagaacgcgtagatgggaagcttcgccgagcagctcatgaacggcgtcaacatgatggtcatcttgcggtcgcgctcggacggcagcgtgcggctggccatgaccgccggcaccgtgcagccgaagcccaccagcatgggaacgatgctgcgtcccgacaacccgatgcgccgcagcagcttgtccatcacgaacgccacgcgcgccatgtagccggagtcctccaaaagcgacaggaagaagaacagggtgacgatggtgggcaggaagctgagcacgctgcccacgccgttgaacacaccgtcgatgacgagcgactgcagcacctcgttcacgtgcgccgccgcaagccccgacgccaccacgtccgtgagcgcggagatgcccgcgtccagcagctcggacagccacgcccccaccacgttgaacgtgagccagaacaccagcgccatgatggcgacgaacgcggggatggccgtgaacgggccggtcagcagcttgtcgatggccgtgctgcgcgcatgctcgcgactctcgccgggcttcaccaccgtccgctcgcacacccgcccgatgaagccgaaccgcatgtcggcgatggccgccgaacggtcgagcccgcgctcggcctccatctggctgatgatgtgctcgagcgcgtccttctcgttctggtcgaggtcgagccgctccagcaccaatcggtcgccctcggccagcttgctcgcggcgaaccgcggcgggattcccgcgcgctcggcatggtcctcgatgagcgccatgatgccgtgcaggcaccggtgcacggcgccgtcgtgctcatcgggtgcgcagaagtcctggcgcacgggcggctcctggaaccgcgccacgtgcagcgcgtggtccaccagctcgccgatgccctcgttcttggacgccgagatgggaacgacggggatgcccagcagcttctccatctcgttcacgtcgatggtgccgccgttgccctccacctcgtccatcatgttgagcgccagcaccatgggcattcccagctccatgagctgcatcgtcaggtacaggttgcgctccacgttcgtggcgtccacgatgttgatgatgccgcgcggcttctcgtccagcaggaagcggcgggtgaccacctcttcgctggagtacggcgacatggagtagatgcccggcaagtcggtgacgcatgcctcgggatgccccttgatgcagccgtccttgcggtccaccgtgacgccggggaagttgcccacgtgctggttcgacccggtcagctggttgaacagcgtggtcttgccgcagttctggttgcccacgagcgcgaacgcgagcggcgtgccctcgggcagggggttctcctcggagcggtcatggaacttgccgccctcgccgaggccgggatgcgggacgggcttgccgagcgggcggctctcctgcgcgtcggccgcgtcgcgcatgtcgacgatctcgatcttgcgcgcatcgtcgcgcctgagcgttagctcgtagctatggatgcgcacctccagcgggtcgcccataggggcatgcttcaccatggtcacgtcgaccagcgggatgatgcccatgtccaggaagtgctgtcgaagcgacccctcgccgcccacggcggccacggtcgcggttttcccgatgggaagatcgttcagagttgtcaacgcccgtctcctcgcaacggccgggcaaccccctcgccctgccgctttgctcgcttacagtccgaagcacatggtaccgcgaaacaacccgtgacgcacgaaaaagtttcccatggtgaacgattgacgcaccgaaccgccgggcacgtgcagcttcccggcgatatttcaggtagaacattcgcgttggatcgaccggcagcatgctcttcgccatcttgagcgcacgtcgaagccgtctcggcgccccactgcccgaccgcttcggcgaagttcccgacttatgcgcacctctgccatgaaaagggggcaaaacgacaatgtaggcgagttatgcgcacatggcaggaagcctggattcgccgctgcggacgcttagaaaaccgtgcagccctctgaacaggcgtttctccaccccttcatcccgcgtggccaaactcggccccgcaaaagcgcgcgaaacgcgggaataggtgtggcagaagtgcgcataagtcggggacttgatggttttcgggccttttcgatggcagaagccttgcagcggagacgcgcagctggcgccggcaggaaaaccctccggctgacgccgcacgggatccttcgactccggcctacggcctgcgctcaggatgacaacctgaaccctacatcctgcgggcgggacgacaggacgggccggtgctcgccgagactggctgagggggggctcgctcgcagcgcttcttcgcgccaaatgaaaaagcggagggaaagggggttccctccgcttgcaagcgcgacggatagccagacgagaggagcttccgccgccgggtaagcagaatcgtgatcgaaagccttgcaatgatcgaggaaccacagcttatccgcttgggatccgctcgctcgatcgcttcgctttcgatggaagttatattaagctaacaatcgtcacgacgcaatacgagttagccaaggcatacatttccttcacatctcagccgaccgcgccctccgccgccgaacgccgccccgccccacggggccgcccggcgcgcacgaaaaaagggccgcgcccctctcggacgcggcccttccctgtcgtcacctggatcgacgacttgcaacctgcggcgcggcacagcgcgacacggcgcggcgccgacagcgactactcggcccagtcgtgaatgacggcctcgatgttgttgccttcggggtcgtgcacgaacgccgcgtagtagcccggatggtaatcgcgcgggccgggcgccccgttgtccgtgccgccggcggccagcgccgcctcgtagaacgcatccacggcagcggcatcggcggcgcgcagcgcgacatgcgtcgggacggcctcggcgccctcgggcagcggcgccacccacacgtcgcccggctcgccctccaccagaagctgcatgccgccgggatactcgatgccgcgcgcataccccagcggggcgagcgcggcctcgtaaaacgccttcgcctgctcgacgtccttcaccttgatgctcacgtggtcgatcatagcatgctccttttctctagccgttctgcgtgctcagctcttcgagattgccctccaacggcaacgggccgtccatctcctcgtcttccgcagcctccatgccggcaacgtcctcgtggccgggcaggatcatgttcagcacgatgcccaccaccgagcccaccgccagacccgacagagagatgacgatgccgcccaccggcaccacgatggccccggcagcgctataggcgatgcccagcgacagcaccaggatcagcgcggtgatcagcacgttgcggctcttcatgaagtcgacgtggttctccacgaggttgcggatgcccacggccgaaatcatgccgtacagcacgagcgacacgccgccgatgacgcaggccggcatggccgcgatgacggccgcgaacttcgggcagaacgagaacgcgatggcgaagcaggccgcgatgcggatgacgcgcggatcgaacaccctggtcagcgccagcacacccgtgttctcgccgtaggtggtgttggcaggggcgccgaacagcgacgcgaggatggtggccaggccgtcgcccagcagcgtgcgatgcaggccgggttcggcgatgtagttgcggttgcaggtcgagctgatggccgacacgtcgccgatatgctcgatcatcgtggcgaacgccagcggcatgatggtgatgacggccgtgatggccagccctgcatcgaagttcgcaccgacgatcgaaaacaccgtctgatcccaggcgaacggcaagccgatccacgccgcctcggccacgcccgtaaagtccacctgtcccgagaccgcagccacgaggtacgctccgatcacgcccaagaggatgggaatgatcttgaccatgcccttgccccagatgttggcgatgacgatgatggcgatggccaccaatgcgatgggccagttcgtggacgcgttcgtgatggccgagctggccaggatgagcccgatggagatgacgatgggcccggtgaccacgggcggaaagaaacgcatgacccgcgtggcgccgaacactttgaacagcgccgacaacacgaggtacagaaggcccgcgcacgccacgcccaggcaggcgtacggcagcagatcggcctcgccgttcggcgcgatggccgcatagcccgcgatgaacgcgaacgacgagcccaggaacgcgggcactttgcccttcgagacgaaatggaacagcagcgtgcccaggcccgcgaacaacagcgtcgcggaaacggacaggccggtcagcgtcggcaccaggatggtggcgccgaacatggcgaacatgtgctgcagcccgaacaccgccatcttcggcttgccgagctttcgtgcgtcgtagatcgcttccgggctgtcttgagcccccatcgtcggcgtcgatttgctctcgctcacgtgataccccttgtctgtcgagccttcggctgatggcccgtccgacccctggagcacgcggaccgaccggtagtattttgccacaacacggcccgccgtgcggcatcaatgccgacgagtccccttacttttcccgggacggcgttcccccgccgacttgcccgaccgccctccgccttgcgaggaggtctttccggtcgaaggcttcggcttcggccgagcctttcccggcccgctcggccgcgctttcgacggcgccttgcccgagtcgttcggcttcgactgcgccttcgcgcgcacgtcggctctcgtgcgggcgcccttgccgcttgccgccggcttgcgctccttgccgccgccctcgccttggggtctcagcaggcatttcgggccataacccaccagatccatgcgcccggcgcggcgtagcgcctccagcaccagatcgcggttcttcggatcgcgatattggatgagcgcgcgctgcaacgccttctcgtgcgggctcttcggcacgtacaccggctgcatggtgcgcggatccacgcccgtgtagtacatggccgtggacatcgtggagggcgtgggatagaagtcctgcacctgctcgggcatgtagccgagatcgcggcagtactcagccagctcgacggcctcgtccagcgtggagcccggatgcgacgacatgaggtacggcaccaggaactgcttcatgcccagccgacggttgacctcttcgtatcgttgggtgaaccgctggtacaccaggttgcgcggcttgcccatcaccgacagcacggcatccgacacgtgctcgggcgccaccttcagctggccgctgacgtggtgggcgcacagctcgttcaagaacgcgtcgccgtgctcgcgatcggccagcacgtagtcgaaccggatgcccgagcgcacgaacaccttcttcacgcccggcagcttgcgcagccggcgcagcaggcccaggtagtcggagtggtcggccctcagctgcttgcagggctcggggtacaggcagcgcttgtgcgggcacgcgcccgccttcagctgcttggcgcaggcgggcgcgcggaagttcgccgtggggccgcccacgtcgtggatgtagcccttgaagtcgggctcctcgatgatgagcctcgcctcgtccaccagcgagtcgtggctgcgcgtctgcacgatgcgaccctggtggaacgtcagcgcgcagaacgagcactcgccgaagcaaccgcggttgctggtcaggctgaacttcacctcgctgatggcggggatgccgccggccgcctcgtacatcgggtggtacgtgcgcgcgtacggcagtcggtacacggcgtccatctcactttgcgtaagcggcgcggcgggagggttctgcacgacgaactcgtggtcggaatacggctccacgaggcgcttgccagtgaagggatcgctgttctcgtactgcacggcgaagctgcgcgcgtactccagcttgtcatcctgcatggcgggaaacgacggcaacgtcaccgcgtcgtacacgtgctcgagcgacgcggcgcggtacaccgtgccgtcgatgaacgtgaggtcctcgatggccagccccgcgttcaacgcgtcggcgatctcgatgatggaatgctcccccatgccgtacgacacgaggtctgcccccgaatccagcaggatggagcgcttgagcttgtccgaccagtagtcgtagtgcgaaagccgccgcaggctggcctcaatgccgcccagaatgagcggagtcttcttgaacgtgcgcctgatcaggttgccgtacaccacggcagcgtggttcggacgccggcccgcctcgccgcccggcgagtacgcgtcgctgcgtcgacgcttcttcgccacggtgtagtggttcaccatcgagtccatgttgccggccgatacgaggaaggccaaccgcggctcgccgaacacggcgacgctttccggatcgtcccaatcgggctgcgcgatgacgcccaccttgtagccgttcgcctccagcagacgagtgatgatggccatgccgaacgaaggatgatcgacgtaggcgtcgcccgacacatatacgaaatcgacccgatcccagccgcgttcgagcatttcctcgcgcgttaccggcagaaacgccgctttcatggcaccaaccctcccgtttagtatgcgattcgagtctaccttaaacgaacgggccgtcgaagcacaacgcttcgacggcccaaaatcgcacaacaacgagagggattcagccctgcatgggcggttgaccggcgggcggcacgtgcggcggctgctgagaaggcgggcagcccgccgctcccgccagctcgaacggcatggggtcgtcctggccgcgccaagccggcacgtcgaactgacgcgtccagtaccccagcgcacgcacgatcatcatctcaacgaacacgtacatgcccgcgctcagaacaccgcacaggactgcgagcacgagaacgacgccgcccgtggcgaacacgatggcccagacggtggcaccgggatgcgccgattggatgttcaggttgccgccagtcatcgcgaagccgacgaacagtccgataaacacgagaacgaatatgaggacggatgcaacgataccgatggcgatggccagcaggagggccatgccgagaatgcgcagcaagccgccgaaatcgtgacggatcatggcccagatcttaccgaactggaaccccgcggccaggcggccgtatatgctcatgcgcatggaacccacccatgagaacagcgtcgcgaaaaacgccgccgcaatgatgagcagcgagaataccatcgtcgacagcccgacgaacagaaacacgccgccgtgcctgccgcccgaccatgcggtacccaggcccatgacgccgccccataccgcttccagcacccacggagccagcatgaacacgaagccgatgaccatcgcgaagaagccgcggctgtacagcttgccgtcctcgttgccgaagatgtgcttcggcatgggaccgtgcacgtcccatgcgatgtcgcgcgcccatccgtacaggtagcccagcacgaccagccagccgaagatgggcacgaagctgagcaacgacagcagaatgagcttgccgaaccaccccggcgtgttcttgatatcctgccaagcagcgttgaagtaaccggtttgcattagcgaccttcttttccgtttgcgtttgccaccactataagcgcgcgtattccccagaatccgtttcgttgccattccgtcagtaagacgaaacccgctctcgaatgccgtcagacgttaagagacccccaggatctgggggtctcttctacaagcatgttcgacggtcgtaagaccaacgaagcggaagttacttgagggtgacggccgcgccggcttcctcgagcttggccttgatctcctcggccttctccttgttcacgccctcctggatggccttcggagcgccctcgacggcctccttggcttccttcaggcccaggcccgtgatctcacggacgaccttgatgacggcgatcttgttgtcgccgaagccctcgagcacgacgtcgaagtcggtcttctcctcggcggcagcgccaccctcggccggagcggcagcggccacggccacgggagcggcggcggaaacgccaaacgtctcctcgatgtccttcaccagttcggacgcctcgagcagggacatctccttgagggcctcgatgatctcttcgcgagtaacagccatgttagtttcctttcaaagtggccgggtctccccgaccggtatgtgtaacgttcggtttaggcagcgttcatcacgctgccagcactgcgtttaagcagcttccttctgatcggccacggccttcgtgacctgagcgagaccgctgggaacgccgttgagggcaacagcgaggccgcgggcgacaccggaaatggcgccggcgatctgggccagcagctcttcgcgggacggcagcgacgcgatggcctccacctgagcggcggacacctgctcgccttccatcaggccacccttgatctcaaggttcttgttggccttggcgaacgtcttcacggccttggcggccgcggcgacgtcgttgccggcgaacacgaacgcgctcgggccggcaagcatgtcgtcgagcgtgggcaggttcgactcctccagggcgatgtgcatgagcgtgttcttgtacaccttcaggctcgcaccggattcgcgaatagccgtgcgcagggcctggatgtccttcacggtaagaccgcagtagtccacgacccacatggcggaaacgccatcgagatcttccttgatcttgaccagcgtctcttgattcttcacgttgggcatgtagtacacctccttcttttcaaactcgggttccgcccctcgcgggtgggaatcgtcgcttgaaaacaagaaacgacccccgccgtctcgtgacagcaggggtcgtcaaagcgcgaaacttatcagaaccacctcggcgggccgcatctctgcgattaaaccttgcggtgccagctgtcttgggcagcggaacgaactaaacaacttgcttattgtaccccgcccaaaacgaatgtcaagcgttttccttacgccgcgtcgcccttggcgtcggccgtatcctcggcctgcttcgtggtttcctcggccgccttctcgccgatgttcgtcttcgtgttgccgatgatctcctcgacggggctcgtcggctcggcttccacgtacttgaacgcgatggcgtcgccttccttgtacccgacgatctcgatgaggccgggcaacgcgaagtcgtagatgcccttgtcgccctcgagcgtcacgtagaagtgcgagttgccttccaccaccgcctgcgcgatgtggctgatcgtgccttgcgcctcaagcgagccggtgcccacgttcgaatcggccagcacgccgttcgtggccagcagcgcctggtaggctttctggcactcggccaccgtgttgcccacggccacgttctggtagcgttggatgtccagcatggcgaactgcttcaccagtcccgcgtcgtccttgagcgccatgaagtacgtcggctgtccggacacgttgatcaacagcgggaacgtggcgcggtagcgcaggttctgcacctggccctcggccgactgcatcgccgagtcctcggtcgcgcccgacaccgagtagaagtgcgactcggccgtgcgctggttgatcagcacgaagcccacgatggagttgtccgccgtggccgaggtgacgcccgtgtacacccacacgtcgtcgtccttggcgatgtagttgtaccccaggttgccgtcggtgcccggcgtggtctgcacgacgttgcgctggcccagcacggagttcagccagccgtccttgtacttgcccgaccagttgtactgctcaagcagcaggtcggtgggataggcgtggtcgacccattgcggcacgtcttcgatagccaggtcctgcgtctcgcccgtagtggcgtccaccatgaccacgcgcttgatggtggtgccgccgaacaggccgatggtgcgcgtctgcaccgggcatatccaccacggatggccgtcgtcgtcgatctcgaacgacttctggtcgaacatgtagaacggatagctcagctgcacgtgacggtcgatgttgcgcacgagcggctcggactccgagtagtagatggggctgtcgcccagcttgacgatctcggcgtcctgcgtggtcatgttcaccagggcgtacgccgggatgccgccctcgcggttcgtgaaccacttaaacaggtcggcgtagcccagcggactcacgcgcaccggcgcgctctgatagttgatctggctgtacaaaggcgagatctcgaactggctgacgtactcggggatggagcccatctcgcggttgcccagcaaaatggccgagctgcggtcgatgacggggatctccgagtagttcacctctttgatgtcgtcggcgaacgtctcctccaccgtctgcaacacgttggcgtacttcgccgcgttgcccgggaagatcgacagcgacgccacggcgcccagcacgccgacgacggccaccagcaccggcaggtacgacgcccacttgaaggccttcgccttgccctcgttcggctcgaccttgcccgtgccgttcttgtagctgtgcgacttgctccagaacagcaggaacaacggcagcaggatgaacacggccacgaacatccacgtgtcggtcgagtggatgttgatgggcggatggaaccaccagtaggccgcgagacccacgaggatgatgacgatggcggccacgatgagcgcgcgcttgccccacgaggccatgcggtcggcgaacgggatctccacgttcacgtgcggcggctgagcgccgcctcccccgcctccggcgcgtcctgccccgcccgacggcgcttcatggtcggcatcgaaccgaccgtccacgtttacccctgattgtttgagcgcttcgatcagcgcatcgaatccggatgtctgtttcacggcatcccttcccaagcgtaccgatagttaaagtatccagtatacgacaaagcgcccgaccgctcttcgcaatcgggcgccgacgttacctcttctttacaaaaggctgcgcagcacgaacggcaggatgccgccgtgctggtagtagcggccctcggtgggcgtgtccacgcggacggtcgcccggaacgtcgtcgtctggccgtccgcgcgctcggcggtcacgtccaccacgcgcggctcgggcagcccctgcgagaagtcgatgggcgccaccgtgtacagctccgaaccgtccagtcccaggctctcggcgctctctccctcttggaactgcagcggcaggatgcccatgccgatgaggttcgaccgatggatacgctcgaagctctcggcgaacgcggcgcggatgcccagaagcgccgggcccttcgccgcccagtcgcgcgacgagccgctgccgtacatcttgccggccaccaccacgagcggcgtttccgcagcctcgtagtccatggccgcgtcgaacagcgggcgcacctcgccggtggcgaagtcgcgcgtccagccgcccttcttcccctcggccagcttgttctgcagcttcacgttggcgaaggtgccgcgcatcatcacctcgtggttgccgcggcgcgcgccgtaggtgttgaagtcggccggagccacgccgcgctcctccaggtagcgggccgcgggcgagtcggcggcaatggaacccgccggcgagatgtggtcggtggtgatgaagtcgcccagcagcgccagcgcgcgagcggcctcaacgggcctcggcgcggagggctcgcgctccatgccgtcgaagtacggggcgcggcgcacgtaggtggacgcgtcgtcccagctgaacgtgtcgctgggttcgctgcccagcgcggcccaggccgcatcgccgtcgtacaggccgcgcgtgccctcctcgtacagggagcagtccacatgctgggccaccagcgcggcgatctcctcgtcgctgggccagatgtcggccaagagcaccggggtgccgtcggggcgcgttcccagcgcgtcgtgctcgaggtccgcgtccatggtgcccgccagcgcgtaggcgatgaccgcggcgggagccgccaggtagttctgcgacacgtcgggcgagatgcgaccctcgaagttgcggttgcccgacagcacgctggccagctcgatgtcctcggccacctcgtgcagctcgtccaggatgggacccgagttgccgatgcagctcatgcagccgaagccgcacgtgtagaagcccagcgcccgcagcccgtccagcagcccggcgcgctccagcagaagctcggtggccttgctgcccggagccagcacgcacttcacccaaggctggggcttgaggccggcgtcggcagccttcttcgcaacgaggcccgcggccagcatcatcgaggggtcggtagccgtcgtgcagctggtcaccgccgcgatggccagcgcgccgtgggtcagctcgcacgcttcgccgtcgaga

SEQ ID NO: 9925 - DNA, 1116 bp, Unknown
  gut microbiota DNA sequence
ggccttcttcgcgacgaggcccgcggccagcatcatcgaggggtcggtggccgtcgtgcagctggtcaccgccgcgatggccagcgcgccgtgggtcagctcgcacgcttcgccgtcgagatcgaccgccacgcgcttggacaggtcgaggccgcgctcgtcgcacacggcgcggaagcgctcctgcaccgccgacagcgggatgcggtcgtgcgggcgcgacgggccggccagcgagcgctccacggcgcccaggtcgaactcgatcacctcggcgtacgtgcgcgcgggcgcgtccgcgtcgttccagaagccctgcgccttggcgtaagcttccacgagcgccacctgctgctcgctgcggccggtcaggcgcagatacgtcagcgtctgctcgtccaccggaaacagcgtgcaggtgctgccgtactcgggcgtcatattggagatgcacgtgcgctgcgtggcgctgagcgcgtcgaggcccgggccgaagcactccacgaagcagcccaccacgcccttcgcgcgcagcatctgcgcgaacgacagcgccacgtccatggctgccacgccctcgcccagctcgcccgtcaggcgcacgcccaccaccttcggcacgagcgtggtgatgggctggccgagcgcggccgcttcggcctcgatgccgcccacgccccagcccagcacgccgatgccgttggccgtgggcgtgtggctgtcggtgcccacgagcgtgtcgaagtacgccgttggctgctcgccgggcgcgccgtcggcggtcatggtcacgtgggcgaactgctcgatgttcagctggtggcagatgcccgctccggggggcacgatgcgcacgttctcgaacgattcccgcgaccacttcaagaagtcgtagcgctccttgttgcgcgagaactccagctccatgttctgcgcgagcgcgcccgcgcagccggcgacgtcggcgatgaccgaatggtcgatcacaaggtcgcagggaatctgcgggttgatcttcgtcgggtcgccgcccagctgagcgcaggcctcgcgcatcacggcgaagtccacgaacacgggcacgcccgtgaaatcctggaacagcacgcgcgccgg

SEQ ID NO: 9926 - DNA, 985 bp, Unknown
  gut microbiota DNA sequence
tccagcagcaccgtcagcgagtacggcagctgctccgagccggcgacggccgagaccggatagtaggcgtacgtcgtgccgttcacgttcagcgtcgaagcgaatcggctgttctcttggctcataggttctccttactccaacgttttagaatgccgcgatcagggcatcggtgaattccgtgcagcttgccgccggcttggacgagccggtggccttgcgaatgtcggcggtcaggtgcgcgccctccgcgtacacggcgcgcaccgcgcggcggatgcgctcggccgcctccgcttcgcccagatggtcgagcatcatggccgccgacagtatctgggcggtggggttggccttgtcttgccccgcgatgtcgggcgccgagccgtgcaccgcttcgaacacggcgtactcgtcgccgatgttcgcgcccggcgcgatgccgaggcctcccacgagacctgcggccaggtcgctggcgatatctccgtagaggttcgggaacacgaccacgtcgaactgcgcaggatccataaccatgttcatgcagaacgcgtcgacgatgcgctcttcgaacgccgcatcttcggcgcgctctgcggcaacctcgcgcgccgcgcgcaaaaacaagccgtcggtatgcttcatgatgttcgccttgtgcacggcggtcaccttgcggcgtccgtgcctgcgcgcgtagtcgaacgcgaaacgcacgatccgttcggacgccgccttcgagatcggcttgacggagatgccggaatcgggacggatagcgcccgcgccctcttcctcgcacagcgcgatcagcttgcgggcgccctcggagccctcttcgaactcgatgcccgcgtacaggtcttcggagttctcgcggacgatgacgatatccacgccgtcgtagcgcccgcccgcccccggaatggacaggacggggcgcaggcacgcgtacagaccgagttcccggcgcaacgccacg

SEQ ID NO: 9927 - DNA, 1080 bp, Unknown
  gut microbiota DNA sequence
aaactcgatgcccgcgtacaggtcttcggagttctcgcgcacgatgacgatatccacgccgtcgtagcggccgcccgcccccggaatggacaggacggggcgcaggcacgcgtacagaccgagttcccggcgcaacgccacgttcacgctccggaatcccgtgcccaccggcgtggcgacgggtcccttgatggccaccttgttccgcttgaccgcttcgatggtagaagcaggcagcggcgtgccgtgctcctccacgagatgcgcccccgcctcggccacatcccaaacgatatcggcgccgctggcctccaccacccgttgcatggcggccgacgtctccgggccgatgccgtcaccgggtacgagggccacggtatgcgatgccatgttctctccttctgcaattgttcgaacgatgcccctttgcgccgccttctgggccgacgcgacgaaacgagcccggaaggctcgtcggaatgccgtgcgctagttctgcacgttgtcgatgatttgctgcgcacggcgcttgagcggccctttgccgttggaggcgtcgaaggccatgcgcgcgcccagctctttctttacggaaggtgccagcttgcccgccgagaagtcgataaccgacaccagcatatcctggaactccaggtcgccatggtagcactggatagcctcgtcgatgagaggccacacacgctcagaacggttctccgtcgtagcgcccagcttgcagaggaaccgcatggctgccaaacgcaccggcccgctctcctcgtcgaacaacgcggtttcggctccgggaaccgctttgtcgcacgtgcgggaatcgtggtcgaccatcgtggtgaggatatcgaggcactcccagcgcgtctgggcttcggggcgattcagcgcgtcgatgacggcagcgccgaacgggatcatcaaatcgggatgatccttggcaaagaaggagagcgccgctgctgcgttctggcgctcgcgcctcgacggacccgacagcgcacccaccagctgcttgaacttgcgttcgtttccgaatgcctcttcggcgatgttcctggctccctg

SEQ ID NO: 9928 - DNA, 191 bp, Unknown
  gut microbiota DNA sequence
gtgggcgtatcgcttctgctgcaaccagccgaacgtgctcaccgtgctctcgggcatgtcgaacctggaccaggtgcgccagaacgtggccgactaccaggcgaaccgcccgttctcgcccgaggagcagcaggcgctggacgcggccgtcgaaacgctgcgcggcatggccagcgtgccgtgcacgaact

SEQ ID NO: 9929 - DNA, 275 bp, Unknown
  gut microbiota DNA sequence
ctcgccggccgatctcctgctgaaatgcgcgcaagacgagggctgcgacctcatcgtcatgggcagccgcggccagggcggcgtcaaaggcttccttggcagcgtcagctacgccgtggtgcagggatcgcctatcgccgtgctcatcgcgaaggacgctcccgccgcagcgacgaaagccggggcgaccgattagcatgcctgcaattgcacgagaaaagctctggacgagagatttcgtattcggaaccgccgtgaacttcctgatcatggtg

SEQ ID NO: 9930 - DNA, 4320 bp, Unknown
  gut microbiota DNA sequence
gcgcaacggcgagaagccgcagctgaccacgcgtcagaagcacacgcgcgagtgcttcgtcgtggccgaggaaggtgccgacctggcggctatcgagaaggccatcgtcgagatgccgaactacttcgccgactatgacaccacggtgacgttcatctcgcaggaggagctcgaccgcgatcatgccggcatcccgcatggcggctccgtgttccgctcgggcgtgaccggcgaaaacggcgagcacacccacgtggtggagtactcgctcaagctggactccaaccccgagttcaccggcagcgtgctagttgcctgtgcccgtgccgcgcatcgtctgagtcgtgagggtgtcgtcggctgcaagacgatgttcgacatcgctccggtctatctctccgccaagagcggagaggacttgcgcgccgagatgttgtagggcgttctcgacccgatgcgtcgaaggcctcgctgcgcccgcggcgaggccttcttcatgctagatcaaaacgccgttgcagtggtcgatttcgtgctggatgatctgggcggtgaagccggtgaatgttttgacgcgcggcttcatggcgagatcctggtagctcaccttgatggtgcggtagcgcgtcgcgggtcgcgtgcccgcaagcgacaggcagccttcttccgtttcgtaggcgcctgcgcgcgagacgatctcggggttcagcatggccaggtatgcaccttcgttgtcgaaggcgatgatgcgtttgacttcgccgatcatgttcgccgccatgccgacgcacgaatggcggtgcgccgcaagcgtgtccagaagatcctgcgcgatgggcagatcggcttcggtagccgccgttgaaggctgttgcagaaccagctcgtttctcatgatgggacgaatcatcgcgaaggcctttccacgtgacgagcctttgccgtttggcatgacgaggctcgcgctcctgcactctcttggtatagtgtacgtgaaatcgacggagaggaggcgcatatcgtggatgcagtcgcattcatgcgcggcaacagggcgtacttcgaggatttcatgacgagaagcacctaccattcgaacgccatcgaaggcagcacgctttcgtacgccgaaacgtacgcaatcctctggaacgataattctttgcaggtaacggctactgcgagagaactgtacgaggcaatcaaccacaaatacgcgctgagcctggcgcttgaggaaatgcaagtgaccttgagcgagcggctcgtcaagaggattgcgcaggctatcaacaagaacatcaacgaaatcggcggctatcgaacgatctcggtgctcattcgcggcgcagagcacattccgccgaagccgaaccaggtgaaccagctcatgatgcaattggttcacgagtacaaccatgccgacgacgtagacccgtatctgcgcgaggcgcgtttccatatccggttcgagcgcgtccatcccttcgaggacggcaatggacgcacgggtaggatactcgtcaaccgtggtcttttgcaggcggggttggctcccgtcgtcgttccgttcgagcgccgcgctgaatatcttgcgatgctcgccgacggcgattcggatgggctcgccgagatgctccgatcgctttcccatagcgaggaagagcggatcgcagcgtttgccgaggccgctcaggaatagatcgccgcggccagagcggcgagggcgaacaggatcccgaacgttgccgcgacggcgcgttcctttccggcgagatcgaagccgatgccgcgcatgccgtcgagcgggctggccttcgcgtgggccgggtgcggctcctcgcgcagcaggccgccggggatgacccggatctcgacggcgcgattcgggcgcgcgtgggctccgcgcgtctgccggggttggggctgggatgcgagggctgcattgctcatgggactctccttcgtcggcgcttcgttcgtatgctgcgaaggataccggaaacgcgcggggagtgagtaccactatcgggacaagcgaacctccgacggaaatcagtcgcgtactgtgaaacggtgcaggtcgaaacagtcgcgcagcccggttctatcgcatggatggtacaatgcgattgttccgataggttgatcaggacgatccgcgaccgaggagttcttccatgattctcacgtacgagcaggccgaccggttctatacgctcatcaacgcgctgcttgggtacgccaacgagcgcttcgaggtggttcgcgagcttcccctccccatcgtcgatctcgaatcccaatccaaggctgccctcgtggccgagacgctgtgggatagcgtcgggatcattgacgacttcgtccgcgagaaccccttcgacctgccgaagcgcttccttgacaccgctcttgcgtggaaggatgcgttgacgggttcgttcgtgttcgcggggcacgaggatgggcgcgccttgctcatgggcgacgaggacgtgttcgcggttgccgggatacagttggagccgagcgagttgctgagcgagtggcccgacgtggtgcgcaccacgttgctgccgttcgacgatctgatcgtctacgacggcatgttgaacgtgctcggcattgagttcggccccgaggtcgctgcttccgcccaggcggatttcaaggaacgccgcgccaagggcctcgtgcgcaccgctgcggacttcgtcgcgcgctcgcgcgccctcaacgaggccggtcgcaaccgcgccgtcgagcgtctcttggccgacgccgagcgcgacgcgcgtatcgccgccttcggggagcagcttcccccgggcttccatcgcggcgcgctcgcggggcttacggaggccgaacgcgctgcggccttcgacgagcgcttcgacgcgtgggatgaggggcgcttcgagcagaaggaggccatcctgcgggagcgtgccctggaccgcgagccggccggcacgctcgaggcgtgcctggggctgtacacgaagacggagctcgaaggcgtcggtcggctgctcggcctcaagggactctccaagctgcgcaaggccgagctggcccgcgccgtcgcggagagcgtcccctcgtcgtccgacctgctgcgcgatatgctggccgcgtgctccccgggcgctttcaggacggccaaggagctggcgtgcgagggagccgtgtcgttcggcgccgaagatgtgagcagacgcctgtacctgacgcccctcatgccatacacgttcctgttttggcagggagggcgcttcacggccttcgccccggagcagaccaagtgcatgctcgcagacgtcgacttcgaggagatcgaacgggtgcgggtccggaacgaagaggtggtgacgtgcgctgaggcgtgcaccaccttctacggtgtcgtctcgctcgacgatgcctaccttcgctaccgggaggcctgttccgatcctgtgacgcgccggcggttcgtcgagctgatcgaagttgaggcttccttcttcgagtgcgggttcgagctgtgggagtgcgacggggtggatcacctggttcactatgccatcggcaacgattacgcggcttccgagtacgcccgtctgcacgcccccgacttcctggacgatctgacgagtctcgcggacgaggtcgtagacgagggcttgatcgagaaagccctccaccggatgggggagggcctcggctccgaatgggaggaacttgacggctaccggcgtttcctgttggaggagcacgcgaaaaacccgccgcgcccgttcgagccctccatgctgcagcgcgacgcgatcggcgcgctgttcgagctgtccaccgtggtgcagctgcggaacttcctggatgcccgcgtccccgacggtgaggacgacttcttcttcgcggaccgcgtagtcgaggctctggtcatgggtgcgatggagggcgcaggaatccaagatttgtttgcctacgtgcgcgagctgggccttgacgcgtgctgcgaggacgaggaacggctgcccaagctgatcacgaacgtgtacaactcgctgccctcgtgggagaacaacggctggtcgccgcaggagctgctggagcgtatggccggcaagaaggtgttctacaacgagaggggcgacgtcatgaaggtcggccgcaacgacccttgcccttgcggcagcggcaagaagtacaagaagtgctgcggaaggtagacgcccctcggggttattccttgccggtccagcagtacgtgcacaccttctcgggatcgatgccgatggcttccagcatgccgtcgagcgactggtagcc

SEQ ID NO: 9931 - DNA, 1213 bp, Unknown
  gut microbiota DNA sequence
ctggtccaccatgcggcgtgcgagcagctccatgtcggaacggctgctggagaagctcaggtacttgcagctgaacatgatgggcgggcaggccgagcgcatatgcacttcttctgcgccgcacttgtacaggaagtccaccgtctcgttcagctgcgtgccgcgcacgatggaatcgtccacgaacagcagcttcttctcgttgatgagctcggggatgtgtatttgcttcatcttcgccacgcggttgcgcacttcctggttgctcggcatgaacgagcgcgcccacgtgggcgtgtacttgatgaacgggcgggcgaagggggttttgcattcggtggcgtaaccgattgcgtgcggcacgcccgagtcgggcacgccggccacgtagtcgagctcgggcgcgccgcccgccgcggcctcgtcgcgcgccatgatggcgccgttgcgatagcgcatgacctcgacgttcacgccttcgtaattcgagttcggatagccgtagtacacccacaaaaacgcgcagatcttcatcttgtcgccggcgggggagatggtgcggtactcgtcggggttcaccagcacgatctcgccggggcccagctcgtactcgtcgcggtagcccagcttgtggtaggcgaacgattcgaacgagatgcagaagccgtcgtcgctcttgccgatgagcacgggcaggcggccaaccttgtcgcgcgcggcgatgatctggccgtcctgggtgatgatgagcagcgtgagcgacccgtcgatggattcctgtgcgtgcttgatgcccgaaacgaagtcgtctttctggttgatgagcgcggcgacgagctccgtggtgttcaccttgcccgagctcatggccatgaactgccggccgccgctggcgaagttcttctccaccagctcctcggcgttgttgatggcgcccaccgtggtgatgccgaacgtgcccaggtgcgagcgcaccagcagcggctgcgggtcggtgtcgctgatgcagccgatgccgctgcaaccgtggaagccctgcaggtcgtcttcgaagcgcgtgcggaacggcgtgttctcgatcgagtggatctcgcgttggaagcatccttcctccgcatcgtggaagatcatgcctgcgcatttcgttcccaggtgggagtggtagtccacgccgaagaacacgtccagcaccacgtcgtgatgcgccgccgcc

SEQ ID NO: 9932 - DNA, 359 bp, Unknown
  gut microbiota DNA sequence
cgataacccagcttgtggtaggcgaacgactcgaacgagatgcagaacccgtcatcgctcttgccgatgagcaccggcaagcggcccatcttgtcgcgcgcggcgatgatctggccgtcctgcgtgatgatgagcagcgtgagcgatccgtcgatggattcctgcgcgtgcttgatgcccgagacgaagtcgtccttctggttgatgagcgcggcgacgagctccgtggtgttcaccttgcccgagctcatggccatgaactggcggccgccgctggcgaagttgcgctccaccagctcctcggcgttgttgatggcgcccaccgtggtgatgccgaacgtgcccaggtgcgagcgcac

SEQ ID NO: 9933 - DNA, 527 bp, Unknown
  gut microbiota DNA sequence
gtcgtggaaaatcatgcccgcgcacttcgttcccaggtgggagtggtagtccacgccgaagaacacgtccagcaccacgtcgtgatgcgccgccgccccaaagaatccgcccattgcttgcctttcgttgtgcctgccgctaatccgtgccaacaaaaatatcagtatacggctaccgccggtccgaaggaacgctgagcggccacgatccgcgttttctgcacgagttcgcgcctcgtggcgaagcgttttccctcttcggctagctcttcttgtccggaacgatgaagatgaacacgagcgagctgatcagcagcaggaacgggtagaacagaaacgggatgatctggaacgccgacaccgcgaaacccagctccgtggcggccgagatggccacgagcatctgcgcgccgtaaggcaggatgccctggaacacacacgagaacgtgtcgagcagcgatgccgtcttgcgcttcgagatgccgtacgtcttcgccatatcggcggcgatggggttcgagatgacg

SEQ ID NO: 9934 - DNA, 553 bp, Unknown
  gut microbiota DNA sequence
gccaagctccgtggcggccgagatggccacgagcatctgggcgccgtagggcaggatgccttggaaaacgcacgagaacgtgtccaaaagcgatgccgtcttgcgcttcgagatgccgtacgtcttcgccatatcggcggcgatggggttcgagatgacgatggccacggtgttgttcgcggtggcgatgtccatggcacccaccagcaagcccatgcccagctgaccgcctttcttgcttttgaacaggcttttgatgccgttcaacagcgccacgaacccgccgtactcgcggatgagcgcgcagatggccgacaccagcagcgccaccatcgtggtctcgaacatgcctgcggcacccgagcccatgttggccagcaggtcggtggcggcagtggcgcccgtggccaccatgatgatagagcccgacagaatgcccagcaacagcacgacgaacacgttcacgccgatgatgccgccgacgagcacgatgaggtaggggatgagctggatcaggtcgtactcgtgaacgacgctgccgccgaggtcggcg

SEQ ID NO: 9935 - DNA, 2568 bp, Unknown
  gut microbiota DNA sequence
acccgtggccaccatgatgatagagcccgacagaatgcccagcaacagcacaacgaacacgttcacgccgatgatgccgccaacgagcacgatgaggtaggggatgagctggatcaggtcgtactcgtgaacgacgctgccgccgaggtcggcgccgaacgacagtgcgaggatgatgacgagcgatacgatggccgcgggtagggcgatcttgaagttctcgcggaacttgtccttcatctggcagccttggccttggcaggctgcgatggtggtgtcggagatgaacgagaggttgtcgccgaacatggcgccgcccatgacgctggccacgcacagcggcaggctgaagccggacgcagacgacaccgccacggcgatgggcgtgatcaacgtgatggtgcccaccgacgtgcccatcgacagcgacacgaagcagctcaccacgaacagcaccgccacggcgaactgcacgggaacgacggaaagcagcaggtaggccacgctttcggcactgtcgcgacccacggtgcccacgaagatgccggccaccatgaagatgagcaccatggtgacgatggtcttgtctcccatgccgcggcccatgatggtaagcttgtcatcgaagggcagctttcggttttggaagcacgccaccagaagcgcgacgaggaaaatcaccacgacggggatgttgtagaagcccatgggaatgcccatgccgtactcgaacaagatgcccagtcccagatacagcaccaaaaacaccccgatcggaagcagcgccttgacgttgcccttcttgacggtctcggtggttttctcctccatattcgtcccttcttgccttcgtcttcgttgcggtgttccatcataccgtaaggtgcgggcaatagagggcaaggcgcgcgtttcgagtgctacactgtggcgagagcggtcgaatggaggaaagcgacggtatgaagaagatactgctggtggcgacgggcggcaccatcgcatcggtcgaggatgggcgcggcttggcgccggcgctgggcggcgaagagctggcgcgctacgtgcccgagatcgcggatgtgtgcgatttcgacgtggtgcagccgatgaacatcgacagtacgaacatgcgcccggccgactggatgcgcatccgcgacgagatcgtggacgcttacgacgcctacgacgggttcgtggtgctgcacggcaccgacacgatggcctacacggccgccgcgctgtcctacctggtgcagggcagcccgaagcccatcgtgctgaccggttcgcagcagcccatggccagccccttcaccgacgcgaagctcaacctgtaccagagcctgctgttcgcggccgacgatcgctcgtgcgacgtgtcggtggtgttcggcggcgcggtgatagccggcacgcgggcgcgcaagcagcgcacgatgagcttcaacgcgttcaccagcgtgaacttccccgagatcgcgctcgtgcgcggcgagcgcatcgtgagggcggggtcgcctgcgacgtgcgcgggcatcgggggagcgccgcgcgcgtacgatagcctcaacgagcgcgtgttcgtgctcaagctgacgcccgagatgaatccgagcatcttcaacctgctcaagcgcgactacgatgccgtcatcctggagacgttcggcatcgggggcatccccgactacggcgactaccgccgcgccatcttcggatgggtggactcggggcgcacgctggtcgtgaccacgcaggtgcccgaagagggctgcgacctgggcgtgtacgaggtcgggcgcgcttatgcgggacatcgcggcatcctcaagggcggcgacatgaccaccgaggcgcttgtggcgaagaccatgtgggcgctcggacagacgagcgaccccgacgagatccgcgacctgttctaccgcacggtgaaccacgaccggctggcggaagagggctaaacgcgctcggctgcgatggttccgaggcacacggtgtgcagcggcttgtagacggcgcccgcgcggtcgagcgtgctcttgtagagggtgacgtcggtcgcctcgtcgttttggggaaacgccaggtgcggcaggccgacgtgcgggatgcgagcgcggcgcgcgagggtgaagtgcgctttgaagggcttggcatcgaagggcacgtcgcgggcgcgcagctcgtcgcgcagacgcgccgccagttgctcgagctcgggtgcggcggcgatgcccagccacaacgtcgcgtcggttgcgcggccgaacttccccaggccgtcgctgcgcagcgggacgggggacgcgccggcgcaggcggcttccagcgcgtcggtcgcggcagcgagctgcgcttcgtcgacgtcgccgaggaaggcgagcgtgaggtggtaggtgtcgcgcttcaggaagcgcccctccatcgacgcgctcagccggcgggcgagcgcggccgcgtcgtcagcgaagtcgggcggcaggtcgagcgcgatgaacgtcctcatggggagctccttattccatgtcgagcggcatcttgcgcgcgggcgcgggaaag

SEQ ID NO: 9936 - DNA, 176 bp, Unknown
  gut microbiota DNA sequence
ggctcggtcatcgactcggcgaaggccatcgccgtgggcgcgcactacgacggggacgtgtgggatttcttcgagacgaagcggccgacggacgacgtgctgcccatcgccgtggtgctcaccatcccggctgccggcagcgaggcgtcgaagaacacggtggtgtcgaacgacgc

SEQ ID NO: 9937 - DNA, 317 bp, Unknown
  gut microbiota DNA sequence
cgcgagctgcaggaaagcctgcggtgcgcgatggagaaggcgcaggatgccagcgaagcgaagtcgcgcttcctgtcgaacgtgtcgcacgacatccggacgcctctcacggccatcatgggactcgtcgacatagccgtcgagcatatcgatgagcgcgatcgcgtgaaggaatgcttcgacaaagtgcagctgtcgtcgcatcacctgctcaatctcgtgaacgacgtgctggatatgagcaaaatcgaaagcggtcaaatcaacctgtgctgcaagccgttcgacctgcatgtcgtcgtggaaacgctcgggtc

SEQ ID NO: 9938 - DNA, 1297 bp, Unknown
  gut microbiota DNA sequence
cggactcttccgggtctgcttccgactctggcgaggctgcttcgtttgccgaggttgcggcggctttcgacgcgtcggcgctcgatctcgactacagcaagcgcgatgcggatgcttcttacgacgatgcttccgccgtgcatatcgtgttgggcggagggtcggcgagcgtagagggcgatggcgcgacagttgacggctctacagtgaccatctctaccgaaggcgtctacgtcgtgtcgggttcgctcgacgacgggcagctggcggtggaagcgcctgaggacgcgaaggtgcagatcgtccttgcgggcgcgaccatccacaacgaggacgggcccgccgtgtacgtgaagcaggccgacaagtgcttcatcacgctggccgacgggacgcagaacgcgctcaccgacggcgcggaatacgtgctcgaagatggctccgacgagccgtacgccacgctgttcagccgtgccgacctcacgttgaacggaacgggagccttgacggtgaccagcgcgtaccgccatgcggtgtgctcgaaggacgaccttgtgatcacgggcggcacctatgtggtgaacgcggtggaagacgcgctgcgcggacgcgactgcgtcaagatcgcggacggcgacttcacgctgatcgcgggcggcgacggcatcaagtcgaacaaggatacgaaagccacgaagggattcgtgtccatcgacggcggcacgttcgtcatcgaggccggcgacgacggcatccatgcgcaaacctacctgcgtatcgcgggtggcgacatctccatcgctgcggtggacgacgcgctgcactccaacctcgagggcctgctggcgggcggcgcgctcgatatcgaagcaggcgacgatgccttccatgccgagacgaagctcgtcatcgacgacggcacggtgaacgtgaaggcgtgctacgagggctacgaagccgagaagctgtacattaacggcggcgacacccgtatcgtggccagcgacgacgctgtcaatgcggccgctgccgatctcggcgacgacgatgccgacgaggcggccgatgtgtcggccgaggcgcccggcttcgagggaggggcgctgcccgacggcatggaggcacctgaaggcgctcccgacgggatgacgcctccggacggggtgaacggcatggatggcgaggctcccgaactgcccgaaggcgtggagactcccgacgtgatgggcggcacgccgccgtccggcgctccgcagcgaaacggcgagggcgccaacgagcgcgagctcaacggcgg

SEQ ID NO: 9939 - DNA, 823 bp, Unknown
  gut microbiota DNA sequence
gggcgacgatgccttccatgccgagacgaagctcgttatcgacgacggcacggtgaacgtgaaggcgtgctacgagggctacgaagctgagaagctgtacatcaacggcggcgacacccatatcgtggccagctacgacgccatcaatgcggctgccgccgatctcggcgacgacggtgccgacgctgcggccgatgcgtcggccgaggcgcccggctccgagggcgggacgctgcccgacggcatggaggcgcctgaaggtgctcccgacgggatgacgcctccggacggggtgaacggcatggacggcgaggctcccgaactgcccgaaggcgcggagactcccgatgccacgggcggcacgccgccgtccggcgctccgcagcgaaacggcgagggcgccaacgagcgcgagctcaacggcggcgcgcccgacaatgcattcgccgaaggcggcgcgggcggcatgggcatgggcgacgaaaactgcctcatccagatcaacggcggctacaccgtgctcgatgctcaaggggacggcgtggacagcaacggctcggtggagatcacgggcggcgtgctgctggtctgcggccccacgagcaacggcgacggagcgttcgactacgatctgacggcgacggtgaccggcggaacggtgctcatggtgggctccaacggcatggcgcagaacttcaccagcggagagcagcctttcgcgttcgccacggtcagcggctcggccggccaaaacgtggccgtcgtagactccgacggcacggtggtcgcctcgttcacggcggccaagcagttcggcatggtg

SEQ ID NO: 9940 - DNA, 2331 bp, Unknown
  gut microbiota DNA sequence
ttccaacggcatggcgcagaacttcaccagcggagagcagcctttcgcgttcgccgcggtcagcggctcggccggccagaacgtggccgtcgtagactccgacggcacggtggtcgcctcgttcacggcggccaagcagttcggcatggtgctggccaccagccccgcgttcgtcgaaggcggcacgtattcgctggtcatcggaggcaccgtgaccggcgcgaacgccgacggctacaccgactccggcacggtggagggcggctccaccaccgagatcgccgcgtcaaccaccgcatccggcggcatgggcggcctcggcgcaggaggcggcggtatgcccgccggccaaggcggcgacgtccagcgcggcatgcgcggcggcgcgggtagcggcttcggcggcggagcggcggcgtagccagcacccgttccagcggcggccccgacggagtgttcgtcgaggtcgccgtttttggcgcgaggtcgtcggtctgcctcctcgattctggcacgaatttacgggtatggcacagattttgcagaaagagtaaggccgtgaatcgcaagcaatagcaaaacgcctggtcgcgaaaacgtctccgcccaatttccccaatcgcttctgcccaacccgtaaatttgtgccagatttttcaaggtcgaaccgttggtagccgattgcatttgtcgttcgcaggtgtgtgaaattcaggaacagctggctctttgtctgcgttatcgcatatcgctggctcatctctagtagtgcgggatttcggaaatcccgtgggttagccttcgaacatcatggcttcgcgcatatctgttgcgtgatcgattcgatgtggtttcgggccaccaccagcaaggcgattatcgccgccgtcgaagatgccatgagcaagacgtaggcctattccgcgataatcttacgatcggaacctgcaagggcgtcgaagcgggcttgcaggttccgaccatgcatccgcatcctgggcttcgcctcatggttccgatctccttgcggaagcgttatcgtccgggaaacagcagccggcgttctgcggccagatcgttcaccgtttctatctgcttggcggtctgacgttggacggcttcgatgaagcgctcgtcaagctgggcgttgagactcaacacgtcagctatgtcatcgaggaacccgtcgagtgaggacgaatcgtaccacgacaggtcctccacgagcgccagctgctgagaaggataggggcgaaacggatgggcctcccacaagtagcgcccatgctccagctcgtccgtggtcgcgcggctgtaaaacccgcatccgttgtcgaacaggggtgccacccgataccgatcgagggtttccacctcgcgcatcaaaccgaaattgtgcgtatggcggtcgaagttcgccataagatggtcggcaacgatcatcttgctcacggcgcgtccgaggttcgacacgcccagcgcttgcccggcttcaaggtatccgcgatggaggtcgcgcccctccgtcactccgaaggcggtaagcacgtcggctgcggggatgagctcggtttcggacgttacgaaggttgggcacgtcgagtaggcgcgcccgtgccgttcggtcagtgagtaggcaacgaagtcttcgtcgtccaggagccgtgcgagcagcttggttgccaacagctcgttgtacggctcgcggttctcgttgcccgttccgcttttcaccaggaggttcgttccgtcgcggtgaatccatgtcttcgacagcatgccaggcgtggcggtgtcgggcgagtgggttatgcgggcggtcgaggttcctgcaggggcagagccgccgagcaaggtttcgcccagtgcttcttcgtaaccgttttcgaagtaattgacgtcatgccagtccacgtcgatatcaacgggcttgaaccaatactgatcggacagattgagtccccaggaatcgaacatgaggtcgatgccatgtcgggctgccagctcgcgcaacacgggggcgaggttcggacgcatatcgggaatggagcgtgaggcgatccatgcagctaaatcgtatcggttcggcgttcgctctcgaaggccgatgcctaatggcttccaggcgattccttcgcgcggcacgatatcggccgtttcgcgcgtgcgtcggttgtacacgaaatcgagcaccggatggttgcgattcatcagcgtgaacggggcgaggttgcgctcgttcttctcgttcatcttcgggcggcctgcggttctgccccgctcggctcgctcgtggacggagcgctcgtcaagcatccaagatcgtccgaa

SEQ ID NO: 9941 - DNA, 1647 bp, Unknown
  gut microbiota DNA sequence
atattccttaatcggaacattttctggaggtgcctgacggtcgtatggaacacttgcgcggttttgtcccgaaggatttgctcctttcgtcgaatcggtgacccttcgccggaaagcttcgcgcgctttagccgattggagtacaatgggcgaacgaataaggaacgaacccgcacgtcaggctggggccgggcgccatgcaagaagggatgcgaacatggcagacatcaccgaagtggattacatctggaagaacggggagatgatcccctgggccgaggctaccacgcatgtcttgtcccactcgctgcattacggctccggcgtgttcgagggcatccgctgctaccagaatcccgagacgaagaagagctacgtcttccgtctgcgcgaccatatggagcgcctgcatcgcagctgcaagatctctctgatcgacctgccgtactcggtggacgaactgtgcgacgcgacgatcgagcttatccgcaagaacaagctgccgtcgtgctacatccgtccgatcgtgtaccgcggctacggcgtgatgggcgtcgatcccaccggcgcccccaccgacgtggctatcgccgtgtggccgtgggacacctacctgggagacggtgcgctcgacaacggcgtggccgtgggcgtgtcgtcgtggcgccagcgtacgaacaactccattccgcctgcggttaaagccaccgcttcctacatgaactctatcctggctaagctcgaggcgaaagagcacggctatgttgaggccatcatgctgaacgaggcggggctcgtgtgcgagggcaccggcgagaacctcttcgtcgtgcgcgacggcatcttgtccacgccgccgctgtccgacggactgctggagggcatcacgcgcgacacggtgctgtgcctggccgacgacctggagatccccgccatcgaggaaagcctcacgcgcagcgacctctacatcgccgacgaggtgttcatgaccggctccgccgccgagctcacgcccatcggcagcgtcgacggccgtgtggtgggcaagccgggcgagatcactcgcttgctgcaggatcgtttcttcgccgtgtgctatggcaacatcgaagagtactcggaatggctgactgagatctaagtcataggttggtatgtcgcgaagcccccgccgtccgctgcttgcggccggccggagggcttcgctttttgagcgaaggagcgcctctgtgaatcgaatcctcacgtatgacagcacgctgcgagacggagagcagtgcgagggcatcacgttgtcgcttgaggacaagctgcgcattgtcgagcgcttggacgcgttcggcgtcgatttcatcgagggcgggtttccggcatcgaacccgaaagacatcgcgttcttccagcgcgtgcaggagatgccgcttaagcatgcgcgcatcgcggcgttcggctcaacgtgcaagaaggacgtcgccgccgaggacgaccgcgggctggccgacctcgtggccagcggcgccccggtggtcaccatcgtgggcaagacgtgggacgagcaggtcacgcgcgcgctgttgaccacgctcgacgagaacctgcgcatgatccgcgattccgtggcctacctcaaggcgcagggtctcacgg

SEQ ID NO: 9942 - DNA, 12635 bp, Unknown
  gut microbiota DNA sequence
aacgtgggacgagcaggtcacgcgcgcgctgctgaccacgctcgacgagaacctgcgcatgatccgcgattccgtggcctacctcaaggcgcagggtctcacggtggtgttcgacgccgaacacttcttcgacggctacaaggcgaacgccgactacgcgatggcctgcgtgcgcgcggcaagcgaggcgggcgccgactccatcgacctatgcgagacgaacggcggcgcgctgcctcacgaggtggatgccgtcgtggccgcggtcgcgcgcgagctgcccggccagcagctgggcatccattgccacaacgattcgggctgcgctgtggcgaactcgcttgccgctgtgcgcgccggcgtaacccaggtgcagggcacggtgaacgggttcggcgaacgcgtgggcaataccgacctgctcaccgtcatcgccgacctcgagctgaagatgggctgcacgtgcgtgggcgaggagcggctgcgcgacctgaccagcgtggcgcagttcgtggccgaaacgtgcaacctgtcggtgccgaaccatcatccctacacgggcgcgtcggcgttcgcgcacaagggcggcctgcacgccagcgccatcgcgcgcttccccgaggcctacgagcacacgcgtcccgaggcggtgggcaacacgcagcgcatgctggtcagcgagctggccggcaaggcatcgctcatcgcgaaggcgaagaacttgggcatcgatctggcccagcaccccgacaagacgcaggagatcctggacgacatcaagcgccgcgaagcggtgggctactcctacgaggtggccgacgggtcgcttgcgctgctgctgcaatggcatctcggcgcgtaccggccgcacttcacgctggagagcttccgcgtcatcgtggacgaccacgaggacaccggcgcgctggcgaaggacgccatgtcggaagccaccatcaagatccacgtgggcgaccagcgcttcgtggccacgggcgagggcgcgggtcctgtcggcgcgctggacaacgcgctgcgcatggccatcgtggcgttctatcctgaggtggccgacatcgaactggtggactacaaggtgcgcatcctcgacgagaacgtgggcaccgacgccatcacgcgagtcgtcatcaccacgcgtgacaagcgcggcagctggggcacggtgggcgtgtcggagaacatcatcgaagcatcatggaatgcgctggtcgactccatcgagtacggcctgatgcggattggggagtagcatgagcgatctcagaacgcccgaagtcgaagatctcctgcgcgtgttcgcggcgctcgacgacgaagacgtgatcttctccctgctggaggacttgttcaccattcgcgagatcaaggaaacgtcccagcgcctggccgttgcgcgccagttggatgccggcaagtcctactccgccatcgaagaggccaccggcgcgtcggccaccaccattgcccgcgtgtcgaagtgcctgagctacggtgccggcggctacaacgccgctctgaacgtcctggacgacgccgagaagaagcgccgctagcgcggtcgcgtgcttccggaatcctgccgcaagctcgattctgcccggttcccgccacggattgcctcacgcgttcggcaaccaggtgaactcgggccgcgaggctgcgaacaacgttgcggagttcctgaaggcgtaaatccactcttttccgaagctggggcgcggaatctctccctcctcgccgtcgtcccggcttcggaattctgcgtctgggcgcaaacgggcacccatgacaattatgcgagcagaaaagagccccaggcggcggaaggattttctgtcacctggggtttctctagttgctctgcgagggcggctgccgtttcgccctcccggattgtcatgggtgcccgtttgcgcccacgacatgggattgctgcgtcggattgtcatgggtgccgttttgcgtccatgacatggaaccttgcggcgcgcggaatggctcgcgtcacccggcgacgggcgccgcgtcctcgtccggccttgcgggcggtttcgcggcgcttccgtcgctcgacccgctcgccggcagcgccacgggatcgccgtactcgtcgatcgtcccgttcgcacggccctcgatgtaggctgtgcgcgccttgccgcgcctaaacgtcacgggcgccttccccgagctcagctggtagcagtaccagaacacgaacgggatgccgatgatgccgttcgccatgccccaccagtacatcacgtcggggctgaaccatgcagccgagttcatgatggtggggaacagcagcgggaagcagctgcgcagcaagaggtgcgcgcccagcgtgtagatgcgcccggtgatgtacagctcgggacggcgcatgatgatggggtacagctcggccgcagccaggatgcagcaggtggacgcgaagaactcgtgtccttcggcgtacacgaagcacgcgttccacgtggtgtacaggaagttccacatggggacagtgtaggacaggatctcgccgtggctggacgtgtcgtacttccagtacttgtcgccgaacggcatggtgacgcacaggatgaagccggccagcgcgttcatcatgttgcccatctgcatgtcgcgcagcgtggcctcggcaatgttgcagaacacgatgccgtacagcgtccagcgcacccagcgtttgcgcatgagccgccagaacggcgtgtccttctgctgcacggcggcgatgcggcccagacctgcgaagatgagcggcaggatgacggagaggtttttcgcccaccggaaccaatcgtctccggggatgttgatgatccatagcggaatggtgacgagcgacaccacccacacccacatggacgttcgatagtgccgtcgcatgaactcggtcagcagcatgagcagaacggtgtacacgaccatcgatatgggagtgatccagacgggcacggtcatgagaaacccctttccccaggtagcgctattattgtcagtctatcatcgggggtggtgccgcttctttcacaaacgacctcttgatgtgaaagacttccacgcccgagcttcgtatactcgcttcaaggcgctgtgcgtcgtcgatgggacgagggccatgtgtccgaactgccgccaggcaacggcgggaaacgagggagcgaagggggcttcatcatgggtattctgtaccaagcggccgacccgctgtactgggtcatttggctgttcattttgttcgcgcttatggcgttcaacgagttgggacgcacgtcgctgtgggcaggcatcgcgctgttcgcggttgttcccatcgtgctgaccgtcttcgtgtggcccatcacggcggctcccggcaacgagtacggcacgggcacgtggttcaactgggtgaagacatattcggcacttgccggctgcttgggcttcatggcgctgcgcttcgtgaagtggcgcggcgcggacggcacgacgcaccacctgtacgagaagcgctgggcgctgtgctttccgccgctcatcctggccgtcaacatcgccgaggccgtcgttcgcgacttccaggtgttcagcttcggcctgtggcaaggcggcgtggtcgagaacctgtggactatgtcgggtccctggaacatcatgaacggcattgccggtatcctcaacatcgtcaccatctgcggctggttcggcatcttcatctcgaaggattcgtcgaaggacatgatctggcccgacatgatctgggcgtggatcatcgcctacgacctgtggaacttcgcctatacgtacaactgcatctccgaccactcggcctacgccggcctcgcgctgctgctggcgtgcactatccccacgttcttcatcaagaagggcgcctggttgcagcatcgcgcgcagacgctggcgctgtggatcatgttcgtgatgaccgttccgcagttcgccgatgtgctggcgcccattcccaccacgcacaaccctacggcgttcttcgcggtcagcttcctggcgcttgcgtcgaacgtggcgttggcggcgtaccagttccgtaagatccgcaagctcaagttgaacccgctcaaggacgagctgtacgccgacacgaagtcgtatcaggagctcgaagaggcaaaccgctagagaaccccgtataatggacgccaagcgtaatcgttgcgcgcggcgtccatgcgcgcctgaacgcaggagggcgcgatgcggctcgacaaagagaatcagggaatccgcccgccggggcgcgagcgttctgcggtcgaaagcaggaggctcggcggcccggcgggcgagatcatgctggcggcgcgcacgttgttcgaacggcgcggggtggggaagaccacggtgaaggacatcgccgccgaggcgaacgtcacgcgcgagctggtgtactactacttcgagaacaagcaagccgtcatcgatgcggtcatcgacgattatgtggaggacctcgtggaaagcgtgctcgtgtggaacgagtcgcgcgtgttcggcgacacggcagggtcgctgcggtcgtgcatcgcggcgtttcgccgtgcactgtacgacgcgaacgggcttcggcccatgattcgcgtgttggaggagctgggcgtgcgcgacgccttcgacgtgcgcgcggtgcgcgagacggtggattgcctgagcggtcgggtgctggtcgaatacgccgagtaccatcaggtcgagatcgaattcgtatacgagatgttctgcgtggtgatcttcgggctggtaggcctcgtgaagatcgaccccgacatcagcgacgaggctctcatgaaggtggtggagcagacgctgcacctcgacatggagccgcttgcgctggatgcctcggccaagcggcaggacagcgcatcagtttaggcacctcccctgttcttttagatgacgccaaaatcgtgtattcatctgcgactacgttcagcgcgtggagatcgcgtgaccgttacccggtcgtgctatagttgttgcgaattcgttgttcgctgcggtgccgaatcgtcaaaatacgagcatgagagtcaagcatgaggcatacgcggcggattcgaggaggttttgcatgactgatttcacgcgcggcctcgatcgccgcacgtttatatttggcgcggctgccctgggtgcggccacgctgttgcggccgacgctcgcttttgccgagcccacgtccgcagacaagttcgccgaggccgattccgttcgcgctcgcatcaacgagatgcaggagcagctgaccatcgccggtgagaactattacaaagcgctcgacgagcacgaagcggccgtccaagccgttgccgacgcccaggcgcgcatcgacgaagcgaacgcccggatcgccgagttgcaggacaagctgagcaagcgggcgcgcagtatgtatcgcagcggccagaccacggcgctcgacgtcatcttgggagccacgacgttcgaggaattcgccacaagctgggatttgctgaacgatatcaacgacaacgatgccgcgatggtgcagcagacgaaagacctgcgcgccgaggtggaggcggcgaagatcgaactcgaaaagcaagagcgtatcgctgccgaaaaagccgaagaggcggcgcgcatcaaagctgaggcagagcagaccatccaaacgctggaagccacgctgcaacagcttgacgccgaggctcaggcgctgctggtccaggaacaggaagcggcacgtgctgccgaagctgccgctgcggcagccgaggtcaagcgcacgtacgcctacagcacgccgagcgcgtccatcccgtcccagggctcggtggtggactacgcgctgtcgcgcatcggctgcccctacgtgtggggtgccgccggtccgaacgaattcgactgctccggattggtgacgtgggcatacgctcaagtgggtatttcggtgccccatcagaccgagtcgatgtactatgccgccgccgcgcgtttgccggtctccgaagcgcaacccggcgatgtgctgtggatcagctacggcgacgggtacaacggacatgctggcatcgcctgcaatgccgggggcacgcactacgttcacgcccccacgtttggcgcgcgcgtgcgcgataccgatccgctgagctgggccgggtttacgcatgcgctccgattcgcataagaaggagaaccaagtgaccacgctgtttgtgaacgcgtgcatgcgcggcgaggcatcgcgcacgctcgcgctgtgccgcgaatacctggagcgcttcgacgacgtcgtggaggttgacgttgcggcgctcgatctcaagccgttcgacgccgatcgtgtggcgtaccgtacggagaagcagagggcaggggagtgggacgatcccattttcagcctatcgcgccagttcgcggaagccgacgacatcgtcatcggtgtgccgtactgggatctttcgtttccggctgcgtttaaaacgtaccttgaacatgtcagcgtgtgcgagttgacgttccattacaccgaggacgcgcgctgcgagggcatctgcaaagcgaagcgcatcacgtacatcaccacgtgcggcggcttcgtagagggtgcaaacttcggttacgagtacatcgttggcatcgccaagatgttcggcattcccgaagtccgcttcgtggcggccgaggggctggacatcgtgggcatcgacgtccaggagcagatggacaaggctcgtgcccagatggcgaaactcgattgagcgagtccggcaaaacctatgcagggggaccgacggtttctcgtcggtcccgattttcgcatcccgaggggttcgatgacggcttgtccatcatcgcggtatccattatggtgcagcgcgctctcaactgcgtggatcctcgacttgtcgaccacgggttgcgggtggccgcggtgctcgatgccatgctggaagcgaagggcgtgaccgatccaacgcagcgccgcgcagcgtacctcgtggcgttgctgcacgatgtaggcgcctatcgcacggaggaaatcgaccgtatggtggcgtttgaaacggaaagcgtgtgggagcactcgttttacggatatctgttcttcaaagagcttacgccgctcggcgcctatgcggacgtgatcctgtaccaccacctgccttacgatcggttcaccgaccaagatccgtacgtaaaattcctggccggggccgtgcatgtggccgaccgggtggacgtgttgctgctggagcgtcctcaagcggatgtcgtcgaggtagagcgtctgctggctgcatcgcgacctggcgcgttctcgcccgaggcggtcgccctgtttttcgaggcgcagcggcgtttcgacgtgctcgctcgtctgaggagcggtgtgaaacagcctgaccgctcgcatatcgtggatgatccggacggtaccggctcggcgtcttcgttcctcgacatgctcgtgcatgtcatcgattttcgcagccggcataccgtcacccatacggtgaccacggcatgggttgcctatgagttggcgttgcgcctgatcggcgaccagcgcgcggctgctcgcgtgtacacgagcgcgcttgtgcacgatgtgggcaaaatcggcattccgctgtccattttggagaagccggggaagctcgatgacgaggaaatgaaggtcatgcggacgcacgtggagctgaccgaggatattctcgagggttgcatagagcccgtgctgttgcaggcggctgcccgccatcacgagaaactcgacggatcgggatatccgcgcggtcttcatgcggctgaattgtccatgcccgaccgcatcatagccgtggccgacatcgtgagcgcgcttgtgggcacgcgtagctacaagaaggcgtatcctaaggagaaggtgctcgagctgctggcctggcacgtcgagaccggcaagatcgattgcatcgtggtcgagaccatgacgcgcgactacgatgccatcatgttgtcggtcgccgcagcgtgccagccagtggctgccgcgtatgagcgcgtgcagagcgcttatgcgctgatgctgggaaaactgaaaaggtggcaagctgaaaacgaggggagaagcgcatgaagcgcctgttgatcgtagtggactatcagaacgatttcgtggacggatcgctgggctttcccggtgccgagcttctggaggagcccatagccgcgaaaatcgaagagtaccgcagcgcggccgacgtgatcgcgttcacgttcgacacgcatcgttgcgactatttggaaacccaggaagggcgcaacctgccggtggagcactgcatcgagggcgcgcccggacacgcgctgtacgggcgcatcgccgagctcatccgtccgacggacgaggtgttcgagaagccttcgttcggttcggcagacttgttcgaatggttgcgcgcagcgcagccgccgttcaagagcatcgagctggtgggcctcgtgtccaacatctgcgtgatctcgaacgccgtgctggcgaaagcggcctgccccgaggtgcccgtcatcgtggacgccgcctgcaccgcttcgttcgacgactccctcaacgagaaggccctcgacgtgctggagggcctgcaggtccaagtgaccaaccgctaaccgaggctgcggcggccgtcgggccgccacagctgtcggactttcgtttacgccaacgcctccacgtcggcttccgtgacggggctcttggattccagcttgccgccggtggctgcctggatgccgcagatgcgcccggtcatgatgcagtgcccggccgacatgccgccctggtacatcgaccagtcggggctgccgcacagctggccggcgctgaacccggtcacccagaggttcgggatgacttcgccgtccgtgcgaagcgcctggtagttctcgttcacggtgacgccggcgcacagcgcggacacgcgcacgtgcttatggatgccccagaacggcgccttctcgatcttcttgaggtacttcgcctgcttgccgaagtccgcatcgaacccggcgtcgaccatctcgttatagcgcgcgacggacttcttgagcgcatcggcggggatctccagcttcgccgcaagctcgtccaaggtgtcgcagcaatacgtgccgatgaggctttcgatgacgttcgcgccgctttcggccgagcggtccatcttcacgtcgggcatgtacacctggatcttttccttgtcggtgggcttgccgccccactccgtgacctgctcgacgtaatcgtcgtcgaagatctgggaataccaacccggtttcggctggttgcgcagcacgcagttcacttcctcgaacacgcagtcctcgttcatgaagcgttcgccgtcctcgttcacgaacaggaacggctcgtcgaacatggggccggagtcgaagtcgtgcatcatgtgggagtggcccacgggcacgaacccggcgcccacggccatggacatgaggatgccgtcgccggtcttgttgctctgcttgcggtcgaactccttcacgtcggggcaataacgctccacgaggctctggttgttctggtagtcgccggtggacaggatgacgcccttcgtggcgttgaacttgatgtaggagctgccgcttttgccgatcacgccggtcacggttcctgattcgtcggtgaccagctgcacgcccggcgtcgagtagaagaactccacgcccttgctggcggccagctcggccaaatgctccaccatcgtgccgttgttgtacggcttcgggccgaacatgatgctgcggcgcgcgcatttgctgccgtcctcgtattcggtcacggccgtgggacgcaccgtgtaaggcgggaagcccgcttcggccgtgcgcacctgcgtccagcggatggcctcgcccgagtacttgcagtacgtctctgccagcttgcggtcggcgcgccagcggcagtcctcgaggtaaccttgcaggtagttcatcacgccctgctcgtcgctttggtcgagcagcacgcccgagcaggtgccgccctgggcgatgggcttcgactccttctgcagcacggcgacggtcgcgccctcctcgagggcgctcagcgcggcgggcacgccgcccgttcccgcgcctaccaccacgacgtcgaacgtcttctcttcggcgatgtcggtgatgggctcgacgatgacgggcgattcctcgaagtcgctcgcctggagcccttcgggaaagctcgatgccgcctcttcgactttggcgtcggaagcggcaggcgcgcagcctgcaagccctgcgcccgtggcgacgatgccggttgcgagcgcccccttcagaaagtctcgacgattcagttccattgctccctctcctttccttgatgctcgtgcgcgcttggatgcgggctttgcgccgcatgggagggatgggcggccctcggcctgcatccaagcttgttcgaagctaccaagcgagggcgggtttttcctcctacaaacggtatgaagttgcaggcggggaggcatctcatcctggttttctgatataaacgtaggcagggaggaaggggtcttatgggttcgattcgttctcttttcgcgcgaacgcccggaatcggctgggcggtcgtcgggttggcatgcgcgctcatggtgctggaagtccagcgcatgcccgtcgcccggttcgtgagcttttccatgttcgcgccgcttccgtacgccgtcgaggctgcggcgatgctggccatcgtcgttctgtaccgggtgcgcggcgcgctgcgcgtgagcgaccttcgcgcggtgcgggttacggtcgccctcttgtcggcggcggctacctggcttcttctgtattcccccttggccgacgacggcttggcgctggccgcgctcgtgttgtaccgggtggcgacggggctgctgctggtcctctggggcgagcggctcgtgccgttgggcgcgcgtcgcaccgcctgcgcattcgcggccgcctgcttgctgtccgggctgctgaccatggttctcgcgctgttctcgggcgaggtggcgcgcgtgctgctgggagcgttgccggtggcggccggcgggctgttcgtgctgtaccggccgctggtgggcaaacgtcgggcgaacgacgagctcgatcagccgcttccccgcttcgcctgctcgactttgaaagaccgcgtcgtcgcggtcagcctggtcgcgctgccgcttctgtgccggggcccgatggtcacgtcgcagtcgtcgtggatggggttgcagggcgatgccgtcatggcggcgttcatccaggtggccatcgggtgcggcatcgtcgctgcggggcttatcgccctgctcgtcgtgaagcgcgtttggaaccgcagcttcatcctggtgtacgagctgttcgtgcttcccgtgacgttcgtgtcgttctacacgtcgcaggcctcgggggatctgtggttcttgcacatgctcatcgtggattccacgtacaaggtgacgttgttctacgtcatgatgacgccgtttctgttcccgaagggcgcgcgtaaggggaactcgtccacgcctttgctgtgctcgttcgccttcatgatagccatcagggccttgttcgtcgggcttcatgcgtccctgtccgcgtcgctgtacgcgagcttgacggtggtggtcgtgctggcgacgttcgcggcgggaggggctttgtcgtttttgatcatgcagcggcaggcgacgcggcgggaagcgggcgaggccgccgcggccgaagcggttcgcgcggggctcgaagagcgttgcgccgccgtcgccgcccgcttcgacctgacgccgcgcgagcgcgagatactcgtgctgctggcgcagaactaccgtgcgccctacatcgccgagaagctggtggtgagccagtccacggtgaagacgcacatgcgcaacctgtacggcaagctggacgtccactcgcaagccgagctgcttctcgggctggacgaggaagcccagagcatcacgaccgactagcgtcggcgggcgaaggcttccagcacgagttgggcgcgggtgccgatgggggtttcgttctccgcgaggaaacgggggacgtcggcgatgggcagcaagaacggctcgatgaactccgccggctcaggctgcgcgtcggccaccttctccacctgggcgaacacgacgtgcacggtttcgtcggtgagaccggtggacgagtagcccgcttgcggcagcgggtcgagcgcgggcgcgtcggcatcggcgcgcagggcgtagcccgtttcctcgcggagttcgcggtcgacgcaggttgcgaggtcctcgcccggctccatgaggccggccgggaacgcgatgcaccagctgttcagcggatagcgaaactcgcggatgagcagcagctctcccgtcgcggtttgtggcacgatgcacacggcgtcggccgcgcacgcccgacctgcggcattgccttccagctcggcgcggtaggcttcgaggctcttgcgcgacgcgctttcgtactcgtacgtcgagccgtcgggcatagtgtaggccagcacgtacttcttgatccatccgtcggaaacctggcgg

SEQ ID NO: 9943 - DNA, 11271 bp, Unknown
  gut microbiota DNA sequence
tacgtgcacggtttcatccgtgaggccggtggacgagtaacccgcttgcggcagcgggtcgagcgcgggcgcgtcggcgtcggcgtcggtgcgcagggcgtagcccgtctcctcgcgcagttcgcggtcgacgcaggttgcgaggtcctcgcccggctccatgagaccggccgggaacgcgatgcaccagctgttcagaggatagcggaactcgcggatgagcagcagctcgcccgtcgcggtttgcggcacgatgcacacggcgtcggccgcgcacgcccgacctgcggcattgccttccagctcggcgcggtaggcgtcgaggctcttgcgcgacgcgctttcgtattcgtacgtcgagccgtcgggcatagtgtaggccagcacgtacttcttgatccatccgtcggaaacctggcggatgttggaaagctggggaacggcttgcatgggaaagctcctgttcttgggtgcggttgtgttacggcatggttctggctgccgtgcgttcggatcgagcgcacatctcaagcgcgcgtcatgccttgcgtttcatgatactgccagttgctgttgttgtcggaagaggatacgtcttcttctgacgttggtggaggttgagaagcccaaaggaaaagcttctcgggaggaagtcgctgaacttgccatccgggcgttttcgcgatgctcaaagaatgggaccgagcgcgaagcctcattgccgaccgtcggtcgaatctattcagcatttgaggctgttggtgaggggggcaaccatcgaacggttattttaaggatgctacactgtgcttcatatcgttccgcgacaaaggggagtgtcatggacattgaaattctaaaagagttcgttttcctatcgaaggggcttaacgttacgaaggcttctcgcgagctcaatatggcgcagtcgactttgagcagccatatcataaagcttgaaagggacctaggatgttctttggtggaaagggatggcagtcctcgcttgacgcttgcgggtcgtgagttcttggaagtggcctccgagatcgtgtgcctctacgacggtttcaaggagaggggcgtggtgcaaaggggtcgggaagatgccgtgatcacggtatgggctccgcagcgcagagaaggtttcgttatagcattgttggatgcggttatagggtttaaggggaagtatccgcaggcgatagttgacgtgcaggatacgcatggaggagatacgcttgacgagctgaggaagggtgttctcgactgcgggtattattgcaatgcggttgcagatcctagcttggaagaggattttcagctggttccattgctggatgaagagttcatcatatggatggataaggattcgccgcttcgcgattgtgattcgctgactccgtgcgatttggaaggctaccagcttccagttccggtcggtatggggacccacagcgttcatttgcaaacgatgtacgaagaactgttctctctttatggggcaaaggcaaatgtaaaacctcgttattgccgctctgtagatgattttttcctttcgaagatcaacagggacgatttgatcatcctcaatcgcgggtcgcagatcattgaagcgatgaatgaggcgaacgggaaagttatgggccgattcaatcctcctatctactctacgggatatctggtctttcggagcgaagacaacagcgatatggtcgagtgttttaaaagccacgtgctcgccttttacgaagaggccaagatttcttctctgtcaaatgaggcgttcaaggattagcaggcattttgtcgtcttggagctagatagctatccaggtggaataggtactacaacctgcaatggcgggtatcgtaaaatgcgattgcatcggacgtgtttcttgcgaaaagcaacctgaaaacctcgtttttaccattgagcttcaaccaggtattctcgatatgcaggaggaaggcctgcttacgtcaaggaaggtgtcaggtgcgttttgcgcctttcgcttccggaaagcgaggggatcatggagctagatcgtcgtagttttttgaaaggtgcagccataacaggcggtgccgcagctttgtttggggtggcagggtgcggtcctgtggctacggaagccgtcgactcgaacggcgaagcgcggagtgaagccgatcctatcctgccgctggatccgccggcttcatgggatcgcgaagtggatctggttgtggtgggaacgggcggtggtggccttgccgcaactactttggcggccgaaagcggctcgagcgtgatcgcagtcgaaaaggagggaacagtcggcggtgccacgcgtcatgcgttgggctatgtgatttttgccggaggatcgaagcttcaaaacgaattgggagccgcttggcctgggccggaatttgatcccgttgcatccgtaaacgagctcgggccttattatcagtactccctcaacgttcctatgtatgcgaatgtccttgtagcaggagctgagtgcattgattggatgatggagcataaagacgttccgttagttggggttcctcgcgtgtatttcgataaagaggttgccgagggtaggcaaaatgccgtcttgggcatgaacggtaccgttaacgctatggaagcggccgctctggccgctggtgcagaaattatgctcaataccaaatgcgaaactttggtcgttgaggatggcgtcgttgtgggcatcatggcaaaggacgccgatggaaacgagatctacgccaaaggtgcgaaaggcgttgtgctgtgcgggggcggctttggcatgaacagggatcttttgaaacgctatattccgtcttgctatgagcaagcgctgcagggcggtcccatgccgttccatacgggagatacattccgcatggggttgggtgcgggggccgattatgcgggattgaattcgtttagctgctgggaagggggattggatgagtactacggagatggagacggttcctactggcattatttctggaatgggcctcgccaattgttgaccaacccctggctcatgttggataagcagtgcaaccgcgcgccatacttcggaggctatgacttccaggaagaatatatcaatcaaggtttcagcaacggtgaagtgacgaatgcttcggcgtggatgtcccttgtgggacatggagcctatgccgttcttgatgataactatgaagagactctcaagatcatttgcaacaaaaaggcgaccgataagtctagggttcctatcgaaaaggatggaacgcttatagagaacaaccttgtgtcggacgactggaggcaggaggttcttgatgcgatcgatcgcggggctattaagaaagctgatacgctcgaagaacttgctgagaaggtcggactggatcccgacaggttcgtagcggcggttaagcgatggaatgaggtttgcgaaacgggggaggataccgaccttgccgttccttacaattccgagtggcttgttcctttgaaaaagccgccttattattgtgcgaagatcggagccatgatcgggaaaacgctatgcggattgcgtgtcgacgagaacatgcatgttctcgatgccgacggaaatcagatcccaggcctctatgcaaactttcttaccgctggcggtatcgcgggcgaaaatagctatggttcccagtggaccaacaccagtcttatgggagcaaatggtttgagctggtgcagcggttatcttgctgccaaatctgcccttgcgggtaaatagattcttgggatggtggccaagcgatgttgtttcgcttggccaccactatggtcgggacaaatgaggatgagcgttttaccgaagagactgctggctttgcgaacgaggaggttccgtcatggagtttcggaacgattgcgacgtgtatcgagaccgatctgtgcgtgcttcctggaaggttccagcgttttgctgtaacgattggggcgctctgaagcttttggagatatgctcggcttttggcttcgagcgaccttttgatctcgtgtacggggctccccattgttcttggtctggtgggcgcccttcggcagtgaggtctcctttggacggaggtctgatagacgcgtatttctccgcttatgcccaattcggtgtacgatgcgccttgactttttcaaaattagctgtggatgagaaagattacgataacgagtacaataacatgcttctcgattacgttgaaaagtacgatggccaggtcatccttttcgatgatggccttgctcgctacataaagcgctcgcgacctcgcattgcgattgtcgcgtcgctcaataaagcgatgtgcaatttacaagatagccgtgaatcggagtcggattactacagagatctttttcgcctttacgatgaagttgtggttagaagcgagtatgtgcttcgcgatggctggctggacgatctgcgcgatagacgcgattcggtagaaattattgtgaaccagttttgcgttcctgattgcaaacatgctttcagtcatatcagcgagctcgaggagtggagtcatcgaggttgttgtggcgaggggcgcccttgctatcatttggaaaccgcatcctgcatcgagagtcgtctttccgagaatcttttcatttccaataggaggatttctgaattatgctctgccggctttacgcatatgaaaatcgcagggcgaaattctcctctgccgctcttcctggacactctggcagagtatatttttgaaccgacgggtgttatttctcatattaaacgggctatcgttcgcgatttcaagaaggaatccatgatgggtttcgaggctctctttcccttcagcattccaaaaagcgtcctgaaaggcttatgatcggaggtcttgttttttttggggtatcgcgatgatggccaacgaactcctttgctgccgccggctgaggcaagaggcagggcgctttgcatgcatttaaggtgctgttcgcgaacgaattgatgcgtgatagcgcgcgagcgcttagaagccgaagacctcgccgacgttggcggcgatgcagaggtcggcttggcggtcgcgcggggtgggggtgcggttgacgatgacgaggcggcgccctgtgaagaagtcgatgaggccggccgccgggtacacggccagcgacgttcccgccaccaccagcaggtcggcctgcgcgatggcattcacggcgccgtgcaccgtgcgttcgttcaggggctcctcgtacagcacgacgtcgggtttgacgatgccgccgcaggcggggcatcgcggcacgctgtcgtcggactgcgcgcgaagggccagcaggttgtctaccgagtaggctgcgccgcacgccatgcagaagttgcgcagcacgctgccgtgcagttcgagcacgttcttgctgcccgctttttgatggaggccgtcgatgttctgcgtcaccacggcggccagcgtgcccgcttgctcgagttcggccagcttgcgatgcgcgcggttcggctgcgcgtcgagcgccagcatgcggtcgcagtagaagtcgaagaacgcgctggggttggcgtcgaagaagctgcggctgaccatctgctcgggaggataggggtacttctgcgcgtacaggccgtccgggctgcggaaatcggggatgccgctctcggtggacacgcctgcgccgccgaagaacaccaggccgcccggcggcgtgtcggccacccagctgcggaacgtttcgatagcgcgcacggtttcgtccatagctcctcctgtcggtttcgacccatgataccacgcttcttgcgtccggatgtttcacgtgaaacatgcgttctgatcggcctgttttgctcttgaacgcctgtcatcccgagcgcaggcgacgaagcgtgcctttgggtgaaaacaaggaaggcggtcacggtggccgccttccagtgcgcttgcgtttcgcgaaggattaaccctcgatggagatggtcttcttctcctcgagcttgggctgctcctgcttcttcggcacggcgatcttcagcacgccgtcctcgaacttcgccttgatgtcgtcttcctcgatgtcgtcgcccacgtagaacgtgcggctgcacttgccgctgaagcgctccttgcggacgtacgtgccctcttcgtccttgtcctcggactcggactgggtctgcgccgtgatggtgaggtagccgtccttcagctcggcctggacgtcgtccttcttgaagcccggcaggtcgatggtcagctcgaatcctgcgtcggtctccttgatgtcggtgcgcatgagcgtgggcgacatcttctgcatgggagccgaggcggcgttgaagaacgcgtcgaaggggtcggtcatcagctcgctcaacaggttgcggttcctgcgcatgggtaccatcattgccatgttcgatcatctcctctagtcgtgcggggaggcggtggttccgggtgcgccgaaacgccgccttgcttggtatgcctggtattctacgacgcgttttagcactctacaaccgagagtgctaaatggttactttttcgttatgtaggagcgggggcttgccgcgcggccgtcctcttcggtggcgcctaagacgaggtccatcatctcctgacgattgccgatgccgagtttcgcgtagatgtgggcgatgtgcgttttcaccgtgttctcggcaagcaccagttcttcctggatgagggttcgcgttcttccctgagcgaggaggatgaatatctccgtttcgcggggcgaaagcttgttcgcgactgcgatgtcttcgcatcgaaccgcgatggcgcgtgatacgtgctctcccgtgagatcgccgcttgaagggtgcgcagtcgtgggttcgggattgcccgctgcgctttccttctccgtcgactccaggcgccttgccccgatccattcgctgagaatggcggcgatcgtgagggagtacgcggcgcccagcatgatcatgctgctgaaagccactccgctgcccagcaaggcgacccacagcacggagctgagcgcgtagacggctgctgcaacgcccatcactcggtacgagggcatggtgagcgcatcgatggcggtgaccacgacgatccagaacagcacgtgcgcacacgagtcgtccagccgcatgagggcgtccagcagagcggcgggtatcccaggggcggcgttttgggacaccacgagaaacagaccgccgatgacgatgatgaacgctggctgaaacctcaaatcgaggcgccatccggttgtcttcaccagtgtggcgagtgcgaagagggcaagaaacgctgttgagacgagggagaagacgacctctgccgcgatcccttgcgctgcgacggcctcgctgccccataatccgatcgaactgaacgaccgtacggtcgcaagtagcagcgcagctgcagcgataagcaccagcaggcttcttcgaccctctcttcccgccggcagcacggcgcgccgaggttgagccgcgagcgcttccatccttgctccggggaggtcggcgcgccgggttatattctgggcggattcggtaggcgcagagctccgggcggctttgaatagcgcggcggaaacgagcggcagcgcgatggtgacggcgatctgccagacgggaggcaccgcatagcgggcgatgggaagcacgagcgtttccatacccaatgccgccacgatgcaccaagcggtgcaggcgaaagtctgcgttctggctagcagcaaatagaatcgcgaggcgatccagaaatagcccgcgccgaacatgatcaggccggcgatggcaaggaaaatagggtcgaagaggctttgattggaggcgagggcgaaactcgcggtgcctatcgaggatgcaagcggtagaacgtaggagaaaggttggtcgcgttcgcggagccatcgggggcctactgcgaacgcaactcccacgatgagtatgcccagcaggaagaagatacgcggattgacggcgggatcgaggtcgtgcagggaggaggggaaccctccggtatgcccggccagcgtgcaccagagcaggttcgtgcttagtcccaaggaggcaagaactgcgctgcggttgacgcgcacgccggcgggtgtttccatgatcgatccccctgtttctcttcccggcgcggttgcgagcagatattcgaaagtcctctgaacagctggccattatatacgattctcacgataggcgaaaacccggcgcgcctctatcaaccaaaccgggggatacccgttcgagcccttcgtcatattcacccggatacgtcgatggcggtggacatcccgtgcttctaccatcttccgggtgtgcggcgtgcgcgcctgttccaggttggaaggaggggcaagcgataaggcggaactgccgcacgcacgacaagagaggatggaggagagatcatgagaaacatgcgactgaaggccgcgcttggaatggcgggggtgttggcgatgactgcagcttgctgcgtggttggtccggcgcttgcggccgattctgcgtcgactgcagacgaaatagtgcgcggaggggagccggacggcgatgttcagtatcccggcaaagagtacatcgtcgagaattacgacaagtgggacaagatcgccgaggagtacgcgcccgagatcatccgatattcgaacgggcagctggttcagcgtaccccgaccgagtacgagtgcccccattggatgcagcaaagctggaccatttcgtacaacacgtactacctcgacgcggacaaccgagggtgcaattcgtgccatgctgatatgaatgcgatgatcgagaacatggagtacaagcatgccacgatcgacaacaaagcgctcgagacgtacagcgacgtgaaccagtgcatctcgtgccatcgtgacaacggcgacgatttcggccgcctcatacatgccatccactacaacgagcgcagcgggaacaagttcgccgagggctcgaacggcacgtgtcaatcgtgtcacgacgcgactgcggatggcaacggcatgcagctgtgggacaacgtgaagcatgaggcgctgcaaggcatcaacaaggttgaaaacgtgcagggcgagttcgcatccacccaggacaaggtgcagacgcaagacgagctgtacagctacgacttcgttcacggctattacgaccatatgcgttacgcatgcgggcctaacgggcttgacatcgacctgccccagagcatgttcgacgagtgggagttcacggtcgacgggaacgtgaacgcgccctacacgaagaagctgcccgagctggtggccgaagctgaagccgctggcgtggtggtcacgaagccctcgaagatggtgtgcgagctgaatccgatcggcggcggcggaatcggccaggccgagatcaccggtatcccggtcagctggctcatcgagaaggctggcggctacaccgaagacaccaacagcgtgcgcgtcattcgcgcagacgggtcttcgcgcagcgggttcgacctctcggtcttggacaaagggtatctggtgtacaagatcgatggcgaatacctcagcgcacgtcacggcttcccggtcatgcattggcaggagacctacgatgcccagatcttctcgaagcagatcaacggctaccacgtgtcgtccgatgtcatgaaagagcgtgtgtgcggccaggtcaaccaagaggatgcccatgtgaaccgtcccaacgtgacggtgtgcggcgtgcccgaaggtctcatcatccagaacggcaagccgttcacgttcaacggctatgccgacgcgttcgaccatcccatgaagacggtggaattctccatggacggcggcgagacgtggacgtcgttcgacgtgggagacgtcgatccggcgaaatggctgtggtggagcttcacgttcacgcccgagaaagaaggagcgtacgtgctgagcgtgcgcggcacggacgtcgacggcgaagtgagctaccgcaaccacgaggtgctggtgaacgcgaaggacgagatgccgtccgaagacgagatcaccgagatagggaagatcgtcgatccggccatggccaacggcgatgcttccggcgatcagcagtaagcgaggatgatagacatgacgcaacgaaatacccgaatgttcgccggtgttgccggagctgcgctgctgctcaccgggtcgggcttggcgctgaacgctttgaatccgaacagcgccgatgcatccgatgcggcgagcgggatgacgcactcgttcaacgagaacgtggttgaggcttcgtgggtgaacgtcgacgacggctcgtacgtacgggtgccgaacgtgcagggaagctttgtattcaaccaattgggaacgaccccgaacgacgagctgttcaacgtattcggtgctgctttgacctcgatgtgctctaaacctgcggtcgagctcgaagcgcagacgggcggcgtggccaatttctacgtgaacgtagggggtcatatcaagaagaacttcacggtggatgtaagcgagttgtccgaagatgccagcgaggaggcgctcatggcgtgctcgtgcgctaccggctctccgttcggacaggctgcggtgctcggcgtgccgctggcgtccatcgtggaaatggccgatttggaggaaggcgtgaacaccgtgacggcgtacggcgccgacgggttcggccagcctttgccgctgcgctacgctttggagcatgatgcgatgctcgtctaccaggtgaacggccaggagcttacgtcggcgacggacggttccagcatgcagctgtggatgcccgagacggtagcgcggtacttcacgcgcaacatcaccgacatcgagctgacgcgcgaagacgtcgaacccgatgtgcagcaggtcgatccgtgctaccgcaacaagatcaacatcatgaactacgccggcggatgcacgttcgtcgcaggcgacgagatcacgttcgagggcgttgccgacgatctgggaagcccgatcgaggctatcgagttttcgttcgacggcggcgctacttggacgtcgtgcgcgaccgagggagcaaccgcggacaaatgggtgaattggcagttctccacttcgttcgaggatgcaggagactatcgtatgacggtgcgtgccaaaactgcagacggcatggtttcgccgcttgcggcgacgctgttgttccaggtctcgtaagagggcttatcggagggcgcgcaatc

SEQ ID NO: 9944 - DNA, 817 bp, Unknown
  gut microbiota DNA sequence
atccgggcgcgccctctttttcgggcgtccgcttgcagtttggcaatggttttatgggtcgcgtgaaggccggcgtatgatctatacttgccattcgatcggttgatgcaaagaaggagcttgtcatgaccgttatcggcctcatatccgacacgcatggacggttgcccgacgaggcgctcgcggccatggcggacgtcgaccatatcatccatgcgggcgacatcggcggccccgagatcctgcatgcgctcgaggcgttggcgccgaccacggcggtgctgggcaacaacgacttcgacgagtacggctcgcgcgtgggccgtttcgcgcatccggtgatcgacggggtgcgcttcctcgtggcgcactatccgcgcgacgtgcaaatcgggttcaacggctgcgcgggtctggcggcgggcgatcccatcccgcaggtgtgcgtccacgggcacacgcatgttcccgagctggtgtacggacccgaggcgcgtccggcatcgtacgtcgtctgccccggcgcgccgttccggcctcgcggcgggtttccgaagtgcacgggtcgcatgctggtggatgatgggcgcgtgctgggcgtgcgcatcgcgtcgttggacgggcagaccgtgttcgaggtgggcgagggcgcgtaaagcaaaagcccggtgcattccatgcgcattgtcgcccgaaggcctcgttttcaggcgcgattccgcggctttcgggcgacaatgcgtgcgagccatccatgttttcttgcaaacgagtgctttaagcgggacatcgaggaaagctgccggggatgcgaacg

SEQ ID NO: 9945 - DNA, 3844 bp, Unknown
  gut microbiota DNA sequence
acgcattgtcgctgaaagcctcgttttcaggcgcgattccgcggctttcgggcgacaatgcgtgagagccatccatgttttcttgcaaacgagtgctttaagcgggacatcgaggaaagctgccggggatgcgaacgggcgcccggcaggggcgcccgttcaggggagggagggaatgtcgaacgcgctgtcagctggcgagcgccgtgctcggggctgctgctcgatggtgcagcagcgcgcgccgcatgcgcagcacaacgtaggcgcccactgccacagagtacacgaccaagctgacggtggccgtctcgcgccctgcaaatgcggaaggcgctagcagcaatacgaggtgcacgtacgtgagcaggtagaacgggtaggcgagacgttgcacccctttccagcgcgcggcgctcatgcggcgcttcaccacctggaacgaggtgaccagcaggatggccatcagaagaaccagcaatgccgccagcgctagcgagaacccaaggttcccattaagcgccgagcccagccgcggtacgtacgacaccccgtaaaacgccaggtgacccagcgcgaagatgcagccaaggatggagagctggcggcggatgggcatgagccgcgcccgcaacggcgagctctcgtcgagcacgcccacgaacatcacgatggtgaacagcacgaacgcaagcgcgcatcgctgcataagcggcatgaagtacggccacatcccgcccgcagtgttcgtggtcgttccgaaccagtacaagcccaccagcgcaagcgcgacgatgtagaagggtacgggatgtcgcttcagcggtttcgcaagaatcccgataaggacgatgcagcaaacaagcgcgatcaagaacctcataccagcccccttctgtagtcgcaatattgtcatagtatcatagtataggctgaacagccttgacgatcttgcgtagagtacactcgggttctattcgatatattatccttaaactagatgcatttgaacaggtattttgcgttgactgtcatatatcatggtgatagtatgaccgcaatagctatcatactaggatatgacggttatgctcatgcatgggtcgacggtgaattgttgggggacaatctcggacgggcttgtttcccgaatgcgatctagagggggttacgcgtggataccacattgacacggcgaagtttcgtaaagtggggaaccgcaacggttggtgcaacagcgcttgttggatttaccggatgcgcacccggcggcggcaaggccgaagatgcttccgaggggactcagcagaaagcgggcgagtggctcaacgctccttgttacaacaactgcagctgcggctcttctcgctgtctgaaccgggtgtacgtcgaggacggcgtcccattgaaaattcgcaccgacgaggaatcggaagacatgttcgccatgccgcagcgccgttcttgcttgcgtggtcgtgcaaaaatcagtgaggtgctctcgccggctcgcatcaagtacccaatgaagcgcaagaatttccgcttggacaatcctcaaggagagctacgcggcaaggacgagtgggagcgtatcagctgggatgaagcacttgatctcgtggccgagggcatcaaaaagatgtacgaccagtacggtccgacgggcatactctgtggcgcgtccagcaacatcggcgacgggtactacgatcagaacgtgtgcctgctgaacgccctgggaggctcggtgcatgcggaagctggcacggtgtctttcggctcctggtcggttgttgacacccatatgatcggtggcttcggcatgtccaacacgccgcatcacctgcagttgatcaccagcgacctccatgtgctgttcggatgcaactgggcggccaacaaggccggcaatcacgcgttatatctggaagaatgccgcaagcgcggcgccaaggtcatcgtcatcgatccgtggctgagccaaacctcacagatggttgctgacgaatggattcccattctgcccggctcggatacggcgctggtcatcgccatttgctacgagtggatcaacgcaggaacgtacgatcaagaatttctcgatacgtactgcatcggattcgacggcgatcatatgcccgaaggtgcccctgaaaacgcctcttggaaagattacgtcatgggcaccgggtacgatatgacgccgaaaacccctgaatgggccgagaagatctgcggcgtgcccgctgataccattcgctcgcttgccgccgaaatcgcgtcggtggacaaggttgatttcaactgcgcgcagtccgcatccaagattcccgcgggcgagcagttcgtccagagcttctacacgatggcactcatgcacggcggcatcggcaccccggggcattacttcggctggtcgggcgtgaaggaattcatgagcagcggcatcagcacgggcgcctattgcccggtcaccgccgaccctgccaaccccttggctcctgcgggctcgccggtgtacatgtactatcccatcccgtccttcccgacgctggaagaccctgatagttggctgaatttggagccttcggaatgctggcgttctattctctccggagaatacggtcgcgattgctggccgacgggaaagcgtaaggtcgacattcacgcagcctacttcggcggccatatgagcaccttgaaccagatccccgacaccatgaacggcatcaaagcagttcgtgcgatggatttcgtctggggtgtcaacccgttcttcgactcgacgcgccagtactgcgacgtgctgcttccctgcgcgacgttctgggagaagcccaacaaggcgttcggtggagattacgcttccgcgctgtggttcgacaagatcatcgatcctctgtacgaggcgaaatgcgaaagctggatcgccgaggaattggcaacgcgcttggggctcgaccctaaggtggtcaacaccttgagcgatgctgagcgtacgtacgcgaccgtgcgcgatgcaacctacatggacggcacgacgttcgagtcttcgacgcttctgaccatcaagcaggaagaaatcgaccagttcttccccggcgtcgaaggcaccccccaagagggtaagttcacgttccaggaattccgcgagaagggcatcttgaaggcggagctttccgaggatatgttcattcccgagccctatatggcctttatagccgatccggaaggaagtccgctcaagacggcttccggcaagttcgagatctactgcgagacggctgcctacatgatcaactcggtgggttactctaccatcgcccccatcggcatgtaccagatcggcgaccccgagcagggtgccggtacgcagaccgacgagtacccgctgctgctttggacgcctcactcgctgcgtcgtgctcactcggtgaacgacaatgtggtgtccttgcgcgaagcatttccccaagaatgtttcatcagtgaggttgatgccagggagcgcgacatcaagaacggtgataccgtgctgatgaccagccctcacggaaaggtgctgcgtccggcgaaggtgatcccgacgctggtgccgggtgcggttgccatccaggatggtgcttggttccagatcgacgaagaaacgggaatcgatctgggaggatgcccgaatgtgttgcaggctccgaaatcgtcgggtggaggatgccaagcgtggacgggtacgttggtgcaggtggagaagtatacaggcgatctgacactcgaacctgacaagaatcggccgatcgtcatgccggttggcgtggaataagggaggtgcatcatggctcagtac

SEQ ID NO: 9946 - DNA, 3071 bp, Unknown
  gut microbiota DNA sequence
ggtagtcgcaattctgtcatagtatcatagtatagattgaacagcaatacagaagcttatgtcaaacaagcagctcgtttttcagggcaattgttctcaagttagatgcatgcttgcccgttattctcattgactgtcatagtttatggtgatagtatggcggcaatgggcatcatactaaagtatgacggtacgggctcatgaagtcgtgattggaattgtcggggggacattccgtatgcgggcattgtttcccggacgcgatgaagagggggtcaaaagtgggcaattcactgacacgacgcagtttcgtcaaatggggatcggctactgcgggcgctgcggcattggtcggcttcacgggctgcgctcctgcaggagacgcgggcaccgatacggggcctgctgcttccgcaggggaaaagggcgaatggaaaaccggcgcctgcatgaacaactgcagctgcggttcctcgcgctgcttactcaaagtgtacgttgaggacggcgtgccgctcaaggttagaaccgacgaacaggacgaggacaccatcgaggtgcctcagcgtcgagcctgtccgcgcggacgcgcccagatcagcaacatcacctcgccggcgcgcatcaagcacccgatgaagcgcaagggttggagtcctgagaatccgaacggcgagatgcgcggcaaggacgagtgggagcgcattagctgggatgaagcgctcgattacatcgccgccgagatgaagaaggcctacgatgcgtacggcaaccggtctatcctcgctgcggcctacgacgacatcggcgacacgtacttcgatccggttatctgtctgctcaacagcttgggcggtgctgtgcaccacgatatgggcaccgtttcgctcggttcgtggccgcttcccgagctgttcatgaccggcggcatgctcaatgctcccgacgcgctagccgtcgccgagagcgatctgcacttccacttcggcaacaactggatggcgaacaagggcggcaacaccgcgtatcagcttgactatgcgcgtgaacagggcggcaagatcatcattgtcgacccgtggctgaatcagacggtgcaggcggtcgcggacgagtgggtggccgtgcgtcctggcaccgacacggcgctgtgcatcggcatgatgtatcaccagatcgagaacaacctgtacgatcaggaattcctcgacacgtactgcgtagggttcgatgccgagcatatgcccgaaggcgctccggctgaggacaacttcaaggattacgtcttgggcacctatgacaacgaacctaagactcccgaatgggcagaagccatctgcggcgttccggctgagacgattcgccgtttggccgaggagatccatgcggcggagaaggtggatttcttcgctggccaatcgacgacgaagatacctgcaggtgagatgttcgcgcaggcattctacacgcttgctatgatgcacggtggccttggcacgccgggcaactatgccagctgggtcggtttgcatgagggcatgtcgggcaccccgttcgtgatggcgggcgattcctccaacggtgcgaagaagaacccggtgaatccgctgactccgccttcggttatgtcgactcctgactggtcgaagatcgaggacccaacatcatgggagaagatcgaccatactgaatgctgggtctccatcctcaatggcgaatacggtcgcgacatatggccgggcggcaagaagccgatcgacatccacgtgatctattcgggtggttatcagaactcgctgaactcgctgccgaacgctaatgcggctatagaggtgttccgtaaagtagacttcgtttggggggcgaatccgttcttcgatccgtcgcgccagtattgcgacatcgtgctgccgatcgccacgtggtgggagaagggcaatcttgcctggatgaacaactcggatacggtgtactgggctgatcgcatcatggagccgctattcgagtctaagccggaatcgtacgttgcggaagagcttgcgaagcgtttgaacgtggatcccgcagccgttaacacgatgtccgatgcagagcgtacgtacacgtctctcgcaggtgccatgtacatgaccgaccacgacactatgcaatacgccccgctcctgaccatcacgcaggaagacatcgacgagctcggagttgagggcgtcccgcaagaaggtgtcataacggtggccgaattcaaggaaaagggcctctacaagacaaaacgatccttcggcgacaagctgacgaatatcccgtacaaggcgttctacgccgatcctgcggcaaatccgctggctacgtctacgggcaagttcgagatctactgccccacgctgtcaggttacgtcaactcggtcggcttctcaacgatctcgcctatcgcgaaatggcagatcggcgaccccgaacagggtcagggaacccagaccgaagagtacccgctactgctgtggactcctcattcgctgcgtcgcgcccacacggtcaacgacaacgtcgcgtcgttgcgcgaggcgttcccgcaggagtgcttcatgagcgaggtggatgcgcaggagcgcggcatcaagaacggcgatatcgtgctcatgaccagcccgcatggcaaggtgctccgtccggcgaaggtcatgcccacgctcgtgcccggagcggtggcgcttcaggatggcgcatggatccagatcgacgaggagacgggtatcgatttgggcggcgatcccaacatcctgcaggcgccgaagtcttccggcgaagcatcccagtcctggaccggcaccctcgtgcaggtggagaagtatacgggcagcatcaagttggaacctgacaagaatcggccgatcgtcatgccggttggcgtggaataagggaggtgcatcatggctcagtacgcattctactttgattccaacaagtgctccggctgcaagacgtgccaggtggcgtgcaaggaaacctacaagctgccggtgaacaacctgtaccgcaaggtgctcaactaccagggcggcacctgggaactc

SEQ ID NO: 9947 - DNA, 1028 bp, Unknown
  gut microbiota DNA sequence
gtttcactttgattccaacaaatgcaccggctgcaagacatgccaggtggcgtgcaaagaaacctacaagctgccggtgaacaacctgtaccgcaaggtgctcaactaccagggcggcacctgggaactcaacgaagcgggcagctacgtgcccaacggcgtgttcggctacttcgtctccatggcgtgcaaccactgcgtcgatccggcgtgcgtggcgaactgtccgacgggcgccatgcagaaggacgaggaaaccggcatcgtgtggaccgatcacgaggtgtgcatcggctgcaagacgtgccagaccgtgtgcccttacgatgcgccgacgtacgacgacgaagcgggctacatgttgaagtgcgacatgtgcaaggccgagctggaagcgggcgggagcaagcccctctgcgtcaccggctgccccatgcgcgcgctcgatttcggcacgcgcgaggacatgatcgcgaagtacggcgagggcgacgtcgaggtggagcccctgccgaaggacacgactcatccgaacctcatcatgaacccgcatcgcgatgcccagaagtcgggcagcggcaccggcgcgctcgtgaacctggaagaggagatctaacggcatcaggctgggcggccgcttcgtcggccgtccagctgtttcggaggggaaaggggaaacgatgaacgcaccgtacaaccaggacgtgcttgcggctgcggaggcgtgcttcgcgcaggcgtcccagctgctgtactgcgagccggatgccgaggtcgtcgccgaccaggtggcggagcggccgttccagaacgcgccgttcggcatggacgatgccgatgtgcgcgaaggcatggcgctgatggacgcttggtgcgtcgccgccgcggctgacgaagcgggcttcgacgaacgcgtggccgcgcttcggcgcgagtggctgcggctgttcgtgggtgccggaacgcccgatgcgcccagctgggagtcgttctaccgcgatccgaacagccagctgttcagcgcgcgc

SEQ ID NO: 9948 - DNA, 8610 bp, Unknown
  gut microbiota DNA sequence
gggcatggcgctgatggacgcttggtgcgtcgccgccgcggctgacgaagcgggcttcgacgagcgcgtggcggcgcttcggcgcgagtggctgcggctgttcgtgggcgccggaacgcccgatgcgcccagctgggagtcgttctaccgcgatccgaacagccagctgttcagcgcgcgcacgctggaagtgcgcgagcggtaccgtcgccacgggttgcagatcgagcggctgtatgcggagcccgatgaccatctggggctcatgctgggtttcgtcggccatctgatcgggctcgaagccgaggccctcgcggtcggcgacggtgcggcggcgggcgaagcggccgacgagcaggagtcgttcctggtcgagcacgtgctgccctggcttgcggcctggcgctacagcgtcgatgcgcatgcgtcgtccgactacttccgcggggcaggcgcgttcgtgttcgggctgtgcgcgcgctacgcacagcgcttcggcgtggcgttcgaccgcgaagggcaggtgttcaagcggaagtagctaggcatcgggcggtcgaagccctatcatgaactgagcgtctggcgagagggggacgagatgctcgggacgcttgtggtgctgtacctgttcctaggaggatgcggagccggcgttatgttcgtgacggcggcctggtcgcttgcgtttcaccggacgcgcacgcgcacgcaggagcaaacggcggcgttcggcgatttgaaggcccggtgctacggcatcgggttcgtcatgctgtgcttggcggcgctgtgcctgctgctcgatctggggcgccccgagttggcgttcttgctgttcacgcggcccacgctgtcgatactgtcgttcggctcgttcacgctgctggccagcatcctggtcagcgggtttctggcggtggcgaacctcatgtacgtgccgttcgtccgtgccggggcgcgcaaggcggccgaagcggcgtgcttggcggtgtcgctgtgcatgatggcgtacaccggcgtgtacgtggggtggatcgaggcggttgcgctgtggaacaacgcggccacgcctgcgctgttcgcgttgtcgtcgctgtcggcgggcgtctcgacggtgttcgtgatcgcgccgttcgtgcgcgatgtgacgcgcttgagcggatggatgctgctgctccatcgcgtccatctggcggtgctggtgctggagttggtgatgctggcggggttcgtggcgttcgggttctccaaccccttcgcgcgcgaatcgctggcgatcctgttcgacccgagcgggctgggcccgtggttcgtcgtggggctggtgggcttggggctgttggttcccttggccgtcgaagtgttcgtcacggtgacgaagcggttggttcgcgcgctgccggtggacctgctgtgcatcgcgggagggctggtgctgcgattctgcgttgtttggtcggggatgcattgaagatgcgcggttgccgccgctgtacaagctggttatcttgtacaatgcggaacggatgatccctcagaaagaataaggaagtggcatggcgttattcgagatagacgagtcgtcggggctgcccgtgtgggtgcagctgcgcaaccggttcgtctacttgatcaagaccggccactaccagcccggggatcagctgcccagcgtccgcacgcttgccgccgaagccgccatcaactacaacacggtgagcaaggtgtacatcaacctcgagcacgacgggtatgtggaatcggttcgaggccgcggcgtgttcgtccgcgatatcggcaagctggccgccgacgacgtgcagtccatcgccgatacggaaatcgaggagagcatcaagcggtgcctcgcgttgggcatgacgcttgatgaaatcatgttgaggatgatcgacgtcgcccatcgcgtccagcaggacgtggaagggggcgcgagcatgagacggggcttgtatgaaaaatcgcaaaggaaagaatcaaactgacgcgccggccgccaagccgttttccatcgagcagtacaactcgcgcaccgatcggcgcacgtcgcagaacggctcgctcatgttctcggcgttcgtgttcgttgtggcgctcgtgctggccatcgcggcgggctacctgatcacaggagccttcaccgtgtgggtggtgctggtcggtttcgcgctggcatgccttgccgagatgtccatccacatcgccatgcagtgggagaaggtggtggtgctgcggttcggcaagttcagccgttcgaagggccccggcctgtacttcaccatccccttcatcgagcagactgccctcaaggctgaccagcgcatcatggtcaccgggttcggcgccgaggagacgctgaccagcgacctcgttcccatcaacgtggacgccgtgctgttctggatggtgtgggacgccgaaaaggcgtgtctcgaggtggagaactactacaactccgtgtcgctggtggcgcagaccgcgctgcgcgacgccatcggccgcgccagcgtgtcggaggtggccatccgccgcaaccagctggatcaggagttgcaggaggtcatcgaagagcgcacgtcgctatggggcatcaccgtgctgtcggtggagatccgcgacatcgtgattccccaggagctgcaagaggtcatgtccaccgaggcccaggccgagcgcgagaagaacgcccgcatggtgttggccgaggtggagaaggacatctcctccatgttggtggacgccgcgcacgtgtacgaggagaacgaggtggccctgcgcctgcgcacgatgcacctgctgtacgagagtgtgaagggttccggcggcaccgtggtcatcccgagcgcctacagcgaaggcttcagcgacgccgccctgaagaacatggccgactccctgaaaaccccgaaggggtagcgaaggccgaagttcgcgggcccagaaaagcaaatgacagtcaaatgaaaagcaaggacgacggtgagtctggacgacgtcgcctgcttagcaaaccaccgaaagcttgccggtgtcggaatccatgatgaagccgatcacgcgcacgtggggcggcatgacggggtggttcgccaccatgtcgacgctcttgcgcacggcttcctcggtgtcgccgaagccggccagccatttgtcgaagtcgatgccgcagtgccgcgcgaactcgatgcgctcggccgacacgccgaggcgctccatgttcgctaccatttccttgccgctcatgtgctgtgcgccgcagttcgtgtgcgccacgatcatgatgtcctccacgcccagctcgcatactgcgatcagcagcgagcgcatgacgctgccgaaggggtgggccacctcggcgccggccaccttgatgattttcgcgtcgccgttcttcaaccccagcgccgccagcagcagcgcggtgaggcgcgtgtccatgcacgagacgatggccagcttcttgtcggggtacttgtcggtggtgtaacgttcgaagtcgcggcgctccacgaacgcgcggttgtgcgcgaggatgccgtcgatggtgggggagatggtcgcctgctgctgatccataagagccttctttcgtccgaagcccttatgatagcgcaacctgctcccgcgcaatgtgcgaacgaatgtttcacgtgaaacattcggtgaagatgcaggtcgcagacgtggaaacggccgcccgagggcgaccgtttctggcagatggaaaagctgggtgcgtcggtttagaacgcgcggaaggaggccttcgggcagaagcagatggggcacttctcgaagttctcgcccttgtggatgtaaccgcagatggggcacaggtagaacttgtcgtcgtcgggagcgtcgatgtcgttgtacgccgccaggtaacgctcggcgtgcacggactcggccagcttggcgcgggtgaacacctgcacggccttggtgttgccctcttcctgagccttcttgatgaaggccgggtacatgtcggacgtctcgaagatctcgccctgagcgcccatgatgaggttcaggtcggtctgcacgccctcggcctcaggggcggccggcttctcgaagtcgggctcgacttcggcgacgagcgcgtactcgaggccgatgtggatctgctcggcagcggacgtggcctcgaacaggcgagcgatctgctcgtagccctgctccttggcagcctgggcgaacgcggcgtacttggcagaagcgccggtctcgccgccgatggcggccttcaggttctcaagcgtggtgccgacttcgcaggtgccgaagccgtccatgttcgtggtgttctcagcggtggggatctcggaacgtaccttcatgggtgatactccttctcgtcttacgttttcgtctgtgccctcttaatgagaatcaatctcaataagtagaatactccgaagccgaacgagacgcaagggggtaatcgatggccgtcgggtatttcgcgaaacgtccacaaagcggcttcttccgcgccgcaccttccttacggctccacgatgttgaagaagaagtcgaatgccgtcaggtgctcggtgagcttggcgacgacgtcctggtccccttcgacggctatcgaggcggcttgcgcgtcggcatcgcggttgaggatggcgaacatgcccaggcgcggcatcgcgatcgttgcgtcggcgtccgccgcctgcgtgccccgttcgtacagcacgacgcccgagcgcacggtcagtaggtagggatcctcgtcggtgaacgccaggttcacggtgaggttcaggttctcggcggcgttcgcgtccagcaggatgcccaggtagtccagcatcatggagggcgtcatggcacgctgtatgtcggagctgccggtcgttcggtacttcggatcggcgtccacgccgtcgcgcagctccttcgcgccggtgaggtaggcgttgcgccaggggcccgattccgcctggaagcccagctgctccagcgcgtcggcgcacagcaggcgggcggcacggttgccggggtcggcgaacaccacgaggttcgtcacctcggcaacccattggtatgcgcccgcttcgaagtccttcgcggctttcgccagcaccgcgtccacgtcgccgaagtattccacgaacttcttggccgactccgccgggggcagggcggccagatgcacgggattcgcgtcgtaccagcccatgtacttctggtatacggccttcgcgttgtgcgacaccgtgccgtagtactggcgcgtgtaccagttcttttccagcgctgcgggcagcgtgatcatgtgggctatctcgttggacgtgtagccttggttcacgtacatcagcgtttgatcggcgatgaacttgtacatggcggcggtgttcgtgaggtagtcgcggatgaagtccgcgccccaatgcggccagttgtgcgcctggaacgtgacctgggtctcgctgccgtagcgcgcgagcgtttccatgagatagttcgcccaggcgttgccgtcgcgtacctccgcgccgcgcagggtgtacaggttgtgcagcgtggccgtgcagttctcggcaacccacagcgcccggtagccggggaaccacgtgttcatctcggcgggagcctcggtgccgggcgtcatctggaactccatggtcacgccgtcgacggtgcgcgtctcgcccgtcgtcgtgacgatgtcgttcggcgccaggtaggagacggtgcccgtggactgccccatgccgatgccgatggacagcttgccggtgggtgacgcttccaggaacgtgccgtactggtagcccgcgcggcgccccatggcgttgccggcgtatacgttctcggccacggcgtgctcggcgaagccctgcggcacgatgatggggatggagcgctcggccacttcctcttcggacacgatgcccttgatgccgccgtagtggtccacgtgggggtggctcatcacgatgcccataatcgggcgctcgcccaggttgtcggtgaccagctggaacgcggcacgcgagcactcgcagctcatcagcgggtcgaacacgatccatcccgtgtcgccgcggacgaaggtgatgttcgtcatgtcgtagccgcgcacctggtagatgccgtccacgacttcgaacaggccgaagaggtggttgatctgggcgttgcgccagaggctggggttggcggtgtcgggcgcgtcggcgggggcgtcggcgctgtcgagaaacgcgtaggccttctggctccacaccaccttgccgtcttcgccggtgatctccagcgtatcgggtgcggcgatgagcccgcgctcggcgaattcgcgctcggtttcgtcggagaagtcgagcagggcgtacacgccctcgttggccgccgcggttgccggtgcggccggtttcgcgtcggcgttcaggttgtcgagcgcggctttgcctgcggccgcgtcgtcaccggttccggctcctgcggcagcgcagccgcacagggcgcttcccgcagccacgagcgcgccggtggcgaacgccccggtcacgaacgtgcgcctgtcaagtgcatgatgatggcgggtcatagggcccctcccctttcctcgcagagtctctcggttcgcagcaatggagcactatcacgatacgcgcatcgaaacagcgaaaacatcggccggtacgagggttttcccgaagttcccccgatcgcttttgctatgctgagcacgatcgaggctccgtacgcgaagaaagacgggtcgaacccatggaccaagaagcccccatcgacagctcgctcatgctgagcgagaagttcacgcccgcggcgctgcccgaggtgtgcgcgccgcgccgcagcctcatcggccggttcgacgacgcggccgccctgcggttcggctacgtgggggctccggcgggcagcggcaagaccgtttcgacgctgctgtggctgaaagcgtgcaagcgcaaggtggtgtggatcggcctcgatcgctacgacaacgcgcccaccgtgttcttcaagctgctggccacgggcctgctgtcggtgcagccggagaacgtgggcatgcgccgcgtcctcgcgagcccgtcgttttccgcgtcgcccgtcgagcacgtcatcatgatgctggccgagatgcagccgccaaccgagcgctacgcgctcgtgctggacgacgtgcacctcgtcacgaaccgcgagatcatgaaggcgttgccggccgtgctcaagcggctgcccggggcgttcgcggtgtttctgctgtcccgcaacgagctgcccgacgagctgcgcagcgtcgtgcgcgatcctgcgcagctcgtcggggccgaccagctgcgcttcaccgaggacgagatccggcgctacttcaaaagcctggggcgtgccctcacggccgaggagacgcgcttcgccttcgcggcaacggagggctgggccatcggcgtggccgcggtggcgaagacgggcaagatcgattccggcagcagccactacctgttcgccagctacttcgagtcgcaggtgtggaacgcgtgggacctcgacctgcgggagttctgcctgcgcacgtcggtggtggacgagttcgacccggagctcgcccggctgctgacggggcgtcccgacgcccgcgccgtcatggacgaactcaaccgcacaaacacgttcctcagccgcctgcatggcgatgcgtaccgttaccatcatctgttccaggatttcctgcgcgagaaggccgctgccgacggcatcgaccgcccgaagctgtgcaaggcggccgccgcgtactaccgcgagcaccgcgactactcccgcgcgctgcggttctggatggaaagcggcgactaccgcggcatcgatgcctatctgctgttgttcctgttcgagaacaaccgcggcaacatcgccgagtacgccgacttcctgaacacgttcttcgtggacgaggttcccgagcgcgcgttcaaggaatgcccaccgctgcacgtcttgggagcgtggcacgcctacctgaccagccgacgcgagctgttcgagcgccacatggacgcggtgtaccgcaacctgccgcgcatcgcgcgtgccgactcgcggttcatggagtacgcgcttctggcctacagcgtggaccatcgcacgagcatcctcgagaaggtgaagcatttccgcgcgttcggccggttcatcaagcggttcacgcccgaggggctggccacgaacatcgcgtcgttcacgcacaacctcccctacatgcaccgcagcaacctggactactccgatctggcgctggaggagggcagcatgcggaagctggaaggcaacttctcgctgctgctgggccaggagtggcgctacatcgagccgggcatcccggcgtgcttcgcctacgagcgcaaccgcctggacgaggcgctggagggcatcgagcgcgcgcgggcggctatgatccccgaaaacaaggtggaggggcggttgtgcgtggccgtcatgtaccagcagacgctttggcagctgggccgcacggacgaggccgatgccgtgctggacgagctggacggcctggtggagcgcgaggcgccgttcttc

SEQ ID NO: 9949 - DNA, 104 bp, Unknown
  gut microbiota DNA sequence
tcgtcatgtaccagcagacgctttggcagctaggccgcacggacgaggccgatgccgtgctggacgagctggacggcctggtggagcgcgaggcgccgttcttc

SEQ ID NO: 9950 - DNA, 123 bp, Unknown
  gut microbiota DNA sequence
gccctacatgcaccgcagcaacctggactactccgatctggcgctggaggcgggcagcatgcggaagctggaaggcaacttctcgctgctgctgggccaggagtggcgctacatcgagccggg

SEQ ID NO: 9951 - DNA, 7788 bp, Unknown
  gut microbiota DNA sequence
ctgccgaacctcaaagcgcatcgggcgaagctttcgctgttcgacgccgacaagcgcgtcgcgcggacctggctcgacgagttcttcgtcaccgaggtcgagcgggtggagctgtaccgcgtgccccagcatttcacgacggcgcgggctcatctggcgctggaacatcgggcggaggccctgcgcgtgctcgacttgctggatcggttcggccgggaattcaaccgcccgctcgacgtgggcgaggcgggcgtgctcaaggcggcgcttctgtgggcgtacgggaagaaggccgaatcctgcgaggcgctgtcgtcggcgctcgaggcgcttgcgccgtacgggttcgtgcgcatcgtggccgatgagggcgcgtcggtcgaaccggtgctcaagcgcctgctcaagcaggtgtcggcgccggaatacgacggtccgctgaggcgctcctacgtgcacgagctgctgttggccgcccatgccaccgcccagcgccactccggcgtgaccgcgaacatcgtgccgaagaagaagcccgtgaagctgtcgcaacagcaggcgctggtgttggagctgctggcgcagggccgctgcaacgccgacatcgtcgcggaaacgggcctgtcgctgtccacggtgaaaagccacacggccgccgcctaccgcaagctgggcgtgcacaccgccatggacgccgtcctgaaagcccgcgagctgggcttgctggagtaggcttccttcgttgggagaggcgtcgatcgggacgaggcgcgtttccccgtcccagcgcaaaaagaagcgcccctgcaaacacaggagcgcctcttcggtttgcttgggcttgtgctgcgcagtttcgcttactcgctcctcagggcttccaccgggtctttcctgctggcggcgctggaggggatgaggccggccaggaacgtgaggaacacgctgatggccaccaggatgacggcggcttgccacggcagcgaggccacgttcgcgacgtcgaacagcgagtagacgatggcgttggcgggtatgcaggccagcatggtcaggccgatgccgatgacgccggccgtgaagcccacgatgatggtctcggcgttgaacacgcggctgatgtcgcccttgctggcgccgatggagcgcaggatgccgatctccttcttgcgttccagcaccgaaatgtaggtgatgacgccgatcatgatggacgacaccaccagcgagatggccacgaacgccaccagcacgtagctgatcatgttcacgatgtcggtgaccgaggccatgagcgtgcccacgaagtcggtgtaggtgatcaccttgtcgtcttcgccgtcggcggtcatgcggtcgttgtaggcgtcgaggatgccgatgaccttctctttgctctcgaagtcgatggggtagatgtcgatgccgctcggcttgttgaagtcggcgtagcccagcttcttcaggttgttgtcgtaggaggcgtcctccttgcccatcatcgacatcatgagctcggtgaggtcgttctcgtccatgttcatctggaacgcgttggcgaaggccgactcatcgatgctcatggcgttagacatgttcgcggcgatctggttcatggactgctgcatggcagcggacacctgcgtttccagcgcggtctgcatctgctgcatgtacgcgcccagcacgttttgcatgtacgagctcatggccgtggtgatggacgcctgcagctggctctcaagcgcctgcgccatggcggggacggcttgctgcatctttgccgacagctgctgctgcagctgggtttgcagggcttcggtggcctgcttcatgtcgatggatcccatgatggcatcggcgatcttcttctggacctcctcgctttcgaggtaggctttcgctccgtcttccatggtgggaaccttaccttgcgcgacctgttcctgcgcccagttcgcgtaccacgggttgaaccctgccatgatgtcttccatggccgcctgcatcttcgccgaatccatggtcggctgcacatcgcccaggtccagcttgatgtcgctgaaatcgaccaggttgctcatgtcgatgctgctgggatcgatggcgatggacgagccgtcgaacgccggcaacgatcccatgtccagcgacagccccgacaggtccagcgacatgcctgacaatccgctggtcagcgcgctctcgtcgaacttgaacgccgcctggatggcatcgccgtcgatggtgaacagcgactgcatatcgaagccctcgccgtcgtcttcctcgccgaacggcttgtcggtgaacacgttggtgtcgggatgggccagctggtccttcacgatggtgctgctggcggcctgctcgatcacgtagtcggtcagcgtggaggggtagttgatgcccgagctcagcatggtggcggtggcgtcttcgcgcggctgcacgatgccgacgatcttcacgtcctcgccgttgttcaccaggttgcgcatgtagtcggtgtcgtccgtcttgtctttccacacgttgaactcgtcgtcgtgcacgtagtagtccgtggcctgcaccagcttgaacgtgatgcccaggatgtcgtcgtaggtgggctgctcgatgttgtcgggcgcggtcacctcttcttcggccgcgaacttcttaaccatgtcgtcgaactcgttggcgtcgcgcagacccagcgtgtacagcatgaaatcgctgatgttgccgttgcctgtgagcacgagcaccacctcgttgtggttctcgggccagtgtcctgctttcacgtcgtactggctctcgtacaggttcgggtcgctgggcatctcgtagaacacgtcggtgctcatcgacatggacatgaggctgttcgaggatgccgttgagcccaggcccagcgcggacagcgacttgtcggggttcacctggcgaagcttatcggtgttggagctgtatatctgcggagccacgttgtaggtgtattcgatggcgttcgtgtactggtcgatgtcgctctgaccgctgtccaggtactccttcagcgacgccagatcgttcgagccgatgctggagaacatgttggtgaccatctcggtgacgcctactttgtcctggtcgccgtcgccttcggcttcccccgtgttgccgcctgccccggtggccgcgcccagcatcatggaggtcatgtcgaagccggtgctctggatttgcagcgggtactccgatagcgtctcctcttcgacggacttgatatagttgttcacgccgttggccaacgacaggatggcggcgatgccgatgatgccgatagagcccgcgaacgccgtcatcagcgtgcggcccttcttcgtcatgaggttcttgaacgacagcgaaagcgccgtgaggaacgacatcttcgtgcggcgcgcgggcttctcgctcacgcgcatgtcctcggcggtgggctcgtaggggtcggtgtcggagcggatgacgccgtcggtgagcgtgacgatgcgcgttgcgtagtcttcggccagctcggggttgtgcgtgaccatgatgaccaggcggtcgttcgcgatctcggtgagcaggtccatgatctggacgctggttttggagtcgagggcgccggtgggctcgtcggccagcaggatctcgggatcgttgatcagggcgcgcgcgatggcgacgcgctgcatctggccgccggacagctggctgggcttcttgttcacgtgatcgcccaggcccaccttctgcagcgcggccaccgcgcggtcgtggcgttcggcgcgcgacacgcccgacagcgtcagcgccagctccacgttggacagcaccgtctggtgggggatgaggttgtagctttggaacacgaagccgatgcggttgttgcggtaggcgtcccagtccttgtctttatactgttcggtggagatgccatcgatgatgaggttccccgagtcgtagtggtcgaggccgcccacgatgttgagcagcgtggtcttgcccgagccggagggccccaggatggccacgaactcgttgtcgcggaacgacaccgacacgttgtcgagcgcggtctgggtgaagtcggccgtcgtgtacgacttgcagatgttgagcagttgcagcatggggtgcctttcggtgcgttcctcgcgaggaggcgaaacgcaggtgttacgcaatggttgatgcttcgttaatcatggttgattttcctgctttcccttcttgggaaagagcaatcttcaccgagtttaccgaacggttacttttgggttcgcgcccgcttgcttacgatttgcgggagattgcgctttcggggtttcgctggcgctgggcttggcgataatggggcgaaacaagaaaacggcggcgaaaggacgcatgacatggaacgcgacgtggcatggaagaaatacgacgaagccgacctcgaggcgctggagcatctggctgccgagtacatcgacttcatctcggacaacaagaccgagcgcgagtgcgcggcttcggccgtcgcgctggcggaagagcacggctacctgccgcttgaccaggcggtgcgcgaagggcgcgcgctcaaggccggcgacaaggtgtgggcgcaggcgcacggcaaggcgctcatcctggcgcacctcgggcagcggccgctggagcaggggctcaacatcctgggcgcgcacatcgacagcccgcgtctcgacctcaagcagaacccgctgtacgagtcgaacgggttcacgctgttcgacacgcattattacggcggcatcaagaactaccagtgggtcacgctgccgctggcgctgcacggcgtgatcgcgaagaaagacggcaccgtggtggacgtcaaggtgggcgacgacccggacgatccggtgttctgcgtcaccgacctgctgatccacctggccggcaagcagatggcgaagaaggccaacgaggtggtggagggcgaggacctggacatcctcatgggcaaccggcctttgacctgcgggagcgggagcctcgacggcacccagtcgctcggcagtcctggctcgcacggacagtccgctggactgtccggctcgtgcggaactcgcttggtgggcaccgccgaggctcccggggaatctgcagcaagcgtagcgacaagcgaggatgttcaggctcctgctgatggagaaaaggaagaagagaaggagcccgtcaaggcgttcgcgcttaagctgttggctgagaagtacggcatcgaggaagaggacttcttgtcggccgagatcgaggtcgtgcccgctggacgcgcccgcgacctgggattcgaccgcagcatggtgatcggctacgggcaggacgatcgcgtgtgcgcctacacgtcgctcgtggcgcagctcgcgctcgccgagacgccggagaagacggccgtgtgcgtgctggtggacaaggaagagatcggcagcgtgggcgcaaccggcatggcgtcgcagttcttcgagaacgccatggccgagatcatggagcttgccggcgagggcggcccgctgccgctgcgccgcgcgctggcggcgtccagcatgctgtcgtccgacgtgtcggccggcttcgaccccgcctacgccagcgcgttcgaggcgaagaactccgcgtttttggggcgcggcctggtgttcaacaagtacacgggcagccgcggcaagagcggctccaacgatgcgaacgccgagtacgtggcgcgcatccgccgcgtcatggatgacgccggcgtgtcgttccagaccgctgagctgggcaaggtcgacgtgggaggcggcgggaccatcgcctatattcctgccaagtacggtatggacgtcatcgactcgggcgtggccgtgctgtcgatgcactctccgtgggaggtcaccagcaaggccgacatctacgaggccttcaaaggctacgaggcgttcctgaagaacgcgtaggggcagcctgcgggcaatgaagcatcagaatcgcgaacgggggcggggacgcatcgagcgtccccgcccccgttccgtccgcgcacccgccgcccgtctcgctatgcttgctcttacgagcgtctccgctcgatgcggttggcgtacctgtctcctgctgcctggatgatctgaaccagcaccaccagtaccgcgatgcacgcgatcatgattcccgcgttgtaacgctggtagccgtagcgatacgcgaggtcgcccaggcctccgcctcccacaagacctgccatggccgagaatcccagcagcgagatggcggtgatcgtaatgtctttcaccagcggcacgtgcgcttccggcagcacgatgcagaacatcgttttcagcttgccggctccgctggcaaacgcggcctcgatcatgcccttgtcgacttcggccaacgacgcctcgctcagccgcgcgaagaaggccaccgccgcgacggccaaggggatcaccaccgcctcggtgccgattttggtgcccactatcaatgccgatagcggcagcaagaagatgagcagaatcaagaacgggatggagcgcaccacgttcaccgtcgcgcccagcaccttgttgagcaaggggctgtttatgaacaggtgcgtgctggaagcgtagagcaaaatgccgagcgcgccgccagccacgatggcgatgaccagcgcgatgctgcacatgaacgcggtctctcccagcgttttgcccacttcgagtagaatctcgctgatgttatccggcatgcttcaacacctccagatgctcgacctgccctctcagatgcgcggtcgctcggtcgatttggtcgttggcgccctcggctcgcacgtacaaaatgccgaagggcttctcgttgatgtactcgatcttgccgtgcaggatggaaaggcgcacgtcgaacaacttccctgcatcgaatagcacgggttcggtggcgctttctcccgcgtaggtgagcttgatgatagagccgttttgctcgaacgcgccgcttggcagggcgaagttctgggagtgccgcaccaggcctcgcagcatctcggactgcgggttggagaacacctcgtaggtttcgccttgctccaccactcgtccgccgtccatcactgcaatgcggtcgcagatgcctttcaccacgtccagctcgtgagtgatgaccacgatggtcacgccgagttgctcgttcacgcgtttcagcacgtcgagcaccgattttgtggtttcgagatcgagcgcgctggtgggctcgtcgcacaggaggatgcgcgtgttggcggccagtgcgcgtgcgatggccacgcgctgtttctgtccgccgctcagcgtttgggggtacgcgtcgcgcttctcctccaggttcacgaactccagcagctcgacgacgcgctcctcgatgtcctgcttgctccaacgggcgcacttcaaaggaaaggcaacgttgtcgtagacggtcttggcattccataggttgaagtgctggaagatcatgccgatgccgcagcgcgtttcgcgcaaacgggcgccggtctgccctacgatggatgcgccgtcgatcacgatatctcccgacgtgggcttttgcaggaggttgatggtgcgcacaagcgtcgacttgccggcaccgctcgacccgatgatgccgaacacctcgccttccaggatggtcaggctcacgtcgtcgacggccgcggtggcggaagccccgtctcgggaaaactcgacctggatgttcttcagctctatcatggaacgaccttcctttgcgacgattacctagtacgagctgggcttg

SEQ ID NO: 9952 - DNA, 16637 bp, Unknown
  gut microbiota DNA sequence
tgcggtggcggaagccccgtctcgggaaaactcaacctggatgttcttcagctctatcatggaacgaccttcctttgcgacgattacctagtacgagctgggcttgccgaaaccggcgaagatgttgtcggggtcgtcgatgacgcttttgaacgcatcggattgcacgattcctttcacagcctgggcgaattcggcgtcggcatcggcgccctgcacggcgatgacgttgtagtatccctcggacagctgctcgacgtaagccgcgtcggcaaggtcgaggccggcgccgatggcgtagttgccgttgatcaccgcgacgtccacgctgtccagcacggtgggcagcacttcagcgttgacctgctggaaggaaaggccacgcgggttctccgcgatgttgttcacccctgctttcgcggggtcgacggaggcatccagcgtgatgaggcccgcctgctgcagcacgcgcagcgctcgcgacaggttggtgtcgtcattgggaatggcgacggttgcgttcgggggcagttgatcgagcgagccggctttgcccaggaacacgcccatggcggcggtgggcacctcgacgatggatgcgaggtcgaggttgtgctgtttggagaagctctccaaataggtcgcatgctggaacaggttgaggtcgatctcgccgtcggccagagcattgttcggctgcacgtagtcggagaattcgacgtacttaaccgagtagccctgctcggtcagagagggttcgatggcctgctcgaacatgtcttgatagggtcctgcgcacacgccgactcggatggtttcggcattggagccgccggccgacgtacagccgggcaggatgagcagggcgacggccaagcaggcgacaagggctgcggcggcgcggcgggctcgcgacgagcgcgatccggcgggggtttcatgtgaagcggtgcggatagtcatgggtttggtcctttgtctcgatgaggggtgctaagggtaaaaaaagaagccataggcttcccgtcttcgcatgcaatgctctcggcgcgcttatggcagcgggagggctgaatgcagatgaaggcaggcgccagggcgcgtgggttggggcgattgcattcgcatgagcacgggttctcctctcgtcggtggggtggaagcattatcaacggatgcctagattgaaacaaggggtttggtcattcgtagttttggacagcagtcatctgataaacagataactcggttaacggtaaagtcgtctacgcaggtaaagggcgggcaggtgcacggttagggcaggccgtgcaccgtgcgctgccgaactgccaattggcttcattgccgtcttccgctacactgctcgcattgttttttgcgcgtccggactgttcagtctgggcgctttcgataagcgaggacgtatggtacgtgagaaattcggatcccgtttagggttcatcctgatcagcgcgggatgcgccatcgggctggggaacgtgtggcgcttcccttacatcgtggggcagtacgggggcgcggcattcgtgcttttgtatttgctgttcttggtggtgttcgcgctgcccattctcgtgatggagttcgcggtgggccgggcgagccagaagggcgtcgcgcgcagcttcgacgagctggagccggccgggtcgaaatggcatcggttcaagtgggcggcccttgcgggcaattacctgctgatgatgttctacaccacggttgccggatggatgctggcgttcatggcgttcagcggcgcgggcacgttcgagggcctggacgccggcgccgtcgaaggggtgttcaacgggcttctggccgacccgcttatgatggtcgcgttcatgctggtcgtagtgctgataggcgtgttagtgacgcgggccggcttgcgcaacggcgtggagcgcattacgaagacgatgatggccgccctgttcgccgtccttgccgtgctggtggtgcgcgcggtcacgcttccgggcgccgaagagggcctgtcgttctatctcatgcccgatttcgcgaagctgttcgaaggcgggtgggggacgttcgtcgatgccgtgttcgcggctatgggccaggcgttcttcacggtgtcggtgggcgtggggtccatgtccatcttcggcagctacatcgataaacgctaccgccttacgggcgaggcgctgcgcgtcgcggggctggacacgctcgtggccatcatggcgggcctcatcatcttcccggcgtgcttcgcgttcggggtggagccgggcagcggccccggcctggtgttcatcacgcttcccagcgtgttcagccagatgccggtggggcagctgtggggcacgctgttcttcctgttcatgagcttcgccgcgctgtccacggtggtggcggtgttcgagaacatcatgagcttcagcatggacgagtggggctggtcgcgcaaccgcgcttgcctggtgaacggcatcgcgctggcgctgttgtcgctgccgtgcgtactgggcttcaacgtgtgggcgggcgtggaggtgccgggtatcggcaatatccaggccatcgaggacttcctcatgtcgaacaacgtgctgccgctgggcgctctggtgttcctgctgttctgcacgtccaagcggggctggggttgggatgcgtttctgcgcgaggccgacacgggcgagggcacgcgctttcctcgctgggctcgcggctacgtgcgcttcgcgctgcccgtgctcatcctggcggtgttcgtggccggctacgtacccatcgtgcaaacctggctggggctggggtaggcccgcggcgccggagggagggcgccgcgggccgagcggagcggggagaagtctaaaggtttcggtgcaacttagatctcgcccttcacggtttctgccatgaggtagccgtagttcatggcggcgtcgaagcccatcgcgtagggtcggccgtccttctcctcgatggatccgcatacgtcgcccgccgcgtacagtccggcgacggcttcgcccgagtcgctcagcacgtgtccttcggtgtcgatggccaaaccgcccgtggtcaggtagaacgtggggatgcaggacactacccaaacgccatcatgcgtgtcgaggtagggcagcttcttgcgtccgaactcgtcttcctcgccggcgagcgcgtgggcgttatgcgtatcgagagtggcagcgaggtcggtcagccccagctcctcggcagcagcctccacggaatcgtagtgcaccatgtcgccgcggtgctcgaggcatttgtaggtatccatggcgtacagctcgttcttgttcgtggtgatgcggcccgcttcgtcggtgacgtagaagaacttccccccgttcgtttcatcgagaagcgcccgcccaagcacgccgtggttatccgacatgatattgccgaactgcttgcccgacgcgttcacgaggatgcctggcgtggtctggtacaagaaggcgatctcgaagttcgatccggcctggttcgtggtggacaggaatgcgcctaggtcgcgacccatgcactcgatagcgcctcccgccttctgtcccagctcgatgccatcgccggtggagccgggtgcgcaattgaacttgaagtcggcgtactgagggtagtgctccttgatcatgtccgggttggccgcgaaccctcccgacgtgaggcatacggccttcgccgtgacggtccaggtagagccgtcacgcccttcagctttgagcccggtcacgcgaccgtcggcatcctgcacgagttcggtcaccttcgtcgcgtatacgatctgtccgccaagcgcaccgatgcgatcgaccaggtagtccttcgcgtatccgcagccgcccatgtagcagccgggagccaaatacggcgtcacgccgtacgccttgttcacgcccaagctgtagaagcccacgccgatgccgtgcatccaatccaccagttgtccggagttcgagtacatggccgtttggtacggcatcgcgccgtcgaagcggtcgttttcgggaacgaggtacttctgcatgactgccaacatagcttgcttgttgtacatgggattgtcgtcggccctgccgagcgcgtagttcgcttgcagctgcgattcggcggcggcgacgcccgagtacgtcatgggcatggagccgccggcaatgtcctgcttctcgaagagcaccaccgttttcccggcttccagcagtcgcgtcgctgcaacgaggcctgcggtgccggcgcccatgaacgccacgtccacgtcggcggtctgcgcggcgccgccgctgggggttgcggcgcctaggcggaagtccttcggattaccgccggcgttcgtgatggcgtcggctacagcgctttgcacggccatcgatgtggtggtggcaccggtgactgtgtccacgtcgatgttcttggcttcgagaatcctcgttgccatcatcggagcggccgtggatccgatgccgatggtgtcgtcgcagcgcagcacgctgatgcctgcgatgtcgccgcccgcgacggtcacctgcacgaacaggtcgtcgtcgtggcccatagccgagcctatccatttgccgtcggtgaagctgtcgggcacgcttttcttctccggtttggcgtctttcgccgagtcgttgctcgcctgttgcggcgtcgcgcatcccgctagaccgcccagtgcggcgacgccgccgaatgcgagcgaccccttgagaaagtccctgcgattgagttccatagtgttgctccctcctcgattggtcggcgtggcttcgtgatcgccgtgcctcgccgaaatgaacaacgcgagtatcgccaggcgaggttgtcggagtcgaccccgattatcggtgcatgtatcgaaacggacggtttccgcctcgcccattttcggttattttttgcatcgtgcctggtcaatgtcattcgtatatgaaggctgcagacggttttccattcgacgcccccgtcgccgcgcgcaagacaaggtacaatgcgttcgggaggaaatcgcgtgacaagcaagcatgcaggcatagcccttggggcgctcggtttcggtctgtgcaagaccgcgatttcggttgcctacattacggcgatgggctcggtgtcctctactgtcggattcgtgtccgagcttgatttcatgttcgcgatgaacgcgatttcgtttgcgacggcgcttgcgatcatcgcgctcgtgcgcgcaggacggcttcgtccgggtgcgctatcgcaagttccggctgtgatcgcgttgctcgtcgggttctttttgagcgctaccggcgtaatggcggggctgccgttcgcggcgacggccgtgttctacggcgtgctgtgcgggttcgcgctcacggtgctcaatgctgcatggctcgaggcgttcgttgcggagcccgatgccgcttacggcgtctaccaaatcgtgggtgggctgatcgttcaatgcgtgctggtgtcggtgctaccgcttttggggtcgcttgcggcaagcgtgctctccattgtggcggtggtcgtttcggcctgcctgctcgtgcgactcaagcgcatgctctcgtttgccgagcgcgacgagcttcttccggcgaaccgcggcgatcgcctctcgttgctgcaggcgttcttatgcctgttcgtgctcgtgggcgttgtgggcatcctgcacaccacggtactgggctcgcagtccgagagcatcgtaggcgatgtgaacatgtggatgccgctggtggcggccacggcgatcaccgcgttggtggcagggctcaccatgcgacatcccgatcccacggccgtctacaagggttgtctgcccgcgatgctggcgatcctctcgttgctgccgtttttcggcgaagcgctcggcgggctggccggtctcgtcatgatcacgtgctacgacgtgtgcggcatggtgttcctgctgttcatagtcgatcgtgcacgcacgttgcgcatgtcgagctatgtgctgtcaagcgtgtacctgggcggctcgggtctgttcttggtgatcggcctgtccataggcggcgttctgggcgcgctcagcgccgattacgggctgtcgttgttgacgctgctcgcgttcgcggccatctacccgttggccatcgtgctggtggtcgcgttgcgccgcgcgcatccgcaggacgcgtcttccgccgcggcgggggagggtggggaaggcgcgccgagcgcggatgccgttcccaccgtcgacgacgcgctgggcgcgggcgtcgacgcggtggcggcgcggttcgaactgacgccgcgcgagcgcgagatactgggctacttggcacgcggccgtacagccaagttcatcgccgaagagctggtcatttccgagaacaccgcgtgggcccacatcaagcgcgtctacgcgaaaaccggtgtccactccaaacaagagctcatgagcgtcgtcgagcagcaaggaagaagccgctagaaacgaaaagcgccccggctgagggagggagccggggcgcacggggagggtgacggtggtgcgggcctacttggcttgggcgtcccacgcttcgaggcttgcggcgtttcgtcctgcgatgcggccccacaccatgttctcggcgttgtttccgcccgagatgccgtacgtgtggccggccatgttgccgaagcatccggcggcgtacaggcgcgggatgggctggtcgttgcaatcgacgacgttcgcttcggtgttctttttcgggccgcctagcgtggagcagccgccggggtacaggggccaggcgtagaacgggccgtcgagcgagacgggcgcgagcgtgtcggcggttcgatcgaatgcagggtcgtttccttcgtcgcagtatgcgttgtacgtttcgagcgtggcttgaaccgatgcggcgtccggggcgttgtcgacggcggccatcttcgtgcaaagctcttcgagggtgtcggctttgatgatccagcccttttcgatttcggtttggttgtcgacgctccaaccttcgaatcctccgcactcgctgggaatgtcttcgagtgccatgccgatggcggtggaaccgccgggggtgttcagcacaccgcccttcacggcaccgagcggcccggcatcgatgacttcttggccggcgatcacccaggtgggaatgcgctcgaagtcggcgagcgtcgagtcgttgaacttttcgaattcgtgccatcccacatgcgggctcaagaacgtggactcggcgatccaccgcttgcccaggcggtcgagcatcacgtagttgttcgcgcccggcgtgaccgtgaacgcgtacggccactcgaagtctttgaagtaggcgttgtacgagccgatgatgttgttcatatgccacagctgcgcgcccacgttctgcaccatcttgatgccgtcgcccgtgttgaacggccagccgtagaagccgctcatggggtagcatttgcagtattcgttcttgagctcgtcgttgaactcgaatccgcccagcgtcatcaccacgcctttgcgcgctttgacggctttcggtgcttcgtcgtcgccgatgagcgtgtagcagccgactatctccttcgtgtcggggttttggatgagctcctcgtcgtggcagttgaaaacgacttcgatgccgaggtcggaacgtgcttggtcaagcgtatgccagcctgcgttgccgcccttggtgggatcaccgaacgagcaaacgtgcatcgcctcggcgccttcgatccagggatattcgcagctggaggtgccgcccgaggcgttcgtgcccttcttgagctccgtgtcgatgttccagtaatcgcagtaatccatgttctggtagcactcttccgcccacgctcgcgcgatgtcttcaggcgtgtggcccttcgagaagccggtgatgtactgcacggctccgtcgatgtcgtcgacccaggtgtactcgcccatgttgatggacgagttcccgcctccgcgcgagggagctttctcaagcacgagcacgtcggcctcgccctcgtccttcgcggtgacggcggcccacaggcccgcgccgccgtagccgatgaccagcacgtccgtctcgtaatcccaggttgacggcatccaatcgtccgatgcggaggctttctgcgcacagcctcccagcgctcctgcggcagcaacgctcgcggcggcgattcccgcccccttgaataggtcgcgtcgtgtcaagctcatctcgatcccctttcctgtgcggttcgctgcacgtgcagcgggttcctaactatgctcatggcaggtgtagcattcgaacacgtcggcatggtggcagctcatgcagtacgctttggcgtccccttgcagatcggtctgctcctcgtgcatgctgtggcagtcggtgcaggcgatctggccgtgcgtgtcggtttccggcagctcgtgcgggttgacggtggtgccctgcgcatcggagagcgcggtgcacgagctgctttccgctgcgatttcatcttgatcgtggcagctcaggcacactgatgcttcaaccgtggtctgcttcaacctcgatggcatccggtcgtctgacgaggcgccctcatgctgcttggccaaggtcgcggtgtcggtatggcagtcggcgcattgcaggctcgtgtgcttcgaagccgtgcacgcggcatcttgccgcgaggacgcttcgtcggcgtggcaggtgctgcaatcggtttcggtcgtccactcggtcagcgtgatggacccgtttgcggcctccgccttcggcgccgctccctgagaggccgcttcctgcggtgagcagccctgcaggcaccccagccccgcggcgcaggcgagcacgctcgcgcagacggtcagcagtacgaccgattttgcgttggcgcgtacgatcgcttcccctttgttcagcttcatggttcctcctttccgtggcgtgaattccaacgggctccatggtggcaggagaagcgggcgcagaactcccctccgacatatgatttgcggcgaaaacccttcatctgtttcagagtatttcctgttggtgggccgtgcggaccctgcgaagcaagctatgatgaaggtgctttcaaacaggctgcatgttcttggagggcatatggcacaaggggacgagggcgcgcggggcgcccgggttgaacgcggagcggtgcgcacgggccgctgcgctgcaggactggcgctgctgtggttctgggtgccgtgggctgcggcgatcgcgcatccgttggaacaaggcgctctgctggccccgttgctggcgacggccctgttcttcggcgcgtgcgcatgcgcggcgcttgccgcgctgcggctggcgaagcgcgtcggtacggggtacgcgcgcatgggggacgtgcttgcggcaagcgcggggagcctgggaagcgtgatcgccctgctggcgtacgcggcgggcgaggcaagcctcgcgttgcaggtgctggcgatgctgctgtcggggttcgcgatggggctcgccatcgttcggtgggagcggagcgtggccggcgtgtcggagcgggggatggtggggtgcgccgccgctctgctggcatcgtggtcggcgctgttgtacgtcctgttcgcgggcggtggttcgggggcgagcctggcgggactcgcaggcgtggtctcgcttgccgtgcgccctcgtgcattgcggcccgatgcgcaggatgtggtggtcacccggctgctcacgttgcaaacggcctcgtttctgaagcgctacgcgggagcgttcgcggcgtcgggggcggtgaccacgttcgcgctcatccaattcgcctccgcgcggttcgcggtcgtgtccgacgatacgtttctggtgctgctgctggttgctcccgtgtttctgctcgtcctgctgtgcgcgtggctgcccaagcgcgagcagaacttcatgctggtgttccacctctcgttcgtggtggcgctgctggccttgttcccggtcaacccgggaacgccgatatcgctcaacgtgtctgtggcgttctgcctgttgtggatcgggtcgctcgtggggtcgctcctggtcatgggatcgcgggtgaatcgggcgcttcggccttggtgcgatccttgcggccttgggccggcggcgttctgcctgggcgttgccgcgggcgcgctcgtggccatcgggtggacgatgacgcccgacttcgagacggtggcttccggctctcccgacggcatcgtgaaggtgagcgtggtcacctcgttcgcgctcatcgtgctgttttgcgcgacgaacgtggtgctgcgcggatcgatgctgcggcgggtggagctcatcgcgcgcggtcgcatcacgcaagtgatgccggcgccgcggtcgttctccggatcggaggcgcacggggagggagacgcacccgatgcgctgcaggatgcgtaccggcgcatcgcgttcgaccgggggctcacgccgcgcgagttggacgtgctcgtggtgctggggcggggcaacacgctcgcgcgcgtgcagagcgagctggtcatctccgaaggcaccgccatcacgcatcggcggaacatataccgcaagctcgacgtgcacagcaagcaggagcttctcgacttcgtcgagcgctacgcgcgcgcatgagtcgggggagggacgttctcctcctacgggcgcagcttcatatggatagcttgggcggggcaggcttccacgcaggcaccgcatttcgagcattcggggatacgcttgctgtggggatccacttgctcggggcaggcttccacgcaggcgcggcaatccacgcccgagctgcgcaggcatgcgtcggcgcgcacgcgcggccgcagggtgcgattcaagcccgagatcagggacacgagtgcgctcacagggcagatcttcgcgcaccacttgcgcaagaacgctatctccagcacgaggatggcagggaagatgattagcccccacgacgtctcgttgaactggaacaagtgccacactcctatgaaggtggcaaacgtgagcccaatggggcacacgaggcagaacacggggaatccgaaaacggccgaagctcccagcgcgccgagcagcgtggcatggcgcgtgtccaggcgcaggccgtcgcgccctcctcccacgggcgcgagcgcgcaagaggcgcagcggtggccgtcttcgcgagcgtgggagcaggcgtgatgtgcggcggagacactgccgtctgcggccttgcgcttacccggcttgaagagtcgctttagccagggggcggggcacatccaggcgcagaacgccttgcccaccagggctatcaccagcaccatacccaaaagcagcagcaggggttgaagcatgatctggcgtgctccgaacatggtttcaagtgcaccgagcgggcagatggcggctatggattcgataccgaacgcggaaggcgtgccgatgccgatgcggaaagtcaggccagcggcgactgcgcatacggcaagcgcgaaagcagccccacgcgccttgcggaaggggaagcgtcgcgtccggccttctgcctgtcggtcgtggtccgcggaggcttcacgcgaagcttccgtgcaatcggcgactccggttttctccgacagcacctcattgggctcgtccatcaggcgctcctctcaacgttgatgccgcgttgcgtgccgccggcaaacgaccggtacgtgttcgaggggcagcggtactcgcagatgccgcaaccgttgcagcgggtcgaatccacaatgggccgccccgacgcgtcggccgagagcgcctcgtaggggcacgcatccacgcacacgcggcaacttcccgaaatccaagcgatgcagcgctgcgggtcgatgaccgcaaggccgatgcggttcgctttcgcgtccacgtctcgaatggcgccggtggggcacgtttgctcgcagcgcccgcaaaagtcgcacagcccacggtgaaagtccatcacgggcgtccgccagttgagcagcccgtcctcgagcgtgcccgtgcgaacgcatctctgcggacacgccgaccggcagcgatcgcacttcaggcacaggctgcggaagcgctcctcgtcttcggcgctgggaggccgcaggcaggttgcgccgccgtcgagtgcggaagcggcgcttcccacggcgaagctggcggcgacgagcgcgctgccagctacgagcgatctgcgagaaagcgacagggtcatggcgaagctccttggggtgggtacgatagcggtcgtccagcggcaaagcggccaagcggtcaaccgagccgatgccgaagcgctgtcggggagggggatcgggacagcgcttcggcatcggccgtctccccggctcgcgaccgaggagacgggccggtttagatcagaccgaagaagtcgtacagtccggcgccgataacccacatagcgcaacggaaagcaatcgaaccgataagggcggcaatcagcgcgacggctccaagcgccacggcgctgcccggcttcttccgggcaaggaagccgcacgcgataggcgcgacgcctccaaacgctgcggcggcgatcgtcatcggggcggcgtctccggcgaatgcgcctgcgaccgcgccgtacgccaagaccgtgatcagcgccacgcagccggccgccagcgtcatcaggccgtagaggctgcaagcattctcgtcggccttctgcgcggcgatgagcacgaggtaggcggccgcgcccgatgccgccgccgtgcccaggtagccgagcggcagcagctcggtgttccaggcggcaatggcgctcatcaggtagctttgccccgccatgaacgacatcagcgcgccgagcgccatgccgacgacagccactgctttgagggctccgccgtcgatgccgcgccggagcatgaccagaaacgcgatcatgactatggccagcagacccaccagcaaggcttcggtgaagatgcccgaagtaggatgctgcagcgcgcccagcatgcggtcgggatgggacaggtgcgtgaccgaagccaggcctcctacgacggtcagcgccaaggccgtcgccgtgccggcgaacgcgcccttgtcagtcttgcggacgaacacgttcaggcagatgaagaagaacagccatccgcccatgcccgtgagggcggtgaagagcacgagagaccactggatgtccattacttcacctcctctttccattcagcgtacttggctgacaggatgtaggccgtctgagggccgttgcccacgtccttcaggcgatgaaccgagtcggcgcctgcggcggcaagcgctttggaggcgtccgaattcggatcgtccagatcgccgtagaagcgagccgacgcacagcacgccgccacgcacttgggctcttcgcccacgctggtcagttggccgcagagcgtgcacttctccaccacgtgttccgacgggctccatgaacgcacgccgtacgggcaggccatcatgcagtacttgcagccgatgcacttctccttgtcgaccagcacgacgttgttctcatcgcgataactggcgccggtggggcacacgtgcgtgcacggcgagtcgtcgcactgctggcacataaccggcaagaagtactggtgcagatgcgggtagtctccgaacgggcccacctgcaccactttgttccagaacgagccaagctccacttcgttctcgtttttgcaggcgatctcgcagccgtggcagccgatgcaacggtcgagatcgacgacgatagcgtaatgcgacattatgcggcacctcctccggtgttctcagacggttgcggcaaccaaggcgcgaagtcggtcggctcgtgccacacgccttcggggcgcgacgccttctcgaccttcacgttgatgccgcgcagggtatacgtgccgaactcggggttgtagtagcccgtgttcttggtgagcacgttcatgttgcacagcgtccagctcttgcgcgggtcctggccctcttccaagaactcggggttccagaagcgttccatgtaggcgctgccttttgcgatgccctcggtgacgtgggctacgccgtagatgccgtccttgaccaggctctgaccctcggcggtcagctcttggccggtcttgaggttcgagaacacgtccaaaccgtcggtgcggggcgacttcacgttcacccagtcgccggtggcaatgccgtgctcctcggcgtactcggggctgatccacacctccggcgcggggtagatctcgcggatgtaggggttgttgcgcagcgtgccgtggtggaagtaggggatgcggccctcggtgagcacgagcgggtagtcgttgccgtattccagacgatcgtccggatcgtggaagtagggcatgggcaggtactctgcggaggctgccggcatctcgaagctttcggcgccgtggcggccgaggtagatcatcgtgtcgccgtaggggccgcacttgagcgggttgtccttgatgtcgcgggcggcgcagcccgcgaagccgatgtaggaggagccgtcgcttgagaggccacggtaagcctgctcgtagggggcgttccagtattcctcgggctcgacggcgttatacggcgccttcgcaaccagctcgtcccaggtcatgttcacgttagaggcaacccactcgtagtagtcctccatggaatcccagtacgccggggcggggccgcaggcgtcctggtcgaaggacttctgcatgccctcgtggccgcgctcggcaagcgctttggccagcatcgaccaaatgaacgtctcgtcgatgcactcgaacaggttcgttaccggctggcgcaggagcaccgcgtacaaacgaccctggatgaacgcggtttccagccattcggcggtcggcagcaagagatcggcagcctcggtggaaaacgacgtgggatacatgtacatgtgcacgatgaggtcaagcttggggaacgcgtcaacccacgacgcggcgttgccgagcatggccatcttgttgcccgagcgttcgatccagatgtgcggctgatacggctcgccggtgaggatggcgttcaagatggtgggaatgtggctgtgcatccagccgcccagacccttgtgctccacgtagcccaggcgattctggatgttctccggcgtctggaactggtaaggcgaatcgccaaagaagcccgtggggaacacggtggactccgccgagcgcgggaggctgttggcggggctgccgggcttgtcgatgtagcccatcatgcagtcgagcgccgccgcgccgatggcagcctgcgttgactgcgggtattggtcggttgccacgcccaggctgatgccgcccgactcgcactcggcgtagagcttgatggcctcttccaagtcgcttgcatcaaccatgcacacttcggccacgtggtcgatcgtgaactcgtcggattgctccttgtaggcctcgaaggcagtcttcgccttgatggcggtgccgtcggccaaggtgacatcgtaggcgccgaacagcgccgggttataggaagcctcgttgtccgggcccagagcgaacgccttggttacctcgccggttttttcatcgtagtagacatagccctcgttctcggcggtgacgtcggcaaacaccttgctggcacgcaagagcgcgcctgccgggtcgctcgggtccaccaggaagggcagattggtccacttggagcagaactcctcgttgtagagcttcttgtcgataatgtagcgcgtccagcccagcatcatggcaacgtcggtgccggggcgaaccggcaaccacacgtcggcgcgggcagcgtcgggggtgtagcgcgggtcgatgaccaccgtcttggtgcccgcggcgcgcagctcaactacggcacgaccggcagaagagggtgcatgctgagccgggccggtgccccacatcacgtaggtgtcgatggacacggtggggttgtacagctcggcgcagccggagtcggcgatggaggtgtcacttacgccgttgatcagcggcatggtgtagttgcgcggcaggtagcactgcgcgcaacccggctcgaacacgttgcccgcgccccagaagttgcggaaacgcggcgggctgaagaactgcgggttgccgccgccgcccgtggagcagaggagaccttcgaggccggttttgtccttcatgtccatgagcgcgtcggcgatggtgtcgatggcttcctcccagctgatgcgctcccactggttgccgccacgttcgcccacgcgcttcatggggtacttgttgcggttggggtgatacagcgcctgaatgcccgagaggcccttggggcacactcggccctcggacatggggtcggcagggtcgccttcgagcttgatgacgcggccgttctgcacgtgcgcgatgatgccgcagttcgagatgcaggcgcggcacgacgtgtgcacgagcttgacctcgtcagccgcgtacgcctggtcgctttcgaccagattgttcacggtggcaacgccagaccccagtgcagcagcgccggcggctaaggccgatgctttcatgaagctgcgtcgggtgaggttcgttggtgacatattccctccttctttctctctct

SEQ ID NO: 9953 - DNA, 6903 bp, Unknown
  gut microbiota DNA sequence
cccgcatcggtagtgacccaagatccgtcccacaccaagccgcctgcttcttccaggcggtcgatgaagtaacaggcgtgcagcttttggcccgcggttcgctggctgggagccagggcggggtcgtctgcgagcagttgattgatgtcggccagcttgcgcggcgtgcggcagaagtccagcaggcgcacgaaggtcgcgcggcgctcgggcaccttgtagatggcggcgagggtgcgatgctcgggggccagcaactcgcatgcggcgcatcctgccggcgtggtgagaacgcgacgctcggcgacaagatcggccagcgcgtcgtcgtcgaggccttccgcacgcagctgttcgcagcgcgtctcatcgagggcgaggccttgcgcatcgtgggcgataacggtgactcccccggcagccgccaagttgcgaagcaacgtgtacggcgtttgcagcgcttgcgccgcttcgggctgccgcgccagaaattcttcggcggcatgctccgtgcgctcggtttggcagtggacaagcgccttatacaaaagctcgcgatggcgcgggtggttgaacaagcactccaccacccgcgcaatggactcctcagatggattcgccacggcgccccctctcgttcgataccgttcgatggagtcagcctacggttgggcaaggcgaagggcatcgtcatccgcgttctaacttgcagcagggttgccgggcgtctagtcaatcgttgactaggccgtgcgcaacgcgcggtcaagatagaacgaaacgcgcgatgccggagcggtccttcggtttttacactgggttcattcgtgcttgcgagagaaagacggggatccgatgggtgcatacagggaaacgcatgaggacatggctcgggaagcggagacgcgtgcgtcgttttaccgaacgttggcttcgctctatttcaaggaacttgaccaggcgggcattgatgcgctctcgaacgaggacttgactgcgacgggcgtggatgacgagttgatggaggaggggtacgccgacatggcggcctatttgaagcatcgcgacggcggtacgcggcaagagttggcaaccgatttcgcgggcgccattttggcggcggggtcgtatgacgaccgcagggcgacgccgtacgagagcgtattcacgtcagagagtggtcttttgatgcaggaggcgcgcgacgacgtgtatcgccgtttttgcgaggctcgcgtggcggtggacgagggactgcgcaccccggaagatcacctgagtttcgagttcgagttcatggctgctcaggccggcgagcaggcgcgggctttgcatgcgggcgatactgcggctgcggcatctgcccttcggacgcagcgcgagtttcatcgcgaccatctgctgaactggattgacgcgtactgcgactgtctgcaaagctgcgcgcaaacgcgtttctatcgcggagttgccaagctcacgcgtgggttcgtgcacatggacgaggacatgatggatgatgcggcggagacgttgtgctaggatagccgcaaatcgaggggcgagcgcggcggcgcacgacggagggggacaggtgtcggaaaccaggtgcgagcgggagctcgggaagaagccgtggacgcagatgctgttgcggcttgacgacgatatgccgctgctcaaatacttcggatttgcatgttgggtggcctggttcagcgtggcttactccagttccgtgtgggttgaaggcgcggaggagacggcttcggtcgtgtccgacatgttcttgtactccactctgagccatgcaacggcgttgctggcgtgcgcatgcttttcccaggcggtgtcgaaggtggccgatcgaccctggtttccgccgagcgccggcgcgctggcggcgttgggctgcgtgtgcgtggtgcaggcgggctcgctgctggtgtcgtcgaccgcgctgttcgttgcgggaagctgtctgacgggcatcggaacggcggcgctcagcatcaacgcgggattgctgttgtgcgcggttcggccccggcaggccttgcgtgtcattctgtattgcgagctgttggctgctttgctgcagttcatggtgctggggctgccggatccattcgatttggcgctgttcgtggcgctgccgctgctttctgcggcgtgcttcgtcgtaggttcggctcagcgcgcgaagccggttgtgcaggagagccagcgcttgaagccctcgaaggcgttcggtctgttcttgctggtggtatgcgttttgagcgctgcggcgaacttcggcaagggcatgcatcgggctgtcgtgtcgcccgggcagttggccgaggacggaagcatcaccacgttgctcacggtggtgtgcttggtggcgctgctgctgttcatctcgctgcggcgacgtgagctcaacttcgagcatctgctctatcccatggcgctggttactattttgtcgctgtccgtgacgtttttctttccgggcagcgccgtggtgggcgtggtgctggtgggcgtggcatttcagctgttcgacgtggttacctggtacatgttctcctacattgtgtatcagtccaaggcgagtgcggtgcaggtggtggcgctcggtcgcgccattatcgcgttgggcgtgacgatgggagacgcgttgggtgcgcggtgcgccggcatggggattgaggatgcgccgttggcaactgcagtgttcgtgctgttgttcgcggcggttatcgcggtgtttttcgtttttcccgaacgccaggtggataagctgttgttgcctattccggacgaggatgatgagggcgtggcgtctgctgatgcgtcggaggtctcggcggtggagggcgaggacgcgacagccgcagagcatcgcgggcgctggaagcagttgtgcatgcagctgggcgacgagcggcagctgaccgagcgagaaaaggaagtgctggtcatgttggcgcgcggctacgggtcgcagtcgatttccgatgcgctgaccatctcgttgtacactacccgggcccacacgcgcaatatttacgccaagctcgacgtgcactcgcgccaggagctggccgattgcgtgcgcgcctacgtggaggcgttcgacagggacgtagcgagcgggcgtgcgtgaggcgagggcctgcgagcgtcggcttttccgcgacgaacgtcgttcggcgcacgtgcgcgacaggcgctcatcggggtgctttcgaagggtgctatactcggcgatgtgcacgacatcaaggcggagaaggtcgtgcccggcgtcaccttgtgcgcgttcgaaacctcgtaccatccgtagaagttcaagtggggcgtcagctataccgtgtacgacttcaagcgggtggggcccgatcgggtgtgaggagggcgcggttcgtcgcgcgcgttcctgcacgggggtgcgggccgcgggggcgcacgcccccggtcttcgtcccccgcatcccgcgagcgtcccgctctttccccgcgcgcatatttttctccatattccttggggattgctcgcgtgggcggggctcccgtggctataatagcgggtaacacctgagtaacggatgcacggcggagcgatatgcgcttcgcggcaccccgacaccgcaccgaccgcagatggaggagtcatggcatactatttcgacgagccgtcccgaacctttaacgagtacctgctcgttcccggctattcttcggcccagtgcattcccgccgaagtcagcctgaagacgccgctcgtgaagttcaagcgtggcgaagagcccgccatctcgttgaacatccccatggtgtccgccatcatgcaggccgtgtccgacgacggcatggccatcgcgcttgctaccgaaggcggcctgtcgttcgtgtacggctcccagaccatcgaggaccaggccgctatggtcgctcgcgtcaaggactacaaggccggcttcgtcaccagcgacgcgaacctctctcccgagatgacgctggccgacgtggtagccctcaaggaggagcacggtcactccaccatgcccgtcaccgccgacggttcggcgcacggcaagctggtgggcgtggtcaccgatcgcgactaccgtttgtcccgtatgtccatggacgcgaaggtggccgacttcatgaccccgcgcgagaagatgatcgtggctccggccgacaccagcctcaaggttgccaacgacatcatctgggacaacaagctgaactccctgcccgtggtggacgacgacgattgcctcatgtacctggtgttccgcaaggactacgactctcataagtcgaatcccaacgagatgttggacgcgcacaagcgctacatggtgggcgcgggcatcaacacgcgcgactacgccgagcgcgtgccggcgctggtggaggccggtgccgacgtgctgtgcatcgacagctccgagggttattccgactggcagaagttcaccatcgagtggatccgcgagcactatggcgacgacgtgaaggtgggcgcgggcaacgtggtggacgccgagggcttccgcttcctggccgatgcgggcgccgacttcatcaaggtgggcatcggcggcggctccatctgcatcacgcgtgagcagaagggcatcggccgcggccaggccaccgctaccatcgaagtggcgaaggcacgcgacgagtacttcgaggagacgggcgtgtacattcccatctgctccgacggcggcatcgtgtacgatcatcatctgacgcttgctctggccatgggctccgacttcgtcatgctgggccgctacttcgcccgtttcgacgagagccccacgaacaaggtgaacatcaacggctcctacatgaaggagtactggggcgagggttcggctcgcgcgcgcaactggcagcgctacgacctgggcggcgacaagaagggcatgtcgttcgaggagggcgtcgacagctacgtgccgtacgccggctcgctgaaggacaacgtcgacctcacgttgtcgaaggtgaagtccacgatgtgcaactgcggcgcgctgaccatccccgagctgcaggagaaggcgaagctgaccatcgtctcgtccacgtccatcgtcgagggcggcgcccacgacgtggtgctgaaggacaagaccccctacgtgagcagcagcatccactaaacctgtctgctcggaacacgcactggaaacgccgcccggacgaacgggcggcgttttttgtgtgcaagagggatgggggctttgagggtgcccgagcgcgttgggccgtgaggggcgggagcgcacgcgagtcgcgatgggagcgcgttgagctgcgatgctccggggcttcgaggacgggcgtgcgcacgggccgcgagggggcgtaacaagtgtttcacgtgaaacacttgtgctaaaggtgcggctctacggtggggtcggcgccgatgatggcgtggagttcgtcgatgtagcgcagcagcaggtcgctcgggcggcgctcgttgtgcatgatgtagcccacctgcatcgtctcgtccgcgtccaacggaatgctggcgatgcccgagtgcatctcggccgacagcacgccggtggacagggtgtagccgttgtagctggtcagcaggttggtgagcgtgccgcggtcggagatgcggatgttgcgcttgtgtggcaggtggctgagcggctcttcggaatagtagaacgagttcgtggtgccctgttcgaacgagtagcgcggatagtcggccaggtcgtcgggtcgcagcaacgcctttcccgccagcgggtggtgttcgcccacgaacacgtgcacgcgcgcgtcgaacaggggagcgtaggccacgtcggcgtcgtcgaacgccttctgcagcacgcgccggttgaagtcgtcggtgtacaggatgcccacttcgctgcggaacgtgcgcacgtcgtcgatgatctcggccgtggtgctttcgcgcaggatgaattcgtactcctcgcccttgcagctttccaccacgttcacgaacgcctgcacgctgaacgcgtagtgctgcgtggacacggccagccgcaggtgggtggagcctttatcggcgtagcgcatctccagcatgtcggcctgctcgatcacctggcgcgcgtagcctagaagctcggtgccgtcgttcgtcagcgtcacgccgcggttgctgcgcgtgaacacggtgatgcccagctcctgctcgagctccttgatggcggtcgagaggttcgactgcgacgcgtacaggttctgcgccgccgcgttgatggagccgtactccgcgatggcgatgaggtagcgcagctgctgcaaggtcatggtggctccatcctgtcgtggaaagcgagcgaacgcaagccgcccgccccgtcatcctgagcgggtgcaagccgcccactctgttgagcggagcggcgaagccgcgaagtcgaaggatcccgtgcggcgtcagccgcgaacccttcgtccctgctcgacgttcttcctcctattgtacccagttatctgctccatcgatagcaaaccatcaaaacatcgaatgacccgaaaggttgtgtttgagtcgcgttcgtggtttcatgcaatacgctgcattgcgcgcataaaccctggtagcgaacgaatgtttcacatgaaacatcgcgacgctcaactcggcggggccaagcgcgcagggctggcgccggaacgaaagcgcgcagctcgcatgtgcgaacgcgcccggaacgcgcaggcgcgcaaaagctcgcgggctcacggcccgcagcggcagcacgagaagcgaaacgcaaacgaacaaggagcaaccatggcgaaggacatcccctacgatcagaagtactatgatccggagatcgaatgcatgccgcggccgga

SEQ ID NO: 9954 - DNA, 10309 bp, Unknown
  gut microbiota DNA sequence
tgaagatgccttccgagttgggacgtcaggtggttcgatctacgttctttctctcattgtacccagctatctgctgaatcgatagcaaaccatcaaaacatcgaatgacccgaaaggttgtgtttgagccgcgttcgtggtttcatgcaatacgctgcattgcgcgcatatgtcctggtagcgaacgaatgtttcacgtgaaacattccgaagctcaactcggcggggcgaacgcgctggcagcgacgaaaccgcatgacgaacaaggagtaaccatggcgaaggacatcccctacgatcagaagtactatgatccggagatcgaatgcatgccgcggccggagcttgaggcgctgcagcttgagcgcctgaaggacatggtggcctacgcatacgacaacacggtgtactacaagcgcgcgttcgacgaggccggcgtgaagccgggcgacatcgaatcgctcgacgacatcgcgaagttccccttctgcgacaagaagacggaacgcgagacgcagcatgtgggcagcttcttcggtgagatgtgctccgtgcccgaggaagaggtcatcttcatggccacctcgtccggctcgacgggcgtgcccacggtcagccccttcacgcaggaggacttcgacctatggcaggacaccgaggctcgtttgttctggcaggcgggcatgcgcccgaacgaccgctacgtgcacggcctgaacttcgccctgtacgtgggcggccccgacgtcatcggcgcgcagcgcctgggcgcgctggccatctgggtgggtgccgtgccgtccgaccgcctgctgttcgtgctcaagcagtaccagcccaccatcatctggacgtcgccgtcctacgcgtggcacctcggcgagatcgccaaggagaagggcttcgaccccaaggaagacttcaacatccacaccatcatcgtggccggcgaggcgggtggctccatcaagtccacgcgcgaggccatcgagaacctctggggcgcgaaggtggtcgacttctacggcctgtccgatatctacggtgcctgcgccgctgcgtgcgaggcgcacgacggcctgcacatcgtggaggaccagatcctcgtggagacggtggatccgacgaccggcgaagtgctggctccgggtgagacgggcgagctggtgtacacgacgctgtgcaagaaggctcgcccgatgatccgtttccgcacgggcgacatcggctacgtgagcactgacacctgcgaatgcggccgcacgctggcgcgcattcacgtgaccggccgcaaggacgagatgttcatcgtgggcgccgtcaacgtgttccccagcgacatcgagtacgtggtgcgcggtctggacggtctcacgggcgagtactccatccgtgtgtacgagaagaacttcacctgcaagtacgaagtgtccgtggagcgctcgctgggcagcgacgagccgtacgacgaggtggcaagccgcacggaagctgcgctcaaggcgcacaccggcgtgcgtcctgccaaggttattgtgtatgatgcaggcaagctgggcacgtcgtccgaacacaaggcctccaggttcattgatgaacgtggctgcgttacgcgataaccccccgtcatcctgagcggagcgccgtaggcgcggagtcgaaggatcttgctgaaaggaaccacttatgactgttgaaaccaccttcgccgtttccgggcagcactacctgttcaacgtgcagacgttcgcccacaccgtgctagcgctgggcggcgacgcgtacgcctacgcgctgcgcgaccgcactacgcagggcgtcatcgacgacgtcgccggcgggaagagcgacttgggcgtgctgtttcagacttcggccacggctgacgaggtgaacgctgcactggatgccgcgggtctcgaattcgtcgagctcatccagtcggcgccgcgcgtggcgctgccgaagagccacccgatggtgaacgcctccagtctctcgctggaggatatggaggatttcccgtacctgtatttcgagcaggacgaggattcgccggtcgcgttcgccgaggaagcgctggccagcgtgccgcgcgccaagagcatcgcctgcaccgaccgcgcgtcgctgtccgagctgatcgtggcgctgaacggctacaccgtgaccagcggcatcctcgtgggcatctccgacggcgcgggcctgaacaccgtgccgctggacaccgacgtgaagctgcacctgggctacgtggtgcgcaagggcgaagcgctcagcgacatcggccagcgcttcgtcgacaccctcaagaagaacctcgagaagtacgcgcggttctagggtttcggcggcctgccggccgccgaaacaagccgacgctgcgggccgctctggcaccccatcttcgcgcgatcccgcaagctcgcgtaccgaagcatcccctgcggggacttcctgcggggcgcgtgtcgtctgcgatccgcaggtcgagcaacagcgaacggatgtttcacgtgaaacatccgcgggttgcgctctcgttcgcggcgcgtgaaccctcttgcctgcgcttgtcctaaaaggggacagccccttttaggacaagcgcgcgtcgcatctcggcgtttgctattgccgcttcgcgtccagaaggagcaggtcgactgctttgttccacacggcgacagcgtcgacgtccgcattctgcgccacgagcgtgctgaaacccgaagtgatgacgtacaggtattgcgccgcgttctcgacatcgaagcgcggggggagcgctccgatgtccgcgccgtgcttcaaaacggcggcgaacgcttcgatcgtggtcttcgtgagccgttgctgatgctgggctacggcgggtattctcgtcgcctgcatgtcgatttccgcgagaacgcgtcggcgctcttcgtccccgtggtagcttgcgaggatcgatcggcccatcgcatgcagatacgaatagtactctccccggtcgtcgatcgaggcgaattccgtatcgtccggatcgagcaccggatacaggcttttcaccatgtccaagaacagctcttctttcgatgcgaaatagtagtacaacgccggtttggagacgccgacggcggcacatacctggttcatggatgccttgtcgtagcctttttcggctaccaaggcgtacatggcgctcactatcttgtctcgagtgctaggttcgctcacagctcaagcctttcttcaaaaggggctggtacaacaatagcatatacgtgagcaggacggatatagttgctcgcctgctcgcccggctgccgcgcatctcctgtttttcatgttgacgaagggatcttcagttgctatagtactacttacttaccggtaggtaaacactatacgaagtgttggaagaggacgaactcgttcgcttcccatggcacggaggaggaacccgtgttggaaaactatcggcatccaggggaattcgaaccccaatcagacgttttcatggaatggattcccgacgcgtatcagatgaagggctacgacaacagccggtcgtgcgccgagatcgtcaaagcgctgcaggagttcgggggcgtgacgctccatatcaactgcggtgcggaaggcgttctcgaacgtgccaagtcgagcttggcggagaagggggtcgatacggccgacatccgcttcgtgcaattcgccgatccgaacttctatgtgcgggacaacggcccgacggttatggtggacgatcgaggcggcagaatcctgatcaacccgaattggagctactacggcacgctgccgcccgacgacccgtactgcgtgcagtcgcgcatcgccgccgtgcagatgggggtgtccttgggcatcttcgacgtggtgaattccgatgtggtgtccgaaggaggggatcgggagttcaacggtcagggcgtcatgatgtgcatcgaggacacggaagtgcgcaaacgtaatccgggtcttacgaaagagcaggtagaagccgaattcaagagactctacaacgtggagaagatcatctggatcccacagcctttgctagaagacgacgatttcaggatggggccgttggaataccgcgacggcgtgccgtacctcggctccagcttcgcggcccatatcgacgagctgtgccgcttcgtggatgcgaacaccgtcgtgcttgccgaggtgaccgacgatgaggcggcggaaagcgcgatcggcgcagagaacaaacgacgcatcgaagccgcctacgatgtgctctcgaaggcgacggacgtccatggcaacccgttcgccatcaagcgcatgcccgtgcctatctccatcgattacgtcttgaccgaggacgacgagaactacgggctgtacgaggggcccgtgatggagatgggcggcgccttcgccgacggcacgccgtggcccggcggccccatccatctcatagcctcgacggggtactgcaatttcctcatctgcaacggcgtggtcatcggccagcgctactggcatgaggggatggatccggcaatcaaggggaaggacgaagccgcccaagcggttctcgaggagtgcttcccggatcgcacggtggtgatggtggacagcttggcgctgaacatgaccggcggcggcgtgcattgctggacgaagaacgttgcggcgtccgagccgcgatgagacgggcgcgaacccgtatgacaaggcaagccgcgcgggtgttcttggcagaagccgcgcgacctgcacgtaaagcaaacctatagtatcagaaaggctcgaaactatgaacagcaaccttgttggacgcgatatcctgaacctacgcgatcttacgcccgatcagttccgctatctgatcaatttgtcatgggagctgaaggcccagaagaagtcgggcgtcgaccagcgtcatttctgcggcaagaacgtcgtcgcgaacttcatgtggagttccacccgcacgcgatgcgccttcgagacgtcgtgcaacgatctgggcatgggcttcacgtacctcaccaactcccatatgggctacgatgagagcatgaaggacgcgatccgcgtgctgtccggcatgtacgatctgctggtcatccgagctcagctgcgcgaggagttcctgtacgaaatcgccgattattgcgatattcccgtcatcaacgccctgacgctcgacgaccatccgacgcagatgctggccgacgcccttacgatggaagagcagtggggcggtttgggctcgagccgccataagacgatggcctacgtgggcaattgctccggcatgccgtatttctacggccgcctgtgcgccatcctgggcatgaacctgcgcgtgatcggacctgagaacccgcgttaccgccttcgccagccttgggtcgacgagatcgccgagctttacaagcgttggagccctgattgcgagttcacggtgacgaccgacgcgtccgctgtcgagggcgtcgacgtcatcaccacggaagtttggcgctatcgcagccctgatgtaagcgatcaggttctcgatccggaggcgtacgattcttggatgggcgacgtgaacgatctgcttccgtaccgcgtttcaagcgaattgtgcgagcgcacggggaacagggacgtgttctgcatgcacgagcttccttccgtgcacaacgcggagcacgagataggccgaaaattgctcgcccaggcgccgaacgattttgagcgcacggtcatcgaggaggggctcgagatcaccgacgagtgcttcgaaaagaacgcctcggtgatcttccgcgaggcggaaaaccgtcagcataccatcaaggcgatcatggccgctgtgctgggattgtaaaagcgcatgccgaagccgttttgcgcgccgtgtccctgtgcggtcccaagcaagggccggcgcgcagaacagcggtttcgacgctatcgtttgaagggaaacgatacttatggaaagctcgcatgctctgaagaactcaggaaagttcgcttggatcttggtgctcggccttggactcatgtcggcgggcacaaccggttcctatagcgtcgtcgcaggctgtttcatgacgccggtctgcgaggatctgggaatcgactacaacatgttctcctactatttcacggcaacgctggtgggggtcgccgtcggcatgatgtgcgtcggcaagatcttgccgaaagtggtcggtcggtggacccatgtcgcggtggcagcggttctactggcggctggcgcggccatggcgttttactcgaatgtctggctgttcctgctttcggggctcatcatcggattcggcatgtccttcaccacggggctttgcatgtcagccgtcatcgatcaatggttcaggaagaaggcgggcctcgccatcggcttggcttggacggtcaactcggtgtacatggtcgtcatgagcccggtcatcaccgccgtcatcgaatctgtgggttggaggaacgggtacctggtgctcgctgccgtctcggccctcgtagtcataccgtctatcgtgttcatcatccggttcaagcccgcggataaaggcatgcttccctacggttacagcgaagccgaatcgatcggtcaagatgcaggggtggaaatcgcggccacgcgaggcgtgccgttcaaggttgcggtgaagtcgcccgcgttcatcgcctgcgtcttgttcctctgcctcgtgcagatcaccgtgtgcatgaaccagcttttcccaacatatgcagtggaggtcggccttggcgcgatgacgggcggaatcatggtttcagctgcgtccatgttcgatatcttcctcaaccctgccgtagggtcctcatgcgacaagctcggctcgttcatagccctggtgctgtgggtagtcgtgagcatcctgtcgttcgtgatgctcatattcgcagctggccaaccgtggctcgccattctgggagcaggcgtgaacgacgttatgtacgtggtggccggagctggccttacgtgcctgctcatgagcgtgttcggctctcgcgattacggtcggatcttcggtatcgtctgcggcgtggcttatatcgccggggcgttcggcatgcccatcatgaccgctgtctactcggcaactggaacgttcaatgcggtgttcgggctgtgcatcgtcatgaatgtcgccataatcggattgatcttggtcatcaaggctaccagcaagaagttgcagtgggtcgagggagaggacgaaacgcctgtcgctctgcattgagcgctaacctggggcggtgcgccttcgaattagaggtgcaccgctctgcgcgctactcttgtgcaagtcctccgtcgtccataaagacatccgcacattcctgcttgaaaccgacaggctactgaagtaacgggtcgtcgtcctcgtcgagcgcgcgatgcctgccggccaagtcgagggcgtcgtcgctgatgggcggcgcgccgtgagcgccccacttcgcgcgcacctgctcgcggcgggcgcgctcggcacgcgcctcgctgggacgcattggccggggcatctcggccgttgccgtcttttcgtgcgacagcgccatgcggatgcgcatgtattcccagatcagcagcacgagcaggatgcacatcacgatgaggtagccgatcacggcaccgggcagcccggtgaagttcactagcaggatgggcacgaacaacgcgaatccgaacgtgatcacgtacagcttcgtgacggagcgctgctggcgcagcacggtgatcacttggtacaggaagtcgatcgccgccgtcacgccgcccgctgccagcatgatgtagcatagcccgcggaattgctcgaagtccacgccgtacaagaagctcatcacgggaatgccgatccatgccatggcaagcgccgtgacgccggtgaccgcgacgatgaccgccatgatcacgacgatgatcaggtcgaaccgcttgcgcttcgcagggtcggcccacacgttcgccatcttcacgagcagcggcttgtagatgaacccgacggtcagcaggatgccctgcgcggggaagtacagcgcgttgaagtacagctggttgtcgtagctcagtacgccttccattacgaacttcggcatgttgtcgatgaatgcgtacaagaacagcgcgatgaacagggggaagcactgtttgaacaactcgacgatgctgccgacgttccaacgtttcgaccttggcgtctcgaacatggccagcgggaacgtgagcacgatgaaggtggcgaacgccgcgacggccatgaccacgcacgacacggccaggttgcgggtgatcagcaggcacagcgagaacgccacgagcaccacgacggagcggaacgcctgcgacacgcccgacagatacagcttgtccacctgttgcagccgcccctcgtacacgtcggccaggccgtctaccatcttgtagaggtacacgcccaggctgatggtgaacatctggctctcgtagccgcgcaccgtgcagtacaccacgccgacgagcaccatgaacgcgcaggtaatccaccggttgatctgataatccgagaacgaatgctcctcggtcacgtcggacacctggtaggtgcgcacgccgtagttggccaggatcatgagcagcgtgccggtgacgaacgcgagcgagaacatgcccgcctgctccacgcccacgagctgcgtgaccacgacggtgagaatggggaacaccatgccccatgcgcccacgcccaccgtattccacacgtagtcgcgcgtggtgcggtgcgcggcgtactcttcctcctggtcggcaagcgagcgctcggataccgcgcccagcaagcggttgcaccagcggttgacgcctttcgtgatgaagttgggcttacgccgcttgctggttgcctggcgctcacgcgaagaagcgccgaggaacggcgtcgtgtcagatggcgcgggcgtttcatcgatcacggtgtcgtcgtgcaagggctccgtcggttgttttgcgtgcgaaccgtgtttggtgtcgttgcgcgtaatgcgatccatgatgtcgcgtcaggctccttcgctgcgtcgcatgcccattctctctcaaggagcattataagttcgcatgtgggcgctacgccaagattcataccagcagcaaacggaagcgctccgcttagcgaatccatggcgcgctcacgtgtacgcaaaatgcaagccatgacaatttcaggcggcgttttccggttgtggcgataaaggtttgcttgttttcccagctcgtaacaatcccatacgcctatggccgtcttgtttagcctccgaaatcgtcatggctcgtcttttgcgtccagcatggttttgcggacgaggaaagagacggaaagcgcgaggggtgagaggtgctttgcccaattgggggagtttgacggcatgtgggcgagcgcgaagccgtccgcgctcgtgcgcagcggtatacttgcatgaccaacgtgcaaagatgcgaaggggagagtccatgatcgaaatactatggcacggccgcggcggccagggcgccttcacggctgcgcggctgctgggcgcggcggcatcgctcgacgacggtcggcatgctttggcgtttccgtcgttcgggcccgagcggcgcggcgcgccgatgcgggcgttcacgaagctgtctgacgaacccatcggcgaccgcagcgccgtggcgaaggccgactacgtgatctacctcgacgatacgctgctgggcgagggctgggaaaccgagctgaagcccggtggcgtcgtgctggtgaacagcgtgcgtatgttcgacgacgagcgcatcgcggcgctcgatgccgacggcatctcggcggccgttctgggccgaccgattccgaacacggtgttcctcggcgcgctgtcggcgctgtgcgatcgggtgagcgtcgagaacgtgcaggaagccatccgccagtacatgccggcgaagctgcatgcgaagaacatcgcgatcgtggatgcggcacgggaggcgatgggcgaagcccaggagccgcgtgaagaggcccctggtcatcctgagcgcgcgcagcatgaagacgaaggctcccgcgcgacgccagccgaaagcgcttcgagtctgaccgcccgcacgggatccctcgacgacgccgtgtctccgcgtcccgcgtcccgcatccccgttcttcggtcagccaatctcgaccctgccgatttcgcgcactccacctgcttcgatgccggctaccttacggtgaagaacgccgggtggcgcaacctgcgcccc

SEQ ID NO: 9955 - DNA, 2618 bp, Unknown
  gut microbiota DNA sequence
tgaaagcgctccgagtctgaccgcctgcggcggctccgctcaggacgacgtcgtcgtatctccgcgtcctgcgtctcgcatccccgcccttcgctccgccaatctcgaccctgctgacttcgcgcactccacctgcttcgatgccggctaccttacggtgaagaacgccgggtggcgcaacctgcgccccgtgatcgacgcggcgtcgtgcaccggctgcctccagtgctacctccactgccccgacggcaccgtgtacaaggttccgtcggcttgccggccgacggaaccggccgacgctgcggcttcccccggcacccgatctcgcggcgatgccgaaggctcgcgtaccgaagtatcccctgaggggacttcctgcggggcgcgcttcgcctccgccatccccgcgatctcgggcaccggggaaaccctcgctgactcactgggcgaacctgcgcgcacgtccatgcagcccacggctcccgtcgccatcgacctcgacttctgcaagggctgcggcatctgcgcgaaggcgtgcaagttcaactcgatcacgatgatccttgaaagcgaggcggatgcccgatgaaacggttcctttccggcgacgaagcgttcgccgaaggcgtgcgcttggcgcgcccgcaggtgatttccgcgtatcccatcacaccgcagacggtggtggtggagcgactgagcgagatggtcgaggacggctcgctggccgccgagtacgtgcacgttgaaagcgagcattcggcgctgtcgtgcgccatcggcgcgtcggctacgggtgcgcgcacgttcacggccacgtcgagccagggtttgctgtacatggccgagtgcctgacctacgcggcgggcggacggttccccatcgtgatgatgaacgcgaaccgcgcaaccgcgctgccgtggaacatctacggcgaccagcgcgactcgctggcgctgctcgaccatggatggatccaggtgtacgccgaagacaaccaggaggcgctcgacctggcgctcatggcgtacgcggtggccgagaaccctgcggtggcaacgcccgtgatggtgaacctcgacgggttcgcgctcacgcacacctacgagacggttgacgtgcccgaacccgccgaggccgacgcgttcctgccaccctacgagcctgcgggcaaccggttcgacttcgagcatcccgtgaacatcggcttctcggccggtcccgagtacaaccgctacttcaagtactgggagcatcgcgacatgctggacgcgcccgccgtggtcacccaggtggagcagcggttcgccgaggtgttcggtcggcagtatcccggcatgatcgagacgctggactgcgatgatgccgatgtgatactggtcacgctgggatcggcggccgggctggtgcgctcggtggtgtggcagctgcgcgaccagggcgtgcgcgcgggcatgctgcgcatccgctacctgcgtcccatgccgagcgcgctcatcgccgaggcgctgcgcggcgcgaaggctgtgggagtgctggagaaggacgtgtcgttcggcgccgagggcaccgtgttcacgaatgtgaactcagcgctgcagcaggcggccgtgggcgtgcccacgtacaacttcgtgggcggcctgggcggcgacgatatatcggaaacgcaggtgcacggcatgtaccgcatgctcgtgcaggcggccgaggggacgggcgagctgccgcgtgtatcgttcctcgggatcgattctccggcggatgcgctcggtgcggaaagggggcggtagccatggccgtcaatgccaagaacatcactgacgacgagttcttcttcggccacaaggcgtgcgccggatgcggcgggtcgttggccgtgcgcgcggcactcaaggtgctggggccgaacgcggtgtgcgcgctgcctgcgggttgcatgagcgccgtcggcttcaacttcccgcagctcagtttcgccaacaacgcgatgatcacgccgttcgcagccacggccagcgtgctcaccggcatcgaggccggcctgcgcgcgcagggcaagaagcccgacgattgcacggtggtgggcttcgccggcgacggcggcaccgccgacatcggcatccaggcgctgtcgggcgccatcgaccgcaacgacgacgtgctgtacatctgctacgacaacgaggcgtacatgaacacgggcatccagaaaagctcgctcacgccgttcggcgccaagaccaccaccacgcctgccgggtcgaacatgcgcggctgcctgacgcagaagaagaacatgttcgagatcgtggccgcgcacggcattccctatgcggccacggcgtccatcggctacctcaacgacttcatccgcaaggtggagcatgccgccacgatccgtgggacgaagtacatccatgtgatggccccgtgcccgacggggtggggctgcggcgtggacgagacggtggacatctcgaaggacatcgtcgactgcggcctgtggtacctcgccgagtacgagggcggggcgttcaagctcaaccgcaacccgcgcgagttcgccagcgtcgaagcctacctgcgccgtcaaggccgcttcaaggctcttacc

SEQ ID NO: 9956 - DNA, 214 bp, Unknown
  gut microbiota DNA sequence
cgggacgaagtacatccatgtgatggctccgtgcccgacggggtggggctgcgacgtggacgagacggtggacatctcgaaggacatcgtcgactgcggtctgtggtatctggccgagtacgaggacggggcgttcaagctgaaccgcaacccgcgcgagttcgccagcgtcgaagcctacctgcgccgtcaaggccgcttcaaggctcttacc

SEQ ID NO: 9957 - DNA, 19983 bp, Unknown
  gut microbiota DNA sequence
acgacctcctcgtatattgttttcgccacttctcgcgcagtggccgcgctctttaccttccttttcaaatatgggataaagggcgagtagagggcggagggcgcagaacgacctcctgggatttggccttggacgacaggattgcgcctccgacccgcagcgtgacgtggataaggcaggatggccgttcggggctggatatctgacgaggttgcgtgctgcgggaaccgaaggaagacttccgctctcgcagaaggtttcggacctcaataataggaggcacgcatgcgctacgtcggaatagacatagcaaaaaaggatcatcagatagccgccgtcgatgagtttggcaacgtcatcctcaagtcgttcagcgccggcaacaacgaatctggctttgccaagatcgccgaaaaactcgaggctgcccgcatcgagtcggatgagtgtctcgtcggaatggaggcgaccggccactactggatctcgctctgggagttcctcgacgccaacggctacgaggtcgtggtcatcaaccctatccagaccgacgcattccgcaaagtcgactcgctccgcaaaacgaaaaccgacgccatcgacagcgtgctcatcgccgagtacctgcgctttgcgaaccccgagtcgtccaagatggccaatccggacgtcgagcaactccgcgaactggcacgcttcaggagctttctcgtagagcaggcgacccagcttaagaacaaggcgatccgcgtactcgaccaagcattcccggagtacggaaagttgttctccaacacgttcggcgaggcatcgaaagccctgctcaagcagtgcccggcacccgaagaggtcctcgcaactgacatccgcacgctcacgcgcatcctcaaggaaaacagtgggggcaattgcggtcgggccaaagccgaggcagtcaaggacgccgccaggagctcgatcggcgccaagttcggcgcccgtgccctgtccttcgagatcaagttgctggtgaagcggctatcgttcacccaggtccaaatcgaagaattagaggacgagatatcagagctgctgcaccgttcggatggtcactggctcacgaccatccccggcatcggagactcgctcgcggcctccatcgccggggaaatcggcgatcctgaccgtttcgagacccccaagaagctcatcgcctacgcgggcatggatgcctcgaagtaccaatctggcgcgaatcaggacacaaacgggcacatgtctaagcgcggctcctccgagcttcggcgagcactcatgctggcagccgacaaggtgcgcatctacgatccctacttcggcgagtactacgactcaatgaaagcccgcggtaaacatcactacgtcgccctgtcgggagtcgccaggaaacttgccggcgtctgcctgtcgctcatgcgcgagcagcggccctacgagtccgaacctcccgagcatcacctgccaggtcatcttcagcgccaagcctaaatttgggtaaaaatcgcggaacttataaaccgccttctccagggcggtttatatcctgatgcctcgaagcagcaaatccacgtgcctttctattccatattctattatcaacatcctatctaaaagctttggtttagttcttgacttcaaatagcaggtctgtccgccgacgacctcatcgtgctcgcccgcgacgagcgccgctcgacggcgcgcagcagcggcatgctgtcgttcggtctgctcgacgtgctggccgtcgtgttcgcgttcattccgctatacggcgtggacgacggctcgttcgtgcgcatggcgaacctggccgactacggcgcgtccgtggatttcggcgcgtcgttcgccgtcatggcggcggccgtcgtctcgctcatgttcgtgggtgcggtggagatcttgctggcagctgcgggctcgcgccgcgcggcccgcatcgtcgccctcgttgggttcgcggtgcaggcgctggccgtcgtcctgttcgcctccaccatgcagccctacgccacaacgctcatgttcgcgctgctcctggcgaaggtcgtcgtcggctaccgtattctgcgctcgtaacccctggtcggctgcggaggtcacgcaccgtgtcgcccgtgcgacgcatcgtggcttgccgccgggaggcgcgcgtcgtttcattgaggttcggacccgcaagggatccgcagcatccgtgaggcgaaaggacggttcgatggaaacaaccctgatggccgcgtggctgaacgacgcgttcgccgcgttcgatgcgacgatcttggggggcgctgcatgcgctcgcagaatgcgggggcttcgcgctcacgcccctgttcgaggcggtgagcttcgtaggcgagaagggcgcatgcttcttcgcgctggccttcgtgcttatggtgttcaaacgcacgcgacgtgccgggacggtcatgttcgtcgccatctgcctgggcgcgctcgccacgaacatcgtgctcaaggacttcgtcacgcggccgcggccgttcgagtcgtccgcgctcttcctcgactggtggcgcttcgccggcgccgcgttcgaggacgggttctcgttcccctccggacacatgaccgcggcctcggcggcgatggcggcgctcatgctggcgtatcggaattggaagacagtgctgggcggctcgatcgtcatgctggtcatgggcgctgcccgctgctatctcgtcgcgcactatcccaccgacgtgctgaccggccttctcgtgggcgcgctcgcggccgtcgcggcgcagctgctcgtgtcgttcgcgttccgccggtacggggagcgccgattcgcgcggcctcgccacgcctgtgctcccgtgcgacgcaggcggtaggtcccgccgttcgctccctccgtcgtcccggcgtgcacattccctgcattttggcttgtcagccgcatgaagcgcgcacagatgatacaatcgtcggccgagagacgaaaacgcgcgccgcgctcgcacgggcggcggcgaaaagtgaaaggacgaatgtggcactcgtcaacgagcgggcctgcatcctcgccaacgaggaagtcggcccgaacctctacctcatggaactcgcggcctcgcatatcgcggcgagcatcgagccggggcagttcgtgcacatgaaggtgccgagcatggaggcgcacatcctgcgccgcccgttctcggtgtacgcgcgcgatgcggcggccggcacgctcgaggtgctctaccaatcggtgggcttcggcaccgaccatatgacgcgcatcgagcccgagcgagccgagcacctctccggcgccgagctcatcgggccggtgggccgcgggtggcagcctcccgcgaacgcgcgtcgcgccctcctcgtgggcggcggcgtgggtgctgcgccgcttttcatgctgtgcgagagtctgattagcgccggcgtgcgcactgacgtggtgctgggcgcgcagaccgaggcggcgctcacgtgtcgcggccgctacgaggcgctgctggacgagccgccgcgctgcgccaccgacgacggcagcttcggacgcgagggcttctgcacctcgctcgtcgccgaagcgctcgccgaagctgcagaagcgggggagccgtacgactatctggccgtgtgcggccccgagccccttatgaagatcgtggccggcatggccgccgaggcgggcgtgccctgcgaggtgtccatggagaagcgcatggcctgcggcgtgggagcatgcctgtcgtgcgtggtggacacggtgggcggcaagcagcgggcctgcgtcgacggccccgtgttcgatgcgcggaaggtggtatggtagatgggcgatagcttcaacgcaacgcaacctgttcggtcgggcggcggggacacccctccagtcgctcggacagtcctcgctcggtcgaacagtccgcaggactgttcgattcgctgcggaactcgcttggtggaggggtgtccccgccgccctgttccgacttcggtggacatgcgcgtgaatcttggcgggttggagatgaagaacccggtgacggtggcttcggggacgtttgctgcggggcgcgagtacggggacttcgtggacgtggcgggcctcggggccgtcacgacgaagggcgtgtcgctgaacggctgggcgggcaacgccagtccccgcatcgccgagacgccttcgggcatgctcaactccatcgggcttcagaaccccggcgtggcgcacttgaaggaatgcgatctgccgtggctggccgagcgcggcgcgacggtcatcgtgaacgtgtcgggccacagtttcgacgagtacgtgcaggtgatcgaggcgttggaagacgtgccggtggacgcgtacgaggtgaacatctcgtgcccgaacgtggacgcgggcggcatgaccatcggcacgtgcacggacagcgtcgaggcggtcgtgtcccggtgccgcgccgccacgaagcgcccgctcatcgtgaaactcacgccgaacgtcaccgacgtgaccgagatcgcgcgcgccgcagtgtcggccggcgccgacgcgctgtcgctcatcaacacgcttctgggcatggccatcgatgcggagcgccgccgaccgcagctcgcgcgcggcgtgggcggactgtcgggcccggccgtcaagcctgtggcgctgcgcatggtgtgggaggttcaccaggccgtcgacgtgccgctgctcggcatgggcggcatctcgtgcgcgaccgacgcggtggagttcatgctggccggggccacggcggtggccgtcggcaccgcgaatttcgtgaatccgcacgccacggttgaaatcatcgacggaatggcgcagtattgcgaaaggcacggcatcgaagacgtgcagcaactgataggagctttggaatggtgagttcgttcgaagaggttcccgcgcgcgatcgcgtgatcgtggcgctcgactgcggcatcgaagaggccttcgacctcgcggaccagctgcagggcaaggcgacgtggatgaaggtgggaatgacgctgttctacgcgaacggcccggccatcgtgtacgcgctcaaggagcgcggcttcaaggtgttcctcgacctcaagttccacgacattccgcaccaggtggagggcgccgcgtacgccgcggccggcagcggggccgatatgctgaccatgcacacggtgggcggcgtcgacatgatggctgcggcgcagaagggcgccgagcgcgcagcgtccgagtacggtcacgatgcgccggcgacgctgggaattacggttctcaccagcatgaacgatgcggctctggccgaaacgggcgtaagccgcgccatggccgaccaggtggtcgtgctggccgagcaggccaagcgcgccggcatctccggcgtggtggcgtctccgaaggaggctgcgcgtctgcgcgagatcctgggtccggacgcctacatcgtcacgccgggcgtgcgccctgcgggcagcgatcgcggcgatcagagccgcgtggccacgcctgcccaggcgttcgccaacggtgcgtcgcacatcgtcatcgggcgtcccatcacgcaggcggccgatccggcggctgcattcgagtccatcgcggccgagctgtaggcgccccgtcgaacttgcgtgcggtctgggaaaatgacggttgggcgacgaatggtcgacaaaggagccaactgcttctagaatgtgtgaccacgcactgaaatttttaggatttgtaggaaaagacaaggtgaagtgggcgaatgcgtgatagtatcacggaatcgttttggaacagaaggagataacacgatggctattcctcaactcagccctgaagagcgtcaggcggctttggaaaaggcgaaggcggctcgcatcaagcgcgccgaggttcgcgatgacctgaagtccggcaagctcacgctcgagaaggttcttgaaatgaagaacgatccggtcgtgggccgtatgaaggtttccaccctcatcgagacgcttcccggctacggcaaggccaaggctgagaagatcatgaaggagctccagattgccgagagccgccgtctgcgcggtctgggcgagcgtcagcagaccgccctgctggagcgcttgggctaaccgcacctatgcgccacggcaatctgttcgtcatctcggggccatcgggtgctggcaagggcacgctggtggcccgtcttttgcgcgagatccccgatgcttgggtgtccatgtcggttaccacgcgcaagccgcgcgagggagaagtggatggcgtccactaccgcttcgcgtcccctgaggaattccaggagctcgtcgacgaggacggcctgctggaatgggcgacgtacggcggcaactgctacggcacgccccgcgctaccgtcgaggagcacatcgcgtgcggcgatcaggttatcctggaaatcgacgttcagggaggattccaggtgcgcgacaagttcccttcggcgcatctcgtcttcatcgagccgccgtcgcttgacgtgctggaagcgcgccttcgcggccgcggaacagagacggaggaggccatcgccacgcggatggagacggcgcgggtggagctttcccgtaaaatggagtatgatatacggctggtaaacgacgatttggacgaagctgtccgcgcattagcgggctacgtcaacgaacaagccgagaaaatacgaggttaacacgcatatgagcattatcgaaccgaagatcgacgtcctgttgaacgagactgacaacgatcgtttcctgctgtgcgcgctcgcttccaagcgcgcgcacgacatcaacgacatgatgcgcggccagcgcgaccgcgccatccagctgcagacggcggtcgagatcgcgcgcgcggccgacaagaagccgctgtcgctggctttcaacgaaatcgcccgcggcgaagtgtcgtacgatcccaactccatcgacgtcaactaccactaagagattccgtcggcctacggccgacggaactgctcgacgctgcgaagccccgaggcaccgcgccttgccgctccaagccctcgtcgcgtacggaagtacgcttcctcgggctttcgcggcattgcaaggcgcctcggggcttctcgctgacgtgctgcgccaacctgcgtgttcgtttcgcgctacgcgcgatctctctgcatcgaaggatatccatgactgaattccaacgcatctgcttggtccattaccacgagatcgggctcaaggggcacaatcgatcgacgttcgagatgaggttgctcaagaacctcgaagcgctgctgaagcctttccccgtggtcgttatccatcgcatcgcgggccgtttgtgcgtgttcttgcgtgagggcaccgattggaccaccgcgaaggaggcggccgacgtcatcggcaaggtgccgggcgtagcgcgcgtgtcgtgcggtttcaagtgcgagcgcgacctcgacgagatgacggaggcggcgctcgcggcgatggccgaggcgggcgagttcgacacgttcaaggtggcggcgcggcgcaaccacaccgatttcgtcacgggttcgatggacatgaaccagatcatcggctcggcgctgtgcgccgcgcaccccgagaagtccgttaagatgaagaagcccgacgttacggtgggcgtcgaggtggtgcagaacgcggcgtacgtgtacgcgcgctcgctgccgggcgtgggagggctgccggtgggcagttcgggcctggtcgtgagcctgctgtcgtcgggcatcgactcgccggtggcgacgtggaagctcgcgcggcgcggcgcggtgtgcataggcgtgcacttctccggacgacctcaaacatccgatgccagcgagtacctcgtggacgacatcgcgcaggtgctggagcgcacgggctgcatcgctcgcgtgtacgcggtgccgttcggcgactaccagcgcgagatcgcgctgaccgtgccgcccgagctgcgcgtcatcatgtaccgtcgtctcatgttcaaggtggctgaggagatcgcacgccgcgagcgcgcgggagcgctggtgacgggagagagcctgggtcaggttgcctcgcagacgctcgacaacatccgctgcactgacgcggcggttgacctgcccgtctttcgtccgctcatcggcaccgacaagctggagatcatcgccgaagccgagcgtttgggctcgttcgagatctcgtcgcaggatgcgcccgactgctgcacgctgttcatgccgcgcagtccggagacgcatgcgaagctgcccgtggtgttggaagccgaggccgcgctgcccatcgagcgctgggtacccgagatcgccgacgccgcagaggttcgcgactacgcctgccccgcctacaagccgaagaagaaacgcgcttcctgagcgcggccggttgcagaagctcgcaaaagcggcgtccccgggaaatacctcgggggcgccgctttctcttgccccgtttcgtcgtcccgagcgaacgcagctctcgccctgtcatcctgagcgagcgcgagcattcgacagtccagcggactgtcgaactcccgagcacgcgaagcgagcccagggaggccccgcgcagcgcggagtcgaaggatcccgtgcggcatcagctggaagcgccgcggctggcaccgcacggaatccttcgactccgcgctgcgcgctctgctcaggatgacgacctgcggtgccccgatcaggatgacgggcccagcgcagcttgtattcgagctgacgagaagcggggtactcctcgcgcgtgatatgcgcgtgggattcgttggcgcggcaggtggaaaccgcgctggatcggcatcgacggcgcgtggaatcggcgttggaaacgcgtggaaggtgcgctggaaaacgcggcgcgtttcgctggatctgcgccatcggcgcgtgagtcggagtcgctatcatggaaggagaggaatcggcgacgggcgagggggcggcatggggtttgcagagcgggcggagtcgtggcgggcgaaggcgcacctgaccggcgtgcgcctgccggtgctcgtgggcgtgacggcgctcgcggccatcgtgctcatcgcggcgggaggagcgctggtcaaggccggaacgtcggacggcttctcgctctctcgcgacgacggcgcggcgacttccgacggtaccgacgaggacggcgccgcttccgtggaggcgcgaaccgtcttcgtgcacgtgggaggcgccgtggtcgaaccgggggtgcgagagctggcggagggcgcgcgggtgcaggacgcggtggacgcggccggagggttcgccgacggagccgcccgcgacgcgctcaacctggcacgcgtgctcgcggacggcgagcagatcgtcgtgccgtcgcaggaggaggctgtcttggagccgggcgcggccgtggacggcggcgatgcgggctccagggcggctgcttcgccgacgggcggcaagatcgacctcaatcgggcgacggcggccgagctcgatgcgctgcctggcgtggggccgtccacggcggagaagatcgtggccgaccgtgaggcgaacggccccttccgcacggtggaggatctcaagcgcgtgtccggcatcggggacaagaagttcgccgatctggccgatctcgtatgcgtgggatgaggggcgctgcgcggggcaaaccggtcgcgcttcctccgcgcccggcgctgccgcctgtgctggcctgcgcgctttcgctgtgggcatcgtgcgcggcggtgctggccgcatccggatcctgggatgccggcgcatgcctcgccgtcggcgcggccggcatcgtcgcgagcgtcgcatgcgctttcgcgctatggcggctgccggtgccgatcgcgtgggccgcgctgctgggagccgcgctcggcatcgcgctcgcaggcgggtgcgcggccgcgcagcacgaggcgcagctgcaaggcgacggcctttcgggacgctggcgattcgaagtcgcagccgacggttcgcagggcccttatggcgcaacgtgcttcgcgcgcgcgaaccttcccgacatcggagccgttacggtgcggcttaggttcgaggaaggcgaggaccctccgcgttacggcgacgtgctggaggccgacgcgacgctctccgcgccgggcgggtcgtcggcggcatactgctggcggcagggcgcggtgctcgaaggcacggcgcgccgagtcgtgagctgcgagcgtgccgacgccctcggtatcttgacagggcttcgcaatcgcgcgatcgacctgatcgccgacgaggggaccgacgacggggccgcggtgctcgccgcgctcgtgtgcggatggcgcggcgccctcgaggtaggtgacgcgtacgccgcctaccagaccagcgggcttgcgcatctcgtggcggtgtcgggggcgcacctgtccatcgtcgccggctgcgcagccgcgctcttgcgtgcgctgcgcgttccccggcgcgccggagccgtcctgcaggcgtcgtttctgctgggcttcctcgtgctggcggccgcgccctcgtcggccgtgcgcgcggccgtcatggcgttcgccggcatgttcgcgttcacggcgcggcggcggccggcggcgctcagcgcgctggccgtatgcatgatcggctgcatcgcgctcgatccgcgcacggcgctggcggtctcgttcgcgctgtcggcgctctcgacgctcggcatcgtactgttcgcagggcttttccaggcgtggatcgcgcagtgcttccagcgcgctccgcgcctggcgcgcgaggcgctctcgcttaccgccgcttcgagccttgcggccgcgccgctcgccgcatcgctgttctcgcaggtgccggttgtggcgccgctggccaacgtagcggccgcgccgctgtttcccgtagtctgcgccggcgggttcgcggcggtgctggcatccttggccgttcctgccgtcgcgccggcgttgatcggattcgcgtcgatgggcacaggcgccctcactgccgtcgtgcgcgcgctcgcgagcgtcccctacgcgagcctgcctgcgagcgtgcccctcgccggggcgcttctggcgtcggcggcatgcgcggcggcgctgtggctggcgtggccgcgtccgagccgtcgtcgcgcgttcggtctggtcgcggcggcggcgtgcgtcatgatcgggacggtcgtcgtcgccccgcgcctttcgggcgacgagatcgtcatgctggacgtggggcagggcgacgcgttcctggtgcggagccgggggacggccgtcctgatcgacaccggcaaccaggacaggatgctgcgcgaggcgctcgcacggcatggagcgtaccgcctcgacgcggtggtgatcacccacggcgacgacgaccataaaggatcgctcgcctcgcttgcgggcgtcgtggacgtgcgacgcgtgctcgtcgcccaggacgcgctctcgtgcggctgcgaagcgtgcgtctcgctcgtcgccgacgcgcgcaagctcgcgggcgacgggggagtcgtcgggcttcggcagggagatgcgcttcaggtgggctccttcgacttgcagacagtgtggcccgagcggttctccgacgaagggggcaacgccgacagcctgtgccttgtcgccgatgcggacatcgacggcgacggcgcatccgagtggcgtgcgcttttcacgggagacgccgagcgcgaccagctgcgcgcgctcatcgacgaagggcttgtggactccgtcgacctctacaaggtgggccatcacggatccaagaacgccctcgacgacgaggaggccgccgtcctttctcctcgcatcgcgttggtcagcgcaggggcgcgcaaccgctacggccatccggcgcaggacacgctcgatcggctcgaggccgcgggcgcacgcgtcttccgcaccgacgagcagggagatgtttcgtgcaaattgaccgccgaccggatcgaggtggataccctgcgttagaatgaacggcatggctactcaaaagaaacaagaagctccgctgctgcccgtctaccttatcgtaggcgaggacgcgctcaagcgcgacaccgtgatgaagcgcctacgcgcgcgcctgtcctcgatgggcgatctgtcgttcaacgccgacgagttcgacggcgagacggcgcagggcggcgacatcgtcacggcctgcaacaccgtgccgttcgcgagccccgtgcgtctcgtggaggtgcgcgcggccgacaagctgaagaaagccgatgccgaacagctcgtgagctatctcggttcgccgaacggctccacggtgctcgcgctcgtcgccgagaagctggcgaagaacacgcgcctgtacaaggccgtggccgcctgcggcaagacggcggttatcgattgcgcaccgctcaagcgctacgagctgccccgaacggtgcgctcgatggccgtgacccacggcgtcacgctcaccgagggcgcagccgtcaagctcgtcgacctcgtcggcgaggacacggtgcatctcgacagcgagctcaaaaagatcgcgctcgcgcatcgcggcaccgacgcggtgaacgagcacgagatcgtcgacatggtcagccgcaccgccgaggtgaagccttgggagttcgtcgacgcctttgcggcgcgagacgtgcgcaagtgcctgctgtacctgggtcgtatggattccgtgtcgccccacgcgctgctggccatgtgcacgacgcgtctgcgcgagcttgtctgcgcgcgctcgatggccgatcgcggcaatccccgcggcgtggccgcggcgctcaaagcgcccgactggcgcgtgaagaaccatgtcaactgggcccgcggcttcactgccgccgaactgcggcgcgccatcatctcttcgcgtgacaccgagcgcgcgatgaagagcggcgccgatcccaggagcgctttcctggactgggtgctggcggtgacggcgaggcgctagcgtttcaggttgtcgtcaaaaatgcaagcagaacgctcgctcgggatgacagcggggacaatccgcggtttccgctcaggataacagccctctaacgcgaaggagccccggatttccggggctccttcgctcttgatatgcggacggatcgcagggcgagtgccgtatgcgcatggatcgttattcggcggcagcttcctcggcgccttcggcagcctcggccttggcggcctcttcggcttccttggccttgcgcttctgagcggcggcctcttccttgagctgcttctcgcggcgcttggccttctcttcggaagcggccttcatctcggcgagacgggcggccttgcgctcggccttcttggagccggtcttctgctccttcttggccggcttcacgtaggcggcgcgatcggcgtcggtggcaaccgtgttggccagggccatgatgccgctcttgcggttcgcagcctggttcttgtggatgacgcccttcgaggcggccttgtccatcaggcggcacgcggcgcacgcggcggcgtaggcctcggcgccgttgccggcggcgacggcgtccttcatgcgacgggtcgcggtcttgagctcgcttttgaccgcgcggttgcgcatgcgggacttctcgttggtgatgatgcgcttcttctggcttttgatgttcgccatgggtgatgttcctccaatttgcaaaacctgtctgataccgtgcgtttccggcgatgcggagcgtttggcgatctcgagagtcgcaactgcacggtgacgacagcctcgcatgcgatccccttcgggggaaccatggcgcgcccgcgcaggcgggcagcctcgatgcatggtgaaacaggcgggatttctctgtttcgcggaccaatcggtcaccggcacgtacgaatcttgaagcgcagccacgtctgcagatcggcgatgaaaccatcgcgcgaacgtatttgccggatacacaatgcgatagaatagcaaacgttgagcgctttttcacgcacaaatgcaaaatcgcgcacgtttctccatcaacctgggaaaaggagccttccatgcaccgttgcgactttcgcttgcccgtccgcgtactggccgccgccgcgctgcccctcatgggcgctgtgaccctcgcaggatgctccggcgcgtcccagcatcaggtgatcgaccggaacgtcgcctgctcctcatgccattccgacgagaagcccgtctacgaaggagcgacggtgccctcggaaaccgttgagagcgggtcgcgggtgcaggtcaagacatcgggagccgcggttgccgtcgtcgcgcgacccgtgttcactgccgaggacggctcgggtttcgtgcctgtgatcgattcgtccgtcgccttggacgggggagaggcggtcgtggagctggaggacggcctctgggcgctgtgtctggacgagggcgacaaggctcgcgccaagctcgtgcgcgtcgattccgcgagcgatgcgaccgctgtcgtggaactgtagcgcgcgaaccctgtccgcagcgcgcgaatagggtagaataggctccgttttcccgaagcgcccgcatgcgtgcgagcgcgcgtcatttgaaagacaggctatgaccaccgatccgaacttcatccgcaacttctccatcatcgcgcacatcgaccatggcaagtcgacgctgtccgaccgcgtcctcgagctcacgggcacggtggccagccgcgacatgcaggcccagctgctcgacagcatggacatcgagcgcgagcgcggcatcaccatcaaaagccaggccgtgcgcgtggactacacggccgacgacggccagacctaccagttcaacctcatcgatacgcccggccacgtcgacttcacctacgaggtgagccgaagcctcgccgcgtgcgagggcgccgtgctcgtggtggacgccacccagggcgtggaggcgcagaccgtggccaacgccatgatggccatgaacgcgaacctcgacatcatcccgctcatcaacaagatagaccttcccgcggccgagcccgaccgcgtgcgcgaggagatcgaggagggcctggccatccccgccgacgatgcggtgctcgcgtccggcaaaacgggcgagggcgtgcacgatctgctggaggccgtggtgtacaacattcccgcgcccgtcggggacgccgacgcccccttgcgcgcgctcatcttcgattcgtacttcgatccgtaccgcggcgtggtggcgctcgtgcgcgtggtggacggcgccgtgaagaagggcgacagggtgctcatgatggccaccggtaccgaggtgctggtggaagaggtgggagcacgccgcccggccgagacgccgctgccggagctgtcggtgggcgaggtgggctacctggtcaccggcctgaaggacgtgcgccaggtgaaggtgggcgataccatcaccgccgtgcgcggcggcgtggatgagccgctgccgggataccgcgacgccaagcccatggtgtacacgggcctgttccccctcgacggcgaccagtacgagcctctgaaggaggcgctcgagaagctgtcgctcaacgacccggcgctggcttgggagccggagaagtcgcacgcgctgggcttcggcttccgcgtgggctttttaggcctgctgcacatggaggtcatcaaggagcgcctcgagcgcgagttcggcctcgaccttctggcaacggcgccaagcgtggaataccacgtgtaccgccagggcggcgagatgatttcgctgcactcgccccaggagatgcccgatcccggcgagatcgatcgcatcgaggaaccctatctcaaggcgaagatcctcattccgcccgactacgtgggcgcggtcatggagctgaccacggcacggcgcggcaccttcgtcaccatgaactatctgtctcccacgacggtggagatgctgtgggagatcccgttgtcggagcttatcatggactatttcgataagcttaagtcgaacacgaagggctacgcctcgctcgactacgacttcgacgactacaagccctcgaagctggtgaagctggacatactgctttcgggcaagcccatcgacgcgctgtcgttcatcgtgcacaaggacaaggcgtacgatcgcggacgcgtgctgacggagaaactcaaggagatcattccgcgccagatgttcgaggtgcccatccaggcagccatcggcgggcgcgtgctggcgcgcgagacggtgaaggcgaagcgcaaggacgtgctggcgaagtgctacggcggcgacatcagccgcaagcgcaagctgctggaaaagcagaaggccggcaagaagcgcatgaagaacatcggcaacgtggaagttccgcaggaggcgttcatggccatcctgaaggtggacgactgatgcagataggttgagagcatggcacgcaaagacgatttcgattggctggacgacccgttcgacgagaagaaggccgcgaaggacgagatgcgcgccgccacgtcgggcggcaccaagctcgcgctgggctgcggttgtttgatcgccgtcgtgggcatcgtagtgctgctggggttcgtcttggtcaacatggccgagatcatggcttcgtagcgccatggaggatatgcacgcgttcttccggagccgccgtctgctgctcgcccccatggcgggcgtgagcgacgaggcgttccgcacgctctgccgcgagcagggcgccgacctcacctacaccgagatggtgtcggccaagggtctttcctacgcgaacgagaagacgcggcatctgctgcgcctcgcgccgggggaggaccaggtggccgtgcagctgttcggccacgagcccgacacgatggccgcccaagctgcgtggatcgagcgcgagatggggcagtcgctggcctacctcgacatcaacatgggctgtccggccagaaagatcgtgtcgaagggcgacggctcggcgctcatgaaggatccggcgctggccgcctccatcgtgcgcgcggtgcgcgcagcggtgagccgccccgtcacggtgaagttccgtcgagggtgggccgagggcgacgaaaccgcccccgagttcgctcggaggatggaggacgcgggcgcctgcgccatagccgtgcacgggcgctatgccgagcagctgtaccgcgggcgcgccgagtggggcgctatcgcgcgggtgaaggaggccgtgagcgtgcccgtcgtgggcaacggcgacgtgagaagcggcgccgacgccgtggccatcacggagcgcaccggctgcgacgccgtgatgatcgcgcgtgccgccgagggaaacccttggctgttcgcccaggccaaggctgcgcttgcgggcgagccggagcctgacgggcccaccgtggaggagcgcatcgcgctcgcgcgccgccacgcgcggctgctcagcgcgcgtgaaggcaggaacatcgtgcgcatgcgcaagcacgctatgtggtacctggcggggctgcccggcgccgccgccgcgcgcggcaggatcaacggctgcgtgtccgtggaggatttcgacgaggtgttcgacgagctgctggcatgcgcgagggagcatgccgccgcccacgagtgagaagagaggcgctcatgccgcacgatccgtacaaggcgctgtacctgcatcttccgttctgcgtgaagcggtgcgcctactgcgacttcgccacggcggccgtgcccgccggcgcgcccgagatcgaagcgtacgtggaggatctcagccttcagatccgccgcaaggctaaggaaggcgagctgggggcggtcgagacggtgtacctcggcggcggcacgcccagccatgtggggctggcgggcctgtcgatgctgctgtacacgctgtcgctgtcgatgcacctcaccgacgaggtagaatgcacgatggaggcgaatcccgagagcctcaccgagcgcatggtgcgcgacatctgggcgctcggcgtgaaccgtctgtccatcggcgtgcagagcttcgacgacgacgttctgcgcacgctcggccgcgcgcattcctccgatgacgcccgccgtgccatcgaggcggcccgcacccggttcgagaacgtgagcgtcgatctcatgtgcggcatccccggccagagcgcggagggcttcgaggcgagcgtgcgcgaggccgtgcgcctcggcgcgacgcacgtgagcgtgtacccgctgaccatcgagccgcacacgcccttcgacgccgcggtgctggcgggcgagctggaggagcccgacgacgacgtggaggccgcgcacatgcagatcgccgcgcgcgtgctggattcggagggcttcgagcgctacgaggtggccagctacgcccgccccggctttgcatgccgccacaacatcgcgtactggacgggcgtgccctacctgggcctgggccgttcggctgccacgatgacgcagaacgcgcagcgtcgcatgcgggtgaaggacggccaggtgaccgacgacctcgacccgcgccagatggccgccgagaaccttatgctgggcatgcgcatgaccgcgggcgtgtccgacgagcacgccgcccgcgccgcggagttgctgcccgaggcgacgacggtgctggccgacctggagcggcaggggttcgtcgagcacgaaggcggccgctggcggcccaccgagcgcggttggctctgcggcaacgagctgtacggcgccctgttcgatctggccgactgacgagcgcccgctccttgtgcgtctcccgtcgagtttctccataatttcctcctgttgttagcactctcggctttcggctgctaatatgatgcgttactatggttcaggtaagccgactggcgagagaggtaggtggaggagcgtgctttcggatcgaaggcaacgggtgctgagcgccctcatcgaagaatacgtcgcgcgcgccctacccgtggggtcgcgcacgttgacggagcgctaccagttgggcgtcagcccggccacggtgcgcaacgagctgtccgtcctcgaggacggcggctacatcacgcagccgcacacgtccgccgggcgcattccgaccgacttcggctaccgtgcgttcgtcgacaacctgctggcgtccgatcttgccggcgacgacgagcgctaccggcctgtggtggaccagctgcgccgcagcgcaagcgagctggacgcgctcctggagcagacgtcgtcggctctcacgcgccttaccgactgcctgtccatcgtgctggctccgtcggtgctgaacctgcacatcaagcagctgtccctcatctcgctgtcgccgtaccgcgccctcgtggtgctggtcaccgaggacggccaggtgttcaaccgccagatggacttcgccgaggaggtgtcgcccgacgagctggcgcgcgtgcagcgcttcctcgccgaggtgatgggcggcaagtcgcttcaggagatcgaggacggcctgggcgagggcatggcggaggcgttccgcgacccgctcgtgcgcatggcgctggacgaagtgctgtcgtgtttgcaggaaggcgacgcgtcgcgcacgcatcgcctcggcgtgagctcgcttctgacgaagcccgagttcagccagtcccaggcgctgctgcccgtcatgcaggtgctcgaggacgacacggtgctgctgcaaatcctcgacgacgccgcccggcagggttcgggcgcgcccagcgtgcgcatcggacgcgagaacgacgcggctgcgctagcgggcgtatcggtggtggccagccgctacgggcgcggcgcgtcggcgggggtcgtcgccgtggtgggtcccacgcgcatggattattccaaggttatacaggcggtgcgcatcgcgagcgcggcgctggaggacgtgtaaacgacatgggaggcggcgcgtcctgcgccgtctatgaggaaaggt

SEQ ID NO: 9958 - DNA, 1622 bp, Unknown
  gut microbiota DNA sequence
ttccgtcggcgcgcgcgcgagcttcacccggacgtgaacaaggcgcccgatgccgaggaccagttcaaagagctgaacgaggcctacgacgtgctgtccgacgcgcagaagcgcagcgcatacgatcgcttcggcacggttcccggcgcggccggcggcggcagcccctacggaggcggcggctacgtcgacttcgaggacctgttcggcggcgggttcggcatgggcgacatcttcagctccttcttcggcgggcaggccgccggccgcgcgcctatgcgcaaggaaggccgtgacatgggcgtgggcctgcgcctgacgctggaggaagtggccgcgggcgccaagaaggagatcgtgtacgatcgcctggcgccgtgccccgactgcgaagggtcgggcctcggccccgacggtcgcgagatcacctgccccgattgccacggccaaggccgcgtggtcaccatccagcacaccttcctcggcgacatgcagacggccaccacgtgcaagacctgcggcggcaccggccacaccatcgagaacccgtgccccgagtgcgaggggcagggccgcgtgcccgaccgccagcgcgttaccgtcgaggtgcccgtgggcattcgcgacgcccagcagctgcgcctgtccggtttcggcgaggccggcatgcacggcgcccgcccgggcgacctcatcgtcacgtgccgcatccagccgcacgagttcttcgagcgcgacggcgacaacctgcatgcgcgcgcgaacgtttccatcgtacaggccaccctcggcgccgagatcgagatcgacggcatcttcgaggacgagaaggtgcaggtgcgcattcccgaaggctgccagaacgagcaggtggttcgcgtgaagggcttcggcatgccgaagttccgcagcgagtcgcgcggcgacatgtacgtgcacgtgaacgtcgtggtgcccaagaaggtgacgaagaagcagcgcgagctgctggagaagctggccgaggagctgggcgaggacgtggccgacgagcgcaccccgcttcagaagctccgcgacgcgttcaactagcgggtcgccatgtccctgcagcatttctacctgcacgaccaggtgcttgccgacgagggggcgccgtctttcccgctgcgtttgtcgccggacgacgcgaagcacgctcgcgtgctgcggcttgcgccgggcgagcatatcgcggtggtggacgccgcgcaggactacttcgagtgcgagatcaccgctttcgacgatgcggtcccggtggtgcgcatcgcgcagcgcctcgacgacgaggagcgccccctcgtgatgctcgtgcagggcctggccaagggcgacaagatggagacggtgatccgacacgccaccgagctgggcgtttcggcgttcgttccgatgtcgtgcgagcgctccatcgtgaggctcgatgcgaagaaggccgcggcgaggacgcagcgatggcgcgccatcgcgaagagcgcggccatgcagtccggccagcgcgcgtgtcccgaggtgggcgagccgatggcgctggcggatgtgtgcgccttcttggcgcacgccaccgccgtgctggtgtgctgggaggaggcgccgctgga

SEQ ID NO: 9959 - DNA, 2124 bp, Unknown
  gut microbiota DNA sequence
catcgccgtggtggtgggccccgaagggggcctttcgcgaagcgaggcggacgcgcttctggcctgcaacccgcgtgcgtcgctcgtgtcgctgggctcgtccatcctgcgaaccgagacggccggcatcgtggctcctgcgctcgtcctgcacgagctgggccgcatgatgcacgacgcgcgcgaagcgcaggaacgcacgtccgcccatgtcgaaagccgtcgcgaggaagccggggacgcgtgcgaggcaggcgggcaatcgtgaatttcgccgtcgtcaacctgggatgcaaggtgaaccgcgtggagtcggacgatgcggcggcgcgcctcgccctgcgcggtgtcgagacgtccgaagcgtccgccgacctcatcgtggtgaacacgtgcacggtcacgggggaggccgagaagaagacccgcaaggccgtgcgccgcgccctgcgcgcgaacgaccatgcccgcgtgctggtcaccggctgcgccgccgccatcgacgccgcgttctacgaggcgctcgacgagcgcgtgagcgtggtggggaaggcccagctggcgcaggccatcgatgccctgttcgacgaggcgcccttttctcccggcgaggacgcgcccctccatatcggatccggcttccgcacgcgcgtgggcgtgaaggtgcaggacggctgcgacaacgcgtgcacgtactgcatcgtgcacgtggcgcgcgggcgcgcgaccagccgtccggccgacgacgtcgtgcgcgagtgcgcgtcctatgcccgcgccggcgcgcgggagatcgtgctcacgggtataaacctggggtcgtactgcgacggaggacggcgcgacccctccgcgatcaggctggccgctctgctgcgacgcctgctcgacgagacggccgacctgcacgcgcccggcgaggccccggcgcgcttccgcgtgtccagtatcgagccgcgcgatgtggacgatgcgctcatcgaccttctggcttcggcggacggccgcgtctgccgtcatctgcacctgccgttgcaggcgggaagctcgaaggtgctgcgcgagatggcgcgcccctacgacgcggagcgtttcgtcgcgctcgtggagcggctctaccgccggatcccgcagctggcgctgtccaccgacatcatcgccggcttccccggcgagaccgatgccgagttccaggagacgctcgacgtggcgcgcgcctgccgcttcgcgaagatccacgcgttcccgtactcgccgcgcatcgggacgcccgccgccgagcgcgccgaccaagtgccgcccgccttcaaggaagcccgcgccgccatgctgcgcgcgctgggcgacgagctgcgcgcatccgagcgcgcccgccgcgccggaaccgtcgagctcgccttggtggaggagggcggcgtcgccatgacggagagctacttcgaggtgcccgcccccgccggcgccgccccgggcgcgctggtcgaggtgacgctgtagtcggtcgcgcatcgcccccgaaccggcgcgccaagagcgggcgagcggcctgtttgcgcgaaggatcgccatgggcgcgcgatgctcagaacgggctgcgtcaatcttggtttaacggcggggcagtcgttttccggcacgggaagctcttcacggagagcgcgtattggaacaggtcgcgtatgctcaccccgagtcctcgggcaatttcggagagcgcgtcgatgttcgggttttcgtatctgccatgatggcagcctctcttgttttctgaacccctgcggctgctggccctttcttgaatgaggcgattcgaaatgcctctgttttccgataggctgtatactagtcagaatagcgatttaaaacgggaggcgcgaatgggcgacgacgaggcgcgcgagcgggcgcgcaggaggctcgaggagcgcaaggcgcgcatgcgcggggaagcgcccaccggccgcgatacgcacggcgtgcatgacgcgcgcgagccgataagctcgggtcgtctccgttcgagccgtcccggaacgggcaatcggcactcgtgggaggcgcacggctcggagctcctgttcgccttctccgaggctgcgacgaacctcgtgcgcgccgtcggtc

SEQ ID NO: 9960 - DNA, 290 bp, Unknown
  gut microbiota DNA sequence
atcgaacttgttcttatcggtttcggccatgccttggccgggatcgtgacgtttatcgaacagcggatcggcagggtcggtccagatgcgctcggccacaggttcccattcctcgatggagcgcgtgcacttggcgcacaggttgcgtgcgctttccttcgcctgcaggtcggtggagtgggcgccggcggtttccaccatgtccgccagcacgtcctggttctccaagatggggcagggacgcagcaagttgtcgttgaacggctgccgctcgtagtactgcatgaaga

SEQ ID NO: 9961 - DNA, 415 bp, Unknown
  gut microbiota DNA sequence
caggccgcccttgtgcgcgaacgccgacgcgcccgtgtagggatgatggttcggcaccgacaggttgcacgtctcggccacgaactgcgccacgctggtcagatcgcgcagccgctcctcgcccacgcaggtacagcccatcttcagctcgagatcggcgatgacggtgagcaggtcggtattgcccacgcgttcgccgaacccgttcaccgtgccctgcacctgagttgcgccggcgcgcacagcggcaagcgagttcgccacagcgcagcccgaatcgttgtggcagtggatgcccagctgctggccgggcagctcgcgcgcgaccgcggccacgacggcctccacctcgtgaggcagcgcgccgccgttcgtctcgcataggtcgatggagtcggcgcccgcctcgcttgcc

SEQ ID NO: 9962 - DNA, 195 bp, Unknown
  gut microbiota DNA sequence
ctgcaagcgctcgaagtggacgacagctgcctcgaatgccacggcgagccggtcggcgagctcgacatcaccgaccacgcgaaggaaggttggacgctcgagtcggtcggcggggccatcagcatcgtgatccccctcgatcagcagcaggcggccatgcgcggcaacgtcatccgagacatggcgtacttcctg

SEQ ID NO: 9963 - DNA, 180 bp, Unknown
  gut microbiota DNA sequence
atgagcgtgttccgcgtgctgtttcccatcgcggcgacgtgcctcatcgtgctgccgttcgcgggaggcgagttcaccacggtgggaagcggcgtgacgtatgcgtgcttcatgctggcgtgcgtgctcatgatgatgcattgcggccagatctcgcgcgatagcggcatcaacccggtg

SEQ ID NO: 9964 - DNA, 220 bp, Unknown
  gut microbiota DNA sequence
gcgatcagcgcgcccgagaaccgcacttcgcggaacttgccgcgcagctcgcccacggccaggaacacgaacgagcccgaggtgacacccaacagcacgctgaaaatcagaagtggccactggatttccatggttactcatctcccttccaggcgcacttgtccatggcgtagtccacgcccggatggttccccacgtccttcagcttgtacgtcttctt

SEQ ID NO: 9965 - DNA, 283 bp, Unknown
  gut microbiota DNA sequence
cgagctgtccgacgcgttttccacgggatcgtccatcatgccgcagaagaagaaccccgatttcgccgaactcatccgcggcaagacgggccgcgtggtaggcgacctcgtggcgctgctggtcaccctgaaagcgctgccgctggcctacaacaaggacttgcaagaggacaaggaaggcgccatcgacgcggccaagacgctggaggactgcctcgtgtgcgcggccggcatgatcgagacgatgcgcgtggtgcccgaggccatgacggcgcaggcgaag

SEQ ID NO: 9966 - DNA, 181 bp, Unknown
  gut microbiota DNA sequence
tcggccacgatgtcctgcgcgccttgcagcgcatcctcaggcgtggggtatcccgcctccgggttcacgaggtcggcagctgcggccagcggatccttggcgctgcggccttgcgcgaggatgagcagcgcgagcggctcgagcccggcgtcgcgcgccttcgaggcgcgggtggcgcgct

SEQ ID NO: 9967 - DNA, 752 bp, Unknown
  gut microbiota DNA sequence
cgctcttggccgagcacggcgtgaaggcgcgtctcacgctgacgaacatgctggccgacgaggacgacctgcgcgacgagtacctgaacgcgatgctcgccatcgccggccgctacgatgccgaggccatcgtgtacgccgacctcgtgggcaactacgtgcgcgagcgctacggcatgcgctgcgtgctgtccaccacgcgcgcgctggcggacgcagccgaggtcaaccgcatgacgaagcgctacgactacgtggtgctcgactacaaccgccacaaggatccggcgtttctcgcggcgctcgaagaccgcgacaaggtggaggtcatggtgaacgagttctgcgcctaccagtgcccgcatcgtgcacagcactacctgcataacagcgaggaccagcggtcgggcacgatgcgccccttcgagtgcgtcgcgaagcgcgccgatttcttcgaccacgagccgggccacccggtgatcttcaccgatcgggaggtgcgcgacctgcacgacgagtacggcatcgggtacttcaaaatcgtcggccgcggcgtggccttccaaaccgtgctcgaggcctacgcgtactacctagtgcgccccgagtaccgcgaagacgtcaagcgcatggtcatgcgcgccgcggggtaggagcagcgtagaagaacggttggtttcgcatggggtcaggcgtctgttgcacaaaaacccgcgacgtgcgatctgaaccgatgttttcttgtcgcccac

SEQ ID NO: 9968 - DNA, 237 bp, Unknown
  gut microbiota DNA sequence
aacgcgagcatgagcgaagccgtcaaaggaaggttgccgcttgttcgccttgcgaccgccccgccgaggtcggcggggcggcaggcttcgaccggagtcggccgatcgtcagccgcgcgtcatatgcggcggcctgcgtccgatgtcggagcgatacagctcgctcagcagctgcgcaacgctcgcctcgctcgtcgagctcccgcctttcgcgacgcgatcttcgtcgcgagcgga

SEQ ID NO: 9969 - DNA, 402 bp, Unknown
  gut microbiota DNA sequence
cttcgggaacatccccgacgtgcggcgcgccttcgcgctggttgacggccgcaccgactttcccgagctggtagccctgttcaagcaggtgcgcgcctaccagggcacgggcatggcggccaccctgttctacgaaggggcggtggccgaggcgcttgcgctggtcatcgagcgcgcggcgatcatcgaggcggagcgcgccgagggcagcgtgttgacgctttcaaaggaggaccgtgcagccctcgacgacctgagcgcctacatcagcggaaatcttgcgggcgccctgtcctgcgaggagctcgcgcgccgcgcctgcatggggcggacgaagctgaaggccgcgttcaaggcggcgtacggcacctcgcccgcggcgttcgtcgcggacgcgcgcat

SEQ ID NO: 9970 - DNA, 251 bp, Unknown
  gut microbiota DNA sequence
aggatctcgatgcggcgacgtatcgacccggcgagtataagactgaagcgctgcaaaagcgcgagttcgtgctgaacggcgacagcgtggtgtacgccgatccctcgttgatcgagcgctcgctggcatttctattcgacgaggagcggtcgcacgtctacggcatcgagttcgacgaagctcagctcgaacatctcggccgctttatcgcaaggttgtggcaggttcatcctttcgtcgagggcaatacg

SEQ ID NO: 9971 - DNA, 25033 bp, Unknown
  gut microbiota DNA sequence
cgaacggcgacagcgtggtgtacgccgatccctcgttgatcgagcgctcgctggcatttctgttcgacgaggagcgatcgcacgtctacggcatcgagttcgacgaggctcagctcgaacatctcggccgctttatcgcaaggttgtggcaggttcatcctttcgtcgagggcaatacgcggacgacggcggtgttcgcggtgctctacctgcacgatctgggcttcgatgtggacgacgagccgttcgagcggcatgctcggtactttcgcgatgcgctcgtgcgcgcgaactaccgcaacgcgaaagcgggcgtcctgcccgaccttcgcttcgtcgtgcggttcctcgacaacctgctgaacgaagccgaacacgagttgcgctcgcgcgatcttgcgtgcaaggcgttgttcgacgacccctcgtttttgcgcaacgtcgatccgtcgcaagcgatcagcttgtagggaagccctcccgtttcccgtcgcgcagcgtctcctctacgaggcgctggaggttcgcggcgaagcgctcgcgatcgtcgtcttcgaaggcggcgggacccttcgtccggccgccctggcggcgcactttcttctcctcgtggcggatgtgcatgtcgaggtcgatggtggtcagcgtgtacacgcgcccgcgcacgccgatggcccgggcgtgccgtcccagcgccatggcggccagcccgatgtcctgcgtcaccacgatgtctccgggttccagctcctgcacgatggcgaagtcggccgcgtcggcgccgatgcccacgggcagcgtgtccacccagaacccgtcgcggggctcgcgcggatctccgcgcctgatgtgccgagcaaggttctgcgtcgcgttgcccgcaacgaccgcgggcaacgcgttcttgcgcgcaacggccagggtttcggacgtgaccgggcaggcgtcggcgtcgatgtagatcgtcggtctcatgggctcgctttctttcggaagattccagtatacggtacggcagcctgaacgaggcgcgatcgtgcgcgtcaatgcgtcggaacggtgtccgaaatgtgcgcagacggtgatcggcgggccccgtagacattttattgagaaatgcgtcctagattctttccgtttgatagtggaagctgcgggaggatcagcatgaggagcgagaacgagtttttacgcgcagtcgagcagcaggtgcgcgaacatccgcaagcgcctgcccacaaggcgccgaacggcctgacgaccacgtacgccgagctatgggaggcctccgatcgcattgccgccgccttggcggcccgcacggagaagcgacagccggcggtggtgctcggccacaaatccgcatgtatgatcgcagggtttctcggctgccttaaaagcgggcatgcgttcgtccccgtagacacggagatgccccttacgcgtctcgcggacatcctgtcccagctcggggagacgctcgtggtggttaccgaggacatgcccgatgccctggcgtgcgcgctgcccgagtcagacgtgctcgatgcgcgcgcggccgtcgccgcagcgggcagccccttcgtcgtccccgatcgcgcgagctgggtgacgggcgacgagacgcagtacctcatcttcacgtccggctccacgggtcgcccgaagggcatcgaggtcggcgcggacaacgttgcgcgcttcatggactgggtttgcacgtttcccgtgatccgcgagggcgggcgcgtattcctggaccaaccgccgtactcgttcgacctgtccgagtacgaggtggtgggcgcgctcgccaccggcggctgcctgcacgccgtcgaacgcgaggagaccgaagatctgcgcgcgctattcgccgacctacgcgattcgggcgtggaagtgtggacgtccacgccgtcgttcgccgacctgtgcctggccgaccgcagcttcgacgaagccctgctgcccgacgtgcgcctgttcctgttctgcggcgaggccctgcgccgctccacggctgcggctctgcgcgagcggttccctcgtgcccgcatcgcgaacacgtacggtcccaccgagtcgaccgtggcggtcacctacgtcgagatcggcgattcggagctggttgacgagcgcccgctccccgtcggccgtccgcgccccggcaccgagctgcgcatcgtcgaccccgagacgggcgccccgtgcgaggccgggcggatcggcgagatcgtcatcgtgggcgacacggtggccaaaggctacttccgcaaccccgagaagacggcggcggccttcttcgacgcgacgcttgtcgacggcacgcccgtgcgtgcctaccgcacgggcgacgcgggccacctcgacgaaagcggcatgctgtactgcgacggtcgtttcgactcgctcgtgaaggtgaacggcttccgtatcgagcttgcggacgtggaggagaaccttggcgcgctgccgctcgtgaagcaggcggcggtcgtgcccgtgcgtcgccgcgagcgcgtggcgtacctgaaggcgtgcgtggtgctgcgcgagcgtcctgcaggcagcgacttcgagatagctcgtctcatcaaggctcggctggccgagcgcgtgcccggctacatggtgccgcgatcggtggcgctcgtgggcgagctgccgctgacctgcaacggcaaggtggaccgcaaggcgctggccgaggcatgaggcatggcgatcatcgatgacgttctacgccgaccccagcttcttcatgctcttggcgctggccgtggcgggcgccgccttcctcggattgcgcgagaagccgatcgcgcgctacggtatggtcgcatcggccgcgttcttggcgtgtttgttctgcaaggatctgccgggtctcgccgtggcggcgttgttcgtggcgacggcgacgctttcgacgcgttgggtgttggccagccctcgctcgaacgggcgcttcgccgtcgcgttcgcgctcatcctgttgccgctcctctcggcgaaggcgggcgcggtgttcgaccagaacctgctgggcttcatgggcgtgtcctacatcacgttcaaggcgctgcaggtgctgttcgaggtgcgcgacggcgtcatcgaggagctgggcctgttcgactacctgtacttcctgctgttctttccggtgttcacctcgggccccatcgaccgttcgcgccgattcgccgaggatgcgcgcaaggtgcgctcgtgcgacgagtacgcgggcctcttggcgcggggcatcctgctgcttctggtcgggctcgtgtacaccttcgtcatagccgtctggctgcaccgcttctatgcgccgacagcttggggaacggggcctttcctcgccgagctgggcgtgcaggtgcgaacggcgtacgtgtacgggctgtacctgttcttcgacttcgcgggctacagcctcatggccatgggcgccagctactgtttcggaatccggacgccgcgcaacttccgcgcgccgttcgcggccgtggatatcaaggacttctggaaccggtggaacatcacgctgtcgttctggctgcgcgacttcgtgttcatgcggttctcgcgcttggcgctgaggcgccgttggttcgacagccggctggccgtcgcatgctggggcttcgtgttcgacatggcccttatgggcgcttggcatggcctcacggtcaactacttgctgtacggcctgtttcacggcctgctgctagccggcaacgaagcgtttcagaagaagtcgaagttctacaagtcccataggaaggcccccgcgttcaaggcgctgtcctggttcgtcacgctgcagttggtgatgttcgggttcgcgctgttctcggggcagatcgcgatgctcgtgaaaggagcgttcaatggctgatatgacgtacgaggagcttgaggagaagatgctggacatcctcgaagaggtgtgcggcgacgacgaggtgcgcacgaaccgcgacgaggacctgttcgcgctggggctgctggactccatgggagccatcgagcttttggtggatatcgaggacgtcttcggagtgtacattgcccccacggaggtggagcgcgacgagatgaacacggtgaacctcatcatccaccaggtggagatcagactgtagcgatatggcgaagcgctcgaacataccgggggcagcgcccgcgtccaaacgggcgcgaaccggcgtgcgtctgctgcgcggcgtgctcgcggggctgttggccgccgcgctcgggttggcgggcgtctgcgcgatgctgcctgcacagaccgcctacgatccggcacgcctctacgattacgtgtactcgggcacgaagtcgcagagcgtgcccttcaccacggcgtcgatgagcgacgacggccatcttgcgttcggctcgtcggagttcttcatctcgaaggacaaggtggcgcaatgcccgcaggcggtgttcggcgagaacgtgacgggcgtcgatctgacctacgtgggcgaggcgtacgaccagagcctgtggcaggcaatcgccgcaggcgcgtacgccggcgaagcgaagaacaagaaggtgatgatcgtcgtgtcgccccagtggttcttcaaagggaacggcgaccagggcaagttcgcttcgaagttctcctacgagctgtaccgccggttcgcgaacaacccgagcatctccggtgagacgaaggcctacgtgcgctcgcgcgtggaggcgctgggcgtggacgcgaagaccacggcggccgccaaccgcgacaccgtgctggacgcagcgaacgacgcggccacggcgttcgccgacgacctgcgcacgcgcagccggcttccgggcatcatcgcgggcgcgccgctcaaaagcaccgtccgcgccgcgggcacgtccaccggcgagccggattggaacgcgctgctgaagcaggcggatgcatcgggcgacgccgcctgcaccacgaacgacttcggcatatacgacgcgtactggcagaagaactcgggctatcacgtggagcgcgggcagaacttctcgcaggctgacgaagagtacgccgatctcgcctgcttcctgcgcgtgtgccgcgaggcagggctcgagccgctcgtgaccatccttccggtgcatggtgcctggtacgaccgcgagggcgttgcacacgccgagcgccaggcgtactacgagcgcatccgcgggctgtgcgacgacgccggggccgcctacgccgacttctctagctgcgaatacgagaagtacttcctgtgcgacacggtgcatcccggctggcgcggttgggtgcgcatagagcaggcgttctacgacttcgtccacgatcgcgacgacgcgtttctcggcggcggccggttcggtgcggccgagggactggacgcggcgggaaacgcgggcgcttcgctggccggcgtgggcggaaacgccggggacggcggctcgggcgggagcgcatcgtgatggcgcgcgcgagaaggctggctgccgcggcgcgcgctgcggcggaggcgcgcccggcgctgctcggcgcggcggccgcgctggcggtggttgcgctggcgctggcgctggggtggttcgtggtcttctcggggctgagcgagccggtgcagttcgtgtacagcagcttctagcatgggacgccggagcgaaagaccgacgtgcggtatcgtcgcggccgcggtggcggcggctttggccgcatgcgcgcttctgctgccgtcctgcgcgtcgggggaggcgaccgtcctgccgcttgcaggcggcgaggcggccgtgtcggaggacggcgcggcgagcgaggccgagtccggaggtgcgaccgaggcgaaggcttcggacgacccggaggatcccggcgacgcggaggcgtccgccgccgatctcgacgaggccgacgaaggggcgtctcccgaagggctcgagcctacgggcgatgagctggccgcgcgcatggacgcctacttggccgcgaacttcccgcgagcgggtgcgcccgggctggcggtagcggtggtggatgccggcggcgtgcgctacctgcgcacgttcggcgactgccccgacgcggacgcgcctttcgtcgtgggctctctcagcaaatcgttcacggcggtggccgtcatgcagctggttgagcagggcgcggtggatctggacgcgcccgcgtcgcgctacgccccgggctacgacgtgcccgacgaggtgaccgtgcgcagcctgctcaaccaaacgagcgggttcggcgcctacgattcgctcgcggaagccgccgacggcgagctgggagagacgttcggggcgttctcgtacgcgaacgcgaactacgacctgctggggcgcgtggtggaaggagcctcgggcgaggactacgctcgttacctggatgagcacgtgctggagccgctcggcatggcttcgacgacggccgatccggcgcgagcggaggcgctcggcatggtgccgggccatcgcgactggttcgggctgcctgtggccgatgggttccggcatgcccaaggcgacggcgcatggggcggtcccgcgtcgggctacgtggcttccagcgtgcgggatatggcctcctacctgcggatgtatctaaacggcggcatgggcggcgacggcgcgcgcgtgctgtccgccgacagcgtgcggcgcatgttcctcgaccgcgttcccgaccccgagggcgatacgtattacggcatgggctggacgtcgttctcgtgggacgacggcgagcttgtgctgtcccacgacgggcaggtggagaactacactgccagcatgtgcctgctgcccgagcgcggcatcggcatcgtggcgctgagcgacgccaacgacaacgcgggcggcaacatccggttcttcgacctggtcggcggggtggtgtcggtcgccatcggcgggacggggcagccgatggacgatgcgtggacatgggcgtggcgccaacgcgtcgacgtgctgtacgcgagcgccctgcttctcgccgtctcgccgttgctgctgacgggtcggtggcggcgccggctttccgcagcgtgcaggggaggcgtcgcgccgatcgtacgcgcccggtcgctgcgcatgctgctcgtgcgaggcgtcttgctgcacgtcgcgctccccgcttgcatcctggcgcttcctttcgtctggggcgttccgtggcgcgacctgctgacgttctcccccgacgtgtcgacggtgcttctggcgagcgcggggctgctcgtcgtcgcaggcgcggtgaggctggcggcggccgtaacgcttcgaaacgacgagccgccgccttcgatcatgcggtaagatagctcccctacgacgtgcgggcgcgcgacgcgcccgcacgctgatcgatggaaaggggagtcgtggagatactggcggtcatggcggcgggcgtgctcgtaggggcgacggtgtttcctgcacggctcaaagggctgaacgagaagctgacgctcgcggccactggactgctcattttctcgatgggggtgctgctcgccggacgcgattcgtttctggaggagctgggccaggtgggatgggccagcatcctgttctgcctcgtgccggtggcgttctcgacgatcgccgtgtacgcgctgacgaacctgttcatgtccgacatcgcccggcgtccggcgggccggcatgtgtctgcggcgcaggacgatgccgagggcggcgcggatgcgcgcggcgaggccgtcatgatcggcgtggcggtgggagctctctcgctgggagcggcgtacggcctctcgggcgtctcgctcgcgccggtcgaccttgtggccgatcattcggaagccgtcctctacgcgctcatgttcttcgtgggcatcagcgtgggcggcagccgcggcctcttgggcaagctgcgccagtaccatgtgcgcgtgctcatcatcccggccggcatagtggccggatccgtgctcggcgggctcgtctgcgcgccgctcgcgggcatgtcgctgcccacgggcgccgccgtggcgtcgggcctgggatggtacagcctggcgggcgtcatgatgaccgacatcgccggagcgcaggtaggcagcatcacgttcctggcgaacctgctgcgcgagctcgtgtcgttcttcagcatcccctggatcgccaagcatctcaactatcccacgtgcatcgcgccggccggcgccacaagcgaggacaccacgctgcccatgctcatccgctgcacgaacggcgagaccgtcgtgctctcggtgctgaacggcgtcatctgctccgcgctggtccccgtgctgatcgaggcgttccatcaattcatgtagggagcggcggttttttcgtgcgccgaatgcttcgcgcgaaacatttgttcgggaacatctgtgcgttttctggtatactgaaccctatggaacaaatgatcgacatgcaagcggaaaaccgacacggccttctcggggacgatgcgccgcgcttgaacgcggcgcagcgcgaggccgtcacggctaccgaggggtacgtgcgcgtgatcgccggggccggcacgggcaagacgctggcgctcgcgcaccgcttcgcctacctggtgaacgagctgggcatcatgcccggcaacgtcctgtgcgccacgttcacgaacaaggcggcaggcgagatgcgccgccgcatccggcgtcttacgggcgacaacgacaccggctacatcaacacgttccacggcttctgcgtgtcggtgctgcaggaggacggccatgcgctgcagtacccgaagagctttctcgtgctggacaacgccgacatcgatgccatgctgcaggttatctacgaggagcgcgggctcaccctgcgggacatgacgttctcgaaggcgcgcgacatgatcgagatcatgaaactgaaagagcgcccgggatactaccgcgacatgctggccatgccgctcgaaggcctgaggcagaagtacctcgacgcgacggacgcgcgcgacatcatcttctacggctacctctaccaggagaagaagtgcttcgggctggactacaacgatctcatcgtgttcgtgctgtacctgttcgagcagaaccccgacatccggctcaaatggcagaagcggctcgagtacatcatggtggacgagttccaggacatcgacggcctgcagcacgagctcatggaggtgctggccggctaccacaagaacctgttcgtggtgggcgaccccgaccagaccatctacacctggcgcggggctgacgtgcgctacctgctggacttcgacaagcggttccccggcacgcgcaccgtcatgatgttggaaaactaccggtcggcgccgcgcgtggtggccgtcgcgaactcgctgatcgagaagaaccgcgagcgcgtgccgaagcggctggcggccatgcgctcggttcacggccccacggtgtggcgccatgccaagagcccggacggcgaggccgcgtggatcgcccagggcgcccttgcgctgcacggcgagggcgtggcgtaccgcgacatggcggtgctctaccgcgcccattacgcgtcgcggcccgtggaagaggcgcttttgcgcgcggaggtaccgcatgcggtgtacagcggcgtgccgttcttcggccgccgcgagatcaaggacgcgctgtcgtacctgcgcctcgtcgcctaccaggacgacctcgacttcgcgcgcgtggcgaatgcgcccaagcgcaacctgggtgcccggcgcatggcgtttctgcgcgagaaggccgacgagctgggatgcagcctgttcgaggcgctcgagcgcttcgtggacgacgatctgttcaagcgcacgaaggcgcgccagctgctgcagctggtcgaccgcttccgctcgtcgtacgagggccggccggtgtccgaggttctggcggccgtgctgtcggaaagcggctacgagcgcgcgctgcgcaccgagggcagccaggagcggctcgacaacctggccgagctaaaacaatccgtatacgagttcgagacgacgtgcggggaggaagtgacgcttgagcactacctggcgcacacggccctgctcacgaacgccgacgcgatggacgacgcgcaggacaaggtgcggctcatgaccgtccatgcggccaagggcctcgagttcgcgcacgtgttcctctgctcgatgaccgagggcgtgctcccgtcgcgcaagaccgacacgccgcaaggcatggaggaggagcggcggctggcgttcgtggccatgacgcgtgcgcgcgacgggctgtacctcaccgaggcggaagggcgcggccacgagggcgcgccgcgctatccctcgcgcttcctgctggacatcgacccggcggcgctcgagttctcgaacaagcccgccgagcgcgagctcgacgacgcgcgcgcagcctacgcgctcgccgaccggtggatcgccgacctcgtccgcgacgcgcgcttcgcggtgggcgaccgcgtgacgcatgcggcgttcggctccgggcgcgtgctggcggtcgattcccagaagcgcgcctacgaggtggcgttcgacgatctggacacgccgcgcaccatctcgttcaaagccaagctcgagcaagcctgacgaacctcttccgctccgagctccttcgcgctcggcgcccaagcgctcgcgacatacgcggttcgcgtcctgcgctgcctcgtcgagggcctgcttctgcacccgagccccgaatcctgctcggcggtccgcatcgtacgcctggtgccatcatccgtttcgctgcagccattcgctcttctgcaagatgtttcacgtgaaacattcgttcgctcatagcccaggcgggggcgcggacgaggtactgcggggcagggtggcgcctgccgcgggctgtccgcgccccgcgcggctgcgagcgctccgccagcgctggttttcgggccggttctgcaagtttttcgacttcgtggcaagcagcttccgaggaccggcttattcaccgggcgttttgcgtctacatcgggaaggagcgaccgggcatcgagaggcgccgaggctaaacccctggtcgcgaatgacgtcctttgccacgaagtcgaaaaacttgcacgggcggccctgtttcccgcttccgcagccttcgctcccgtgcgatccggtcaaaactacctcggacgccgccgcagcccgtcgcctccggccggagggagggggcgcggcatgatcggggattatacgttaaatggggagtcggagcattcgttcgcatgctatactgtcagcatcgaaaggggggaggcatgcggcagatcgccatgatcgggtttgctctggcgacggtctcggtgctgctcgccgggtgtgcggcggggtcgtcccaggagcctctgtacaccacggtcgacacgccgtactacgacgtcatgctgccgacgtcgctcttttcgtcgtttgcggtcgattatgacgactcgtaccgtttggatggggacacgggggagggcatcgggttctgcgtttccgtgtgcgacgagggctcaggagagccgctctggtacgtcctgtgcgccacgtcttcgtacggtcccgaccctggctttccgcgcacggtggacaaaggcgctccttctgcatggcccgcagcgcacgtgtacgtgtcgcagccgatcttcccgattgacgctcccgaccgcgtagccgtctacgcccgctacgtcgccgtgaagtagtagcactgccgagggcgtttcacgtgaagcacccgttcgtatgtatcacaagttgccgcatccggattgccgataggggaacgccctgccgttttccgaccggattcttcggcggcgcgctcggcgaaaaaagccttccgcatccgtctcttttgcaaaccgcgtggagcgaatctgcgctcaggggaacgcttgtgcggtttgctatactggccgcatggacgatctcaacgaaaccactcaaagcaagcgcccgctcgacgaagggcttctcgcattcgacggggctcctgcgcccgctgacgcttccgcatccgacgacgctcccgcgcctggcgacgggtcggctgcgtcggacgccgcgctcggcatgcccgatgcgggcggcgtcgagcgcctgacgggcgacgcctcgctcgatgcgggggagcttcgcgacgacgagcgcctcgaacgggaaggtcgccgccggccatcgctcgaacgtgccgcgcgcgagcacgacgcccacgccgcgcgcgccgaaaccggccagcgcgccaagctcgagcgcatcaaggaagagctgaacagcgtgcccacgctgccgggagtgtacctttggaaggacaaatccggccaggtcatctacgtgggcaaggccaagcagctgcgcgcccgcatgcgccagtacgtgaacttccaggacgagcgcgcgaagatccctttgctggtcgaccagatcgacagcttcgactacatcgtggtggagaacgagcacgagtcgctcgtgctggagaagaacctcatcaaccagcacgcgccgttcttcaacgccgacttcaaggacgacaagtcctacccgttcatcgcgctcacgaagggcgatgtgttccccgccatcaagtacacgcgcgagaagcaccgcgcggacaccaagtacttcggcccctacaccgacagccgcgccgcccgcgacatggtggacatcgcccggcgcgtcgtgcccctgtgcgccacgtcgtgcgccgactggcgccagctcaagcgccgtttggagaaggatccgctcgcgctcatgtcgcacgatgcccgcccgtgcttcgacgcgcacgtgggcctgggccccggcgcctgctgcggcggcatcacgcccgaggactaccgcgtccacgtcaagcgcatcgagcgcttcctgtcgggccagcaccgcgagttcgtcgacgagctgcaggccgagatgcaggaggcggcggccgagctggacttcgagcgcgccgcgcgcatcaaggcgcgcatcgacaccatcaacagcctcaccgacaagcagcatgcggtgtcaacgcgcaacctcgacgccgacgtcgtgggcctgttccgcgaggagacggtggccggggtgcacgtgttcatggtgcgcgaagggcgcatcatcaactccaacgagttcgtgctcgaccgcggcaaggacgtgcccgacgacgacctcctgcacatgttcctgctgcgctactacgatgccaccacgtccatcccgcacgaggtcatcctgcgcgacgagcccgaggacaaggctgccatggaggcatggctcaccgaaaagctggccagcccctacggggcgaaggtgcgcatcaccgcgccgcagaagggcgagaaggccgagctcgtgggcatggccgagacgaacgcgaagcacacgctcatgcgctacaaggtgcgcacgaactacgacgacaagcgcatcaacaacgcgcttctgcagctggagagcgcactggctctggacgagccgcccatgcgcatcgagtgcttcgacatctccaccatccacggctcctacacggtggcctcgatggtggtgttcacgaacggcaagcccgacaagaaccagtaccgccgcttcaagatcaagacgccgctcgacgaggcgaacgacttcctgtccatgcaggaggtcatgagccgccgctacgcgcccgagcgcatggccgacgagcgcttcggcagcaagcccgacctcatcattctcgacggcggcaagccgcagctgtcggcggcgctcgagatgttcgagcggatgggcatcgacgacatcgctatgtgcggtctggccaagcgcgacgaggagctgttcgtgccctggcaggacacgggcccggtggtgctgcccagcggctcggcgtcgctgtacctcgtgaagcaggtccgcgacgaggcgcaccgcttcgccatcacgttccaccgcgagctgcgcggcaagggcatgacggcctccatcctcgacgacgtgacgggcatggggccggtgcgcaagaaggcgctgctgaaggcgttcaagtcgttcaagaacctgaagagcgccacgctcgaagagatcaaggaggcgcgcgtcgtccccgtcgaggtggccgaggagctgtaccgggtgctgcagcagtataatagggagcggaaagacgagcgcgtggtgggcggcgaggccggagaggccgtctgcccgcccgcaggcgagggcccggcggcggtcgaatccgccgcggtggacgcggcggtcgaggctgccgtgcagggcgaacgcacgcgcacggatacggaaggatagcgctatgagcgaagaaaccgcaggcaagacggcagaccagtccgtcgatctgcagcatatgcccgagctggtcatcgtcaccggcatgagcggcgccgggcgcaccgaggccatgcactcgttcgaggatctcggctacttctgcgtggacaacctgccgtccagcctgatcggcaatcttttggagctgaccggcatgcccggccagcccgacgagaagcgccgcctcgccgtggtgtgcgacgcgcgcaaccgcgacttcttcgcgagcctcgccggcgagctcaagaagttgaagggcctgggcatcgactaccgcatcctgttcttggacgccgccgacgagaagctcgtcgcgcgctacaagtccagccgacgccgccatccgctgtgcgccgacggcgcgtccatcgcgcagggcatcgagcgcgagcgcgaccttctgtttgaggtgcgggagaacgcccatcacgtcatcgacaccacgtccatgctgccgccgcagctgcgctcgaccatccgcgcgctgttcgcgccgggcgaggagcgcgcgggcctgtccgtcaccgtgtactcgttcggcttcaagcacggagcgccgcttgacgccgacctggtcatggacgtgcgcttcctgccgaacccctactacgaaccgcagctgcgcagcctcacgggcctcgacaagccggtcagcgacttcgtgctgtaccgccccgagaccgaagagttccaggagaagtggcgcgcgcttctggattgcgtcatgcccggctacgtggccgagggcaaacagcagctggccatcgccgtgggatgcacgggcggccagcaccgcagcgtcgcgctggccgagtccacggccgactacctcaaggcgaagggctaccgcgtgagcatcgcgcaccgcgacctgtcgctggctgagggcgccgacgcctcggcgcgctccggcgccgctgcaggccggtaggggagcgaccatggttgcccgtccgttctcccacgacccctcggctacggcggcgttcgccgcactgcgcgaatcgcagcccgtcgtcgcgcgcgacgagcgcttgcgcgtcgtcgtcatcggcggcggcaccggcgcgcccgtgtccatacgcacgctcctgtccatgggactggatacgagcgccgtcgtcgccatggccgacgacggcggctccaccggcatcctgcgcgaggaagccgacgtcacgccgccgggcgacgtgcgcaagtgcatcgccgcaatggctgcggacccgaacgaccctttgaccaaggcgttcaagtaccgcttctcgttcgctcgcaaccacacgttgggcaacctcatgctgtctgcgctcgaggatgcggccgggtcgtttcccgaggccatctccatctgcgagcggctgctggatgcgcgggggcacgtgtatccctccacgctcgatcgcgtgacgctcacggctcgcacgcgcgacggccgctccctcgaggggcaggccgtggcctgccattcgcgcacggcgctcgagcgggtgggcctgcgcgccgcgcacgaggtggtgccctaccagccggcgctcgaggctatccgcgaggccgacctcatcgttctgggcccgggctcgctgttcacgtccatcatcccgaacctgctcgtgcccggcgtggtggatgcgatccgcgcgtcgaagggttccacgctgttcgtgtgctcgcttgccgacatgcagggggagacctggggtctcaccgcgcgcgagcacgtggaggcgctcatggaccacggcacgcgcgggctgctggattacgtgctggtgcataccccggtctcgctgcgccccgacagcccggccacgggcgtgttcaccgctgtgacgggtgccgactcggagcacgcctccactgccgacctcgacgatctcgtgctgtccggacgcatccgccccgtgcgcgtatgctaccaggacgtgcaggccatccaggcgcaggggccggtggtcattgcgcgcaacctcgtcgatcccattcatccaacctggcacgatcctgctgccttgcgcgatgcgtttgcgggggtgttgaagctatgtcgttcacggcggaggtaaaggacgagctggctcgcgtccctcccacgtgctcgcactgcgagaaggcgacgctggccgcgctcgtgcgcatcgaaggaacgctgttcttcagcggccagggaaagtaccgcatcgagatagcaaccgacgtgccgtccgtggcgcgcctcatcatcaagctgctgcacgagctgtaccatctcgagacgaacctcacggtgcgccgcagcgtgctgcacaagaccccgaactacctcattgaggctccttcgcagccccgcctcgcgccggctctcgtcgacatgggggttctctcgcccgatggaggcttggagcttggcctcaagcccgacctcgtggagaagcagtgctgcacggcggcctacctgcgcggcgcgttcctcggcagcggcttcgtgtccgacccgcgcggcgacttccacttcgagatcaccgtggagagcgaggacctggccggaggcctggtcgacctgctcgaccgcaaaggcatccgcgcgcgcgtcatgcagcgacgcagctcctacatggtgtaccttaaaagcggcagcgccatcctggagttcctcgcgttcgccggcgcgcatcagagcgcgctcgccatggagaacgcgcgcgtcatcaagagcgtgcgcaacgacgtgaaccgcatgacgaacgccgagatcgcgaaccaggccaaggccgcgaacgcctcggtcgaccagctgtacgccatccgcgtggtgctcgaggcgcacggcatggagaacctgccgccggcgctgcaggacttcatcaagctgcgcgtgacctaccccgacgccacgctcaaggagctgggcgagcgcgcgaacccgcccttgtcgaagtccgccgtgtaccaccgcgtacgccgcatcgagcagatggcgaaggaggcgcaaggctaggaggcttcagccggaagacggagacgctcggcgcaggatgcgctagctctcgagcggccccaggaagaacatcgtgaacgtggactcggccacgagcctgccgcgctcgtcgacgatggcgcagtgcgccaccgacgtgctgcggcccttgtgcgaggtgtcggcgctcacggtgaggcgctgcgggcgtacggcgcggacgaagttcgtcgcgcaggagacggccacgttgctctcgccgtaggcgtacgtcgccatgccggcggcgatttccagcatggtggacacgaagccgccgtggatgcagccgtggtagttcagcacgttgtccggcacgtcgatctcgtagcgcacgctgcccggcgaagaggcgaggatgcggatgccctcgagctccttttgcgccggcacgttgcccatcagcttctccacggtttcctgcggtactgcttccatgctgctccttcggtcggacgtgcgtctacgggcaccttaccgcagccgtcggctgtgcgacacggacggatcgggcgaactggccgatgctgggagaagcgcgctgctgtacggcgcgcaccgggtgcggagcccctcggcgagcggtgtgaaacttctgtgaatggcctgttcggttgctttttttatacggctgccagataaggcttgcagcatctgggcggctaccgctatgatcggggcgttcctgcaattcttagtgcgagtatctgaaaggggatacgcatggcaatcaaagtaggcattaacggattcggtcgcatcggccgcctggcgttccgcgcgatggtgaacgatcccgagatcgaggttgtggcagtgaacgacctcggcgacattccgacgatggcccacctgctcaagtacgattccatccacgggcgcgccttcgacacggtcgaggtcaccgaggacggcttcgtggccgacggccatgcggtcaaggtgttctccgagcgcgagcccgccaacctcccctggggcgagctgggcgtcgacgtcgtcgtggagtccacgggcttcttcaccgacggcacgaaggccaaggcgcaccttgacgcgggcgccaagaaggtcgtcatctccgcgccggccaagaacgaggacatcaccatcgtcatgggcgtgaacgacgaccagtacgatcccgagaagcacaacatcatctcgaatgcctcgtgcacgacgaactgcctggcccccttcgcgaaggtgctcatggacaacttcggcatcaagcgcggctacatgaacacgatccactcctacacgaacgaccagaagatcctcgaccttccccataaggacctgcgtcgcgcccgcgcggccgccatgtcgatgatccccaccaccacgggcgccgcccgcgcggtgtcgctggtgctgcccgagctcaagggcaagctggacggcttcgccacccgcgttcccacgccggacggatcgatggtcgacctcaccgtggagcttgagaaggacgccacggccgatgagatcaacgccgcgatgaaggccgccgccgagggcccgctcaagggcatcctggagtacaccgaggatccgatcgtctccatcgacatcgtggataacccgcactcctccattttcgacagcaagctgaccatggtgctgggcggcgagggcaacttcgtcaagtgcatctcctggtacgacaacgagtggggctactcgaaccgtgtgaaggacttggtgaagatccttctttaacagcattccccgaaacgagcctgccttggcaggctcgtttctcgtttagacaggagggccccatggccgagatcaaaaccatcgacgagctggacgcgcgcggcaagcgcgtgctcgtgcgcgtcgacttcaacgtgccggtgaaggacggcgccgtcaccgacgacacgcgcatccgcgcggcgctgcccaccatccagaaactcgtcgacgacggcgcgcgcgtcatcctcatgagccatctcggccgtccggccggcgagggcttcgaggagtcgttcacgctgcgtcccgccgcccagaagctctccgagcttatgggcaagcccgtggtgttcgccaccgacacggtgggcgacgacgcccgcgcgaaagccgcctcgctgcgcgacggcgacgtgctggtggtggagaacctgcgcttcgacaagcgcgagaagaagaacgatcccgcgttctgcgaggaactggccgcgctcggcgaggcgtacgtgaacgacgcgttcggcaccgcgcaccgcgcccatgcgtccacggcgggcgtcgccgcgctcttgccggcgtacgcgggctacctcatgcagcgcgaggtggccacgctctcgggcatgctggaggagccgcgccgtcccttcaccgccatcctcggcggctcgaaggtgtcggacaagatcaaggtcatcgacgcgctcatggacaagtgcgacacgctcatcatcggcggcggcatgtgcttcacgttccttttggcccagggcaaggccgtgggcacctcgctcaaggaagaggactgggtggagcgcgcggcggccatgatcgcgaaggcggaggaacgcggcgtgcagctgctgctgccggtggacgtcgtgtgcgccgaccgcttcgccgaagatgccgaaacgctcacggtctcggtcgacgggattcccggtgatatgatgggcctcgacatcgggcccgagacggcgaagctgtacgccgacgcggtggcccaggccaagaccgtgttctggaacggccccatgggcgtgttcgagatgaaggcgttcgaggccggcacgaaggccgtggccgaggccgtggccgccaacgcggatgcggacaccatcatcggcggcggcgacagcgtggccgccgtgaacaagttcgacctggccgagcagatgacgttcatctccaccggcggcggcgcctccatggagctcgtgcagggcgaggcgctcccgggcgtcgaggcgttgaagtagcaagcaggcgattgccccggacggggacggttcccgtccggggcgtttcgatggaaaggaagttcgcatggcgcgcaaacccatgatggcaggcaactggaagatgaacaacaccatcgccgaggccgtggtgctgacgcaggagatctccaaccagtacgacaaggagacctggggcgaggacgtcgacatcgtcatctgcccgccctacgtcgacctcaagccggccaagaccgtgctcgacttcgacaagacgaaggtggccgtgaacgcccagaacgtgtactgggagccctccggcgcctacaccggagagatctcggtgcccatgatcaaggagatcggctgcgcgggcagcatcgttggccactccgagcgccgcgagctgttcggcgagacgaacgaggacgtgaaccgcaaggtgaaggcgctcgtcgaggcgggcctgtacgccatcgtgtgcgtgggcgagtcgctggccgtgcgcgacgagggcaccaccgaggagttcgtgtgcgcccaggtgcgcgccgcgttcgccggcgtggacgccgccgacgcgcagcgctgcgtggtggcctacgagcccatctgggccatcggcacggggcgcacggccacgcccgagcaggccgaggccgtctgcgccgccatccgcgcgacgctcgccgacctgtacggcgcggaggtcgccgaggagatgcgcgtgctgtacggcggctccatgaacccgggcaacgtcgagggcctcatggcccagccgaacatcgacggcggcctcatcggaggcgccagcctgaaggcggcgtctttcgtgcagctgatcaacgcctgcctgtagccctgtcgccgtcccgggcgagcgaagcgggtcgaagggccttctcgtcaacggaggttcttcgtcgaagcttcgcttcggacggcggatctgagaacctgttgtcccggcggcgcgcactccgcgccgcctcccgtcataccgagcggagcgagcgaagtgagcgcagtcgaagaatcccgtgcggcatcagccgaaaaccttacccttcccgcatgccttatcatcatggacggcttcggcctggccgagccgggcccgggaaacgccatctctcaggcgcgcacgccgtgcctcgacgaggtgttcgccacccgtccgtggaccaagctcgaggcatcgggcgaggccgtgggcctgcccgcggggcagatgggcaactccgaggtgggacacctcaacatcggcgccgggcgcgtggtgttccaggagctcacccgcatcaaccgtgcctgcgccgacggttcgctggcggcgaaccccgtgctgaacgaggcgttcgcggcggccgcacggccgggggcggcgctgcacctcatggggctcgtgtctgacggcggcgtccattcctccaacgagcacctctacgcgctcgcgcgcgctgcgaaggaggccggggcatcgcatatcgtggtgcactgcttcatggacggccgagacgtgccgccgaagagcggtgcgggctatctggacgagctggaaggcgtgctcgccgagctgacggatgagggctgcacggccgaaatcggcagcatctcgggacgctactacgccatggaccgcgacaaccggtgggagcgcgtcgagcaggcgtggcgcgccgttgtggccgccgagccgcgcgcggacgcgacggccgccgaggtcatggccgcttcctacgccgtggacgtcaccgacgagttcgtcgtgcccacggcgctgaccgggcgcggcgtgcgcgacggcgacgcggtcgtgttcttcaacttccgccccgaccgcgcccgcgagatcacgcgcgcgctggtggaccctgccttcgcgggtttcgagcgcggcgcgcgcccgcaggtgagcttcgtgtgcctgaccgagtacgaccccgagatacccgctccggtggcctatcccaaggagttccccgaggaggtgctggccgacgtgctggccgaggcgggccttgcgcagtaccacatcgccgagaccgagaagtacgcccacgtgacgttctttctgaacggcgggcgcgaggagccgaaagcgggggaggagcgcgcgctcatccccagccccaaggttgccacctacgacctgaaacctgagatgagcgagcctgacgtggccgccacgctggccgcggccatcgacgcggacgaggccgacgtgtacatcgtgaacttcgcgaaccccgacatggtggggcatacgggcgtcatcccggccgccgtggccgccatcgaggcggtggatgcgggcgtgtcccaggtgctggccgctctcgagcgcaagggaggcacggcgctcatcacggccgaccacggcaacgccgacaagatgctcgccgaggacggcagccccttcacggcccataccacggcgcctgtgccgttcgcgctcgtggacttcgcggaaacggggcgcacgctcgacggtcggctcggcgcgctctgcgacatcgcgcccacgctgctcgagctcatcggcctcgaagcccctgccgccatgacggggaggagcctgctggcgtaggtggcgttttcgcggggatgaggcgagggggacggggctggcgtcccgctccgtctcgtcccgctacgcgaacgcctgcgccgcccttgccctgacgggagcctttcgctatacttagaaacttgcgtaccgatatacctttgatcgaaagaagagagacgaaccttgaatccgctcctcatcatcacgctcatcctgctcgtcgtttcgggcatcggcctcatcgtgttcatcctgttgcactccggcaagggcacgggcatctccgacatgatcgccagctcggtgtactccacccaaaccggtacgagcatcgtcgagaagaacctcgaccgcatcaccatcgcgttcgcgatcatcttcatgctttcgcttatcgtccttatgatcatctatccccacgggacgattgcaaaatagcgaaaattgccccttcacaacgcagaagggttcgggtagaataacctgcgttgcgtttcgagcaacacgtcggagtggtggaacggcagacacgctagcttgaggtgctagtgcccgtttaagggtgtgcgggttcaaatcccgcctccgacaccagagagaatggagagagccttagggctctcttttcttatacctccgcattgtatatgcggacggagccgctttcggcgaaaggagcgggcgtggcgaaggcgcttgcaacgaagaacccggtatcggagcgcatgcgctccatccggcgcgtgctgtgggtcatcctcgtgctgaacctggcggtggccgctgcgaagtacgtctacggcctgatgagcggatcggcgtccatgcaagccgacggcatccactcggtgttcgactcggctggcaacgtggtgggcctcgtcggcatcgcgttggcggcgcgtccggccgacgacagccatccttacggccatgcgaagttcgagacgtacgcaagcctcgtgatcggcgtgctgctgcttctggcggccttcgaggtgggttcgagcgcggtgggcaagctcgtgtccggcgtgtacacggccgaagtaactcccgtgtcgttcatcgtcatggtgggcaccctcgccgtcaacatcggggtgaccacctacgagcgccggtgcgcgaagcggctcaaaagcgaggtgcttgcggcggatgcgaaccatacgctgtccgacgcgctcgtgtccatcggggtcatcgtcggtctggcggccgtggcgctgggctttcccatggccgaccccatcatggcgctcgtggtgaccgtcgccatcctggccacggcctacgacgtattcaagcacgcgctagccaccctgtccgatcatgcgcgcattcccgacaaggacgtgcgtgccgtggcgatgggcgtgccgggcgtgcaggatgcccatcatatccgcacgcgcggcaccgagggagaggtgtacgccgacctgcacgtgctcgtggcgcccgggatgaccgtgggggaggcccacgagctgtccgagcgggtggagcgcgccatcatgcagcggttcccgaacgtgatcgaggtgctcgtccacatcgagccgaacgacggccatgaggactgagggcgcatgaccgaggcggtgttcttcgacgtgggctcgacgctcatccggccgtgcccgtcggtggccgagacgttcgcgcgcgttgcggccgagcgcggccacgacttgaccgtgcgcgacgtcgagccgcacatgccggccatggacgcgtactacgaggcggagtatctgcgcgacggcgacttctggtgctcgcacgaggggtcgacggccatttggctggaccagtaccgctacgtgtgccatctcgcgggcatcggtcacgatgcggaaggcgtggcgcagacggtgcacgaggcctatcggcgcgcggaatgctgggagacgtacgccgacgtcacagcgtgcctgagagcgctcaaggagcgtggatacgcgctgggagtggtatcgaactgggatgcgggcttggaagggctcctgcgcgacctcaggctgctgccgtacttcgacacggtagtatcttcggcggtggtgggctaccgcaagccgaacccggtcatcttcaacctggcttgcgagcagatgggcgtgcgcgccgaa

SEQ ID NO: 9972 - DNA, 71924 bp, Unknown
  gut microbiota DNA sequence
gttctgcctgccgccgcatttcggcgacttgtatataatagcattccccgttacttctgtcaacacctttttgacaacttttttatgtttttttaattattttgtaagtacttactgatcaatggtttaacgatacatttaccgttgctgtaatccgccataaaaaccactctttccgcaactccagaatacacattatagtcaaacgcttcaataggataattcttacgtatctgcctccaggttgaaaaaatataatccggcaaatattgacgaacctcgtctttatcccgccaaaaggccatagcacgttcatttaattcagctgttttccatcccatccagctgggaagccagttaggctgagaaacaaatacatcaaatcttaatatttcttttacatttgttttttcggaaggataacagtcacatgtaaattcccacaacaattttgttacaccgcgagcattatgtccctgaggatacaagcctctgctttcccaccattctgtcagcttgcgataaaaatcaaatgcagttccgttatttgcctttataagatatgctaaaacgttattaaacttacctgtattgtaggtattttcaaaaacatcttccaaaactttaagaaagcgtaattcttcatatcccatatacttagtctgaacaacctcataaggcggttcactcatatacagcaaaccgtgttcttgagcctgactttgcataaccgtcccctgcagcacttttaaaaatcctaactgcagcatatgcggtctcagtccataaacatcgttaaatgattttataaactcttttagtccttcatatggtaagccagcaattaagtcgaggtgcagatggatattattgttttgcaaaagccgtccgacattatctgctaatttcttccagttattttccctgccgatggcttccaatgtttttgtatttgtgctttgaacaccaatttcgaactgaaaacggccttctggtactgtttccaagaatttcaatgtgttttctgaaagcaaatcagctttaatttcaaaatgaaaggtcgtctctgtatcagccatggataagtaatgcatgataggcagaaaatatgtttcatccaaattatatgtacggtcaacaaattttaccagtggcactttcgcttccataaagtgttctaaatccaacagtactttttcgagcggacgtctgcgaacagaatgagaaataccagataaacagtaggaacactggaaaggacagccccgtgtacattcataataaactattttattttcagcaactatagtttccaaatcagggtatgggaaccccaactctgccagatcttcaacaactgttacaccgccattaatttgcacagcaccatttttatcacgataagcaatgtgcgccggcaccttatcgtcagcattttttaatgcttttaacaattcagaaaagcaaatttctccttcaccctgtacaataaaatctatttcacttttttcgttaaaaattctttctggctcaaaagccacctcaggaccgccaacaactattttcgctgcaggcagtacttttctgactaactctatcaagctgtagacataagttttattccaaatatgcacagaaaatcccacaacttctggcttggctcttgttatctctgccaataccgccaaaagcggagtttgtatggtctcttcgataagcgttacttctattgcgttttttctgcagaattcgtttacataacgcagtcccaatgctgtatgaacatatttactgttaatagctactaaaatacttttcataaaatcacgcctctaacctttcatatgctgtctgtgttataataataaagtattttagattttgcaaggagtgaatttaatttatgactaaaaataacgaacccgagcatggcagtttagtgtcgcgcagtagtatagacagccgttttcaatggaacatcaatgatatttatcccgatcaggaatcctggaaaacagcaagtcagcaatttaaaaaggatgttgacgcttttagtcaatataaaggccaactgcatgactgtcagactttaaaaacggtattgcgggaacaggaaaaactttccatcattatcagtaaattatatgcctatgcaagacttcagcaggatactgataatgccaatcagcaatttcaggctctggtgggcgaagccgaagctttagccgccgctttcagcaatgctgtttcctttgttgagccggagcttttatcattaagtcaggaaaaattaaacgatctattatctgactctgattttagtgattatcgattttatcttaataatttactgcgattatccaaacatgttcttcccaaagagcaggaagaactgctttcattgagccagctggcaacttcaggcccagctgctattttccgcagcttagtcagtgctgatatgcaatttcctctggttaaaaattcagaaggactggatgtaactgtcagcgaaggcaattatttgctcaatatgaccagcaatgacagattactgcgccgtaattctttcaaaggcttaatgactacttaccataaataccgtaatacgctcgccaatacgctttccagcaattgccgtgtcagtgcgttttatgcaactgcccataaatatcatgatactttagaagcctgtctctctgaagataatataccgccaagtttatatgacggtctgattgagaccgttcacgaaaatttaaaacctttacatgagtatatagccctaaaaaaagaaatacttggattggatgaatttcacgcttatgatatttaccagccaatcagcaatgccgccgacagctttgcctgtgattttgatgaagcaaaggtcaaagtaacagcagcgctctcccctttgggctatgattatcaggccgccttacaagagggtttcgataaacagtggatcgatatttacgaaaacaaaggtaaacgaagcggagcttattcatggggaatctacggagtacatccttatgttctgctgaattatcagccccgctataacagtatatctactcttgctcatgaaatgggacatgcactgcatagctatttcagcaataagtcccaaacatatatcaacagtgattattctattttctgcgccgaagtcgcctctaccacaaatgaaatcttacttttagagcataccttaaaaacagcttctccagaacagaaaatctatcttctcaaccaatttctcgaagccgtacggactaccgtttaccgtcaggtacaatttgctgagtttgaaaagttcatccataatgaaatcaacgagggccgtacactgcaggctgaaatgctggaaacctattggttagacagcaacaaacgttattatggccctgctcttactgtagacgcagaattagccagtgaatggtcacgtatccctcatttctataccccattttatgtatataaatatgcaaccggttacagtgcagccaccgcctttgcctcggcaatactcgaaaataaacctaaggcagtagaaaaatatctgcacttccttgcttccggcggcagtgactattctcttaacctgttaaaaacagccggtgtcgatttaacgacccctttgccggtaaccgtaacactgcacaaatttgcagaaaaactacaagaattaaaaactttacttggaaaataacaaaaagaaactccgcttgtttaaataacaggcggagtttcttttctctaaaataaatcaaataaatttagtttttagactcaactctgaacacattttttaattattttacataaaaagccgcataatgaatactactactgctccaatagcagcaaaaatcaaaaatgtaggcagcaaaaagaaaaagatcgctaaaatgccgcctaaaatcaacagcgtcatcaaaataccgcttccgcaaccaaaactatgaacacggatctgcggaccgccgttattttgttcataagctctacgctctgtgcgcatatcttctacgcgggttcctccttctgcattaccatcctgctcaatagtaacgccatcaaaggtatctctttcttcagggcgcagaacctgtacttcggcttcaatactacaatgacaatatggacactcctgcgtgccacgttctaattcttttccgcaaaaactacatttcatagcaaaactcctttttcacgttaggaaagcgccatcagcaaaattccttcttcgttgatgtaacgtggatcgtgtttttctatccccaaagttacccatatttcctttgccatacgcctcattacgtccaaaggaacattgtggcacaactcagcaattttttcatcatcataattgtagacaccatttgtcttgataaaatcaaaaatagctcctgcagcccaaatatcaggcattcttacttctctgcagaacttaaccttaaaatcagaccacaactgtatgaccaatttaatatcgcgttcagcaaaatgatatggctccatcatctgtctgattctcagaataactctgtccttataatctatttccgtaggaagatagtttttatgctcagtttcatagttaaaattattcagatttacaaaagcagaatataaaaataccatatgccgaagcagcatcggatttctggctataaatgcttcccaatccgccgcaggatcctgaatattataccattccttacacgacttcagtgtattaaacagacgtttctgcgctactttgcctattttaagacagcttacataattcattatcatactttcattataaaaaatatggcccagcaaaatagcgtcatttaaatcttccgattcttccagcggcagacttaacgtatatttttctccactcagccagtctgtacaataaaaagcaccgtcatctgtataactgtcaattttaaatatagcaagccttgctttgcataattcttctaaaacatcacggttacgtttggcaaactcttcgtcgtaatcgtcactctcaggcaggcaagtccgttcataaaagaattccaaaggtcttttatcactacgcagcaaatgatagtcaaacaaaaaataatcccaaaagcattcactggtttcttcaatactatcttttttttcatcttcatagcccattaaaataccataatataaaaacgcagctctatcgaggtccaaacgaaaatattctctctcaaaaaacctatgcagtacctcaagcaattcctgcaggcgctctccaatatttaaaaatattttagcaggtatatccggagtcgcattccacgctctttctgcatttgcttcatcaaagcttccatccggtaaaattatattcattttaccttcttgcagcaatatttcagcagcagtaccaggtaccgtatcattagaaatggcatttttacctttcaaatatttaaacaacccgtcacatgtttctaaaaaatcttgtgtattcttataatcaggagtaaactctgaaatatttctgccgcaccaagctatacaatcaataaagtcatccgcattcatatctcccagaaacgtttcagcactgccaagatataaacacagcatcgttaaattatcccaactacgatataaatcactgttttttttgcctttccatgcttccattcgtaaaaagccttcggcatattcttgtctgagcaatgtgttccagccttcatcatgggcataaaaatcttctactaaatcatacacattgtctttttcattattcattaatctaaaatccttctttccctgcaatgctgttattatatcatagcgttccaacgcttttcaattgaacattctgtgacagtaaaaaagctccgatatcaaatatcggagcttttggagtaagcaattcttattcttcaccgattaccaaaacttctggctgcaattcaacaccaacaccagcttttattttggtctgtacgtccttaataagctgtaaaacatcagcagctgtagcaccaccaacattaacaacaaatccagcatgcttagtagaaatctgggcgccacctaccgtataaccctttagcccggcctgatcaatcagagtaccggcaaaatatcctggtggtcgtttaaacatactgcctgcacttggcatttctaacggctgtttactaatacgccggtgactgaaatcatccattttagacttgatttcatctttatcaccggaaggcatttttaaagttacttctgtaacaataagtccactgttctgtaaactggtttttcgataaccaaagttcagctcttcagcagtaagaacacgttcatttccctgtaaatccataacctttacacaattgacaatattctgcatctcaccatcataggcgccagcattcatatacacggcaccgccaatacttccaggaatacctacagcgaattccattccggtctttccgcattccatcgctttatatgaagctaatgccagtgagtaaccagatccaaagaccaacaagtcctctgcttcataaaaatgccgcagcatattccccagctttataacaataccacggatgcccttatcgcgcactaaaacatttgatccattgccaagtaaagtaagaggaacaacagtttccttgaccactttcaaaacttcccgtaattgttcaatggactccggcaaaaccagaatatcagctggtccgccaattttaaaagatgtatgcccactcatcagctcattcaaacgcacagtacaggaaacagaacttttcagttgttcagctaaatccaaaaactctttattcaccagcaacttccttcactacgtctccgatagattttgaaatatcacccatcatcatttgaaaacgcataaaggcatgcagatactccatagcaactgtatttaaccctaaaatgccagtaagcttttgtaatttttcatttttttcttccggaacttcctgtccctgatatttcgctaattctatttcctggctcaattttaaaaattcctcagccatctctttgccttttggatcttgctcaagagcagctttagcttcttttaattttttgtattcctgactttcgcgcatagctttggccaattcatttgcacaatcgtaaacgttcatgctggttcacctcttaattttttttagcttttatattatagcatatctaaattttctgtaaagctttagttcaatccctgcagcggtacatttaaatgactgtaaaacgtatccggttcatattcaaaatgccaccattccatgtcgctgacagaaaagccttccaagctcatcagctgatgcagcaaatcacgctggtaacgttctaactctgttccgcctgtaaacttgctatattgtctgatggacggttcatcaaaatcactgatcatttccactggttcacctgtttcaagataataaaggcttacgtcaacagctctgcctgtattatgagaaaacccctgctccggagttggcagcatttgttttttatcatctgggaacgcgtcataggcaagcttggatacagaccacggtctgtaggcttcccaaataacaaggccataaccataatcagcaagtcttttctgaactcgtcctaaggccacagccgccactctatcaagataagccttcttgacatcaacaatagacattccaaagcaattattggttcctgcataacgcaaatcaagctttatacctgttatagcttttgtaacatcgactaactccgcctgcttgccagtcgtcaacgctgaaggtatagccgcttctgatgcagccttttttaacccctgccaatcagacggctgcggaatacgaaaaggcttttctctgtctggcccaaaaaaggccctactgtaacgattgccgcctattttacacgtaatgccataaccatcaggatcacgttcaaaacgcacactggtttcagtattgttcatcggtcccgcttccagaagagtatatgaatcaaagcgttcctttttcagcggaaactgattgctgtttgcaaatttataatcttcacgggtcgtacggtataaaagttccaattcgccattgcgttcccttataacgaactgctcaccattcccataatacatacccaataggtatttcaaatcctttgggcattctctgggttcaagtaccgcagcctgtacaggcaggctttgtacaacaagtcccgcacataaaagtattgttccaagcagcttttttatcatcgtataagctccttacgcacatcagccaatgcattaagccttgcacgcaccttgtctatataagctaaatcaatgtcacaataaatgatttcctctgcactgccaccttcagctataatttttcccataggatctactaccatcgaatgtccgaaaaaaggagcccctttaaaattaccgacacaattaacagcaacaatatagttatgattttctgccccgcgggcctgtgacagtaaagtccaaatatccccccgggccgacggccattctgcaggcacaaaaattatttttgctccctgaagtgataaatgcctgtacaattcaggaaatcgcagatcataacaaatagtagaaccacaaataactccgttcaactcataagtatcaaaattatcaccagcagcaaaaaaacgttcttcattaaataaaccaaaaagatgtactttgctgtaagacgctacaacactgccctgtttatcaataactacggtattattataaatttttccatctttatgacgcaaaggaatagaccctgcaactactgcacagtgatgatcattggcaatctttcgtactgcagcaatcgtactcccatctatagtttcggcttcttcttcaattcgtcctaaagaataccctgtggtccaaatttcaggcaatacggcaatgtcgctgttagcagcagcctcctgcagtaagtcaagcccatgtacaatattcccaggcgtgtttttctctgctatttccatttggatcaatgcaactttcattttctttcctccggcaataagccctgtgcatctaacctgcgcaccagcattttttctatttgccttgtaattcttgtcattggaaattccttcccctgtaacgaacgtacccaaagcacagtaaaccccatccgttttgctcccaacacatcagttaaaagctgatcaccaatgactaacactttaccctgctgcctaccaaaacgtttaagagctcttttaaacccccaaggcattggctttactgcccagcttactgcttcaatctgagcagcttcgctgattttccgcagtctttctccaccattattagaaagcaacactatttcaatttcatttttgcgaagtaattgcagccaattcagtacatctgcatccagctgtacttcatcacgcggcagtaaagtattatcaacatctaaaataactctttctacctgttgctttttcagccattcaaccggaatcgacgcaatactgtcaaagcgaaaatccgggcaaaaaatttttaacataaaacgactttctccttcggaaaggtaacttcaaatcgtgtaccgacacccgggatactaaacacctgtgctttagccccgtggacacggataatttccttggcaatcgcaagtccaagccctgttccaggtacattacggcaatgagatttatccactttataaaatcgttcccaaataaacggcagatcctcttctggaatacccggtccctgatctgccactgaaagcagcacactgccatcttcttgccttactgcagtaaaagaaatagtgccattatccggagaatatttcagagcattgtcacccaagatcataataagctgtacaagttggtcgccattacctactacagcgatattttcatctgcatgaataaccaatgtcacatgtcgtttaaccgatttaaccatcagcttttctgtgacatttcgcacaatttctgctaacggtaaaggctctattcctgtcgtcagctcatcactggcctgaaaacggcttatattgagaagttccctgatcatgcgttctaacctgatagtttcttcatttatcaaagcacgatagcgctggatcatttctttatctgtaatagtaccatcgctgatagcctcattataaccacgaataatagttataggagtccttaattcatgcgaaacattagcaacgaaatcacggcggattttttcagttcgctctgtcttatcaacaaaagcactgaggtcattaccaagtgcattcaaagccctgcctaaagcagccacctcatcttcgccatgtacttctaccttacgtgtatagtcgccggaagctatagcagccgcactgtctttcattgatatcaaaggcctgataatagaacgtgataatctcctgaccataaataagcttaaaataagcgccagtacacctacgatcgaagtatatatatatatatcacgcagaaaactatcgaaaccgctcagcggctctgccagcaaaatagctccatgtgccccatcctgtttaccatacggcacaccaaccagcataacctgttctttataatacggatggaaaatctgtgattttaccgatttaccactgtaaacatctttcaagatactgcgtactttagtagataaattgccgccttttatctcttttcctaagagttcggttccctctttcgaattataattgcggatcaacttgttaccatctgcatcttcatcagtattaaccaaagaagcagccaaaagatcatatttattgtcaaaaagccaaatacgtgctccaaccagcctgtctacagcaactatatagcggtgcagcgttgttcgatcagtatcacgcagcataaaatattcaatggtttcagccatttcattacctttttgcgccagctcctgctctttaatcttaaaaaaatagtcggcgataaggtaagaaatacccgctgtcacgccgactacaataactacgatcaaagccatgaagctgtacataagccgggtacttaaagacttattcactcttcacctcaaatttataaccaacaccccaaatagtggtaatatcccatttagaattttctggaatgtttagtttttggcgaatacgtttgatgtgcgtatccacagttcgtgtatcaccataataagaataaccccaaatggtttccaacagctggtttcgagaaaaagccttaccaggattggttgccaagcaccagagtaattccatttctttagcagtaaaggtcattttctgaccaaaagcaaccacctgatactcttccatatcaattgtcaacccgtcatattctacccgcgaacgaccttcctgtttttcctgggctccagcacgtcgcagaaccgcttttatacgggcaactacctcacggctattaaaaggcttcgtaatataatcatccgcaccgatctccaaccctaaaatacgatcatcatcttcatctttagccgtcagcataataataggtagatcagacattttgcgtacttgcttgcaaacctccaaaccgtccatgactggcatcataatatccaaaataagaatatccggcttctcagattgtacttttaaaatcgcctcggcaccatcagctgcttcgataacatcaaagccttctttttcgcaatacatcttaagaatctcgcgaatatgcttttcgtcgtcggcaattaaaactttttgaatatccatactaatcacctcataactattcttgcttattattatacaatagttttctttaaaaagcctgtttttatactgctttcacaaaaatattacaacttaaacagatttatgacaaataaatacattttcagtctcgtttttctcataaaaaaagcagacaagaaaacttgtctgctgaaagttatatttttataaaacgcggcaggctccgtaataacgttcgccccagtaacctgtgaacgcatcagccacaaccacgcctgtgctggtgccggcatggataaatttgccatcgccaagataaataccgcaatgagaagcacctggttcataggtagaaaagaaaatcaaatctcccggacgcagttcgctcatggaaatctgacggccataatataactggctgtcagccatacggggaatgctgattcctgcacgtgcaaaagcatattgagtaaaacctgaacaatcaaagccataagtactggtaccgccaaaaacataaggcgttcccagaacgctgtatgctgctcgaatgacattacgcactgcagcactgcgaccggaacgattaggaggcatgtctttctgcatcaatgcacgataagtatcattgccgataattccgtctacctccaaacttttatctgtttggaactgctttacagcagcttctgtttcaggaccaaatttaccgtcaacattagatactttatattgtaattctaccagacgtttttgaatatcaatgacttcttgcccttcgtcaccacgttcaaaagacgccaaggcagtcgcaatgttcataaaacaaaacatcattgtcaatactacacataacagcttttttttcagcaagcaccgcacatcctttctcaactgtaaataattataacataaacttacaatattgtaaaactatcttacttttttccgagatgacgtcctacaagatacagcggtctctgcttaacttcttcaaaaacacgtccgatatactctcccaaaataccaatgcctactaattgaatacctcccaaaaacaagacactggcggtcattgtcgcccaacctggtacagcatcgtcaataacatatttaacatagaaaacatgccccaaaaccatcaggctgcaaagcccgcagaacacgccgcagtaaaaggcccagcgcaatggcagatttgaaaaagaagtaatcccatccaatgcaaaatgcagcattttacgcagactgtactttgattgtcccgcaaaacgcggcggagccacaaattcaaccttagcgaccttaaatcctaaggtattgataagccctctgataaagcgcgctctttcacgatacagacgaaaagcctccacagctttttggtccataagcctgaaatcgctgcctccgggagtgatttccactttagacatgatattgatgagtttgtagtaaactgctgacgaaaaacgtttcataaacgaaacattctctgtacttaggcggatcgtctggacaatttcatttccatcttcccacagcctcagtaagtccggaactaattcaggcggatgctgcaaatctccatccattgtaataacagcatcaccatcagcataatccaacccgcaggtcagtgccagctgatgtccgtaattacgagaaagcaaataagcctgtacgcgctcatcattgcggaccaattccgccaaaatcacagcactgctgtctttagaaccatcgtcaacaaaagtaagatcgtattcgtatggcagtgccgacataatatctgtcagccgttggtaaaattccctgagattggcctcttcattaaaaacaggcacgacaaaagaaatatgtttcattaatttaccctcaccgtcaatttagaatacttttatattatatcactattttgaaattaaaatgaagtgattatgtgaatttttagaaaaaagaaaagctgcctgaaacaggcagcttaatatccaagaatacgagtgctcaataagccgagttctgttccgcaaagcggtgatgatcatttatctaggcctgtaattactcgcaggctccagcgacacaacccggaaggttcagcgggccgcttcatccctcccctatttggtcttgctccgaatggggtttacctagccggccggttacccgaccgctggtgcgctcttaccgcaccgttccacccttacctgcatagcaggcggtacacatttctgtggcactatccctgaggtcaccctcgccggacgttatccggcattctgccctgtggagctcggactttcctcgttaacgcctaagcatcaccgcgatcatctttcacactcatatcgtttgttaatttaacacatagagattatttagtcaagcttcatgcaataaaaaacgctgcagcattttattgtattcccaaggattttttccttcatttttactgaactgattcataatcgcatcaatttcatcagcataatgcacaataaagctttctttcgttgcacatgcaaccggcgaacctttttcctgttcaccatggtgtgataaaacaatatgcaacagctgctgcagcttaggtcctgttacttttgccttgccagctgcctcctgcaccatcaccgccgacatagacacatgccccagcaatcttccttccatcgtatatggaaatcctatatccgaagaaatttctctaagcttgccaatatcatgcagcaatgctcctgcaacgatcaaatccttatccacgccaccaatacgatctgccaacgactgagcaataccggcaacatcaacagaatgctgcagcaaacctccgatataagcatgatgtaaacgcattcccgccggattgatcaaaaatttatcatataaagtcccgctgaaaatattttccaaaatcaatcttattcccggggtcataactcctttgataagtttttgcagcttattttcatattcctgatgatcaaaatcaccattaggcagcaaatgggtaatatcatcttctggcataatctcttccatccgttgtaaaaccagctgcagcgtcatatcattagaaaatttattaatatctaccatgccgccaaccatcattactttaggaccttccatagacctcatcttatctacaatgccagcttcaaaaacaataaacggcattttgccactgttatcttccagtaaaccgcgcgcaaacacaccgccattagacgaattaccaattttctgcacacgcagcaatacagcttgacacactttagtgccagccttaaaatcactgatcatatttgtcaccatcctctaaagcataccgtttacaggtattgcaaaattttgctttccttcgctaccaaaacctgagcattgaatccgcctgacgttagacgcagtgcaattctgtcagcaagcgtatttatcataggtaattcagttccctgatgtgtagcatcaattatattcaagccgctgtatactgcgttctgtgcagtatgatatttcacatctccagtcacaaaggtatctgctccggcagccagtgcctcatcaatgaattcagcacctgctccaccacatacagcaaccttgcttaccctgcgtccagcgtcacctgcaattatattgtctaactttaagacggttttaattttttcactgaactcctgcagagtcatcggctcatgtaaacatccaacccgtcctaaacctgcttctccaccggcagcaggaactaaaacttcagtatgcagcaacccaattttctctgccaaaacatcattaacaccgcccaatacactatcaaggctggtatgtgcactataaacagcaattttattttcagcacaatctagaagtaatttatgctgccagctcctgtcggtcatcttttttattggatcaaaaataaccggatgatgtgttacaagcatttgtactttatgttcaacggcctgctctactacttcaggtgatacatccaaagcaaccataagtttttttaccgtattactactgcgcccaaccaacaatccaacattatcccaaggttctgctaaattaggcggagctatgccatccattactttaatgatatcatttaccgtagcttccatcgcctaatccctccagttcctgcaataaagtgtatatttcctgatatttttcactttgccttgcttctgcactgcggcacatattcagcagcatcttttgatattgaccgcatactttagcaaaatgttttttgaaaagcggcggcctttgttccagcaagcgcggccctatttcacattccaaggcggtgaaagcagcctcagcgccacgttccagaacaatgatttcataaagatgccgtccttcttcaacaagaacttcatcatcaatacgccagccgttggcattggcccaacgccttaaagaggatgctccagccatcggctgcaatatcagttttctggcttcctttgcagtgtccctggaagcttcaaggatttcaatcattgtaccggcacccatacccgcaattataataacatctgtttcaccaggctctataatgcttaaaccattacccatccttacttctactttatcattcatgccatacatagcaactgtattacgtgcagcagcacagggaccctcagtaatatcaccagcaactgctttgataatcactccacgctctgccaaccatgtcggcagatatgcatgatctgttcctatatctgctatgcttacgttctgaggaactaatcttccaatcgcttccaaacgcgcaccaatgttcatattgcctcccacatcattactttatcatacaaattataacatattcctgtcttccagttggttatttctttgtgaaactcagaatgccttcccttaaaatctttaagggaaggcattctgaataacttaacctttagcaatcaattcaatcagcttcaatgtcatctgacaggatttttctaatgccagcagtggtaaaaattcacagttagaatggaaattatgtcctccggtaaaatagtttggcgttaaaattccctgcgtagaaatataggaaccatcagtaccaccgcgcatggcaatagtatttggttttattcccagctctgacatcgccgtataaatataatctatacattttctattctcatcattgacagcatctgcaatatttccataagtatccgttatagtacatactatttctgcacgaggatatagcttctgcaaagattcaacatttgtttttatcagatgttttctagcctcataggtatttttattatgatcgcgtatatccagctgaactacggcctcgctttgattggaaataatagacttcgcccagatgtaaccttccgttccttctgtatgctccggtgtctgcatcctgtcaaagctgtttatcaagtcaacagcaaccagagttggatttaccattacccctttcgccgacataggatgtgcacttacacctttgatttttactaccgcactgccggcattgaaagtttcataaacaacttcgcccaattcacaacagtcaatagtataagcaaaagctaccggaaatttactgaaatccattttctttgctccgcgcaatccacattcttcatcaggcacaaaggctacatagatatctccgtgctgcaggtctttattttgcaccaaagtttccaatgcaaccactacatttgctattgcagccttgttatcagcgcccaatacacttgtaccatcagtacaaactatatcctgacctttatattttaataattctggatgttctgcctcgcgaagataaatcccctttttttcattcagacaaatatccccgccgctataagaccgtaccacctgcggtttgatatcagctgaaagattaacatccacagtgtctaaatgagcaacaaaaccaaccgccggaacttgttcaccgcttccggctggtaaattagccggaagtttacctgtaagaacagaatattcactgatctcaagattaactaagcccagttcggcaagatctttttttaataattcagctaaacttctctgaccttctgtagaaggaactactgcctgagaagcatcgctttgacttgttactgctacataacgtaaaaaacgttctaataaacgtgtctgcattcttctgcccccttactgatcgttaaaaccgtctcggataaacataatctgcctggaaccccagtggtatatccagccaccaaaataagtataacataaaggtaagagaaaccaataatgctatagtatacggcagcatcatggaacttaatgtaccaataccagcattttttacatatttctggcaatacagaattattaaaggataaaaagcaaacattggtgttacaacattgaccgcagaatcactgactcggaaagcaacttgtgtcagttcaggcgcaattcctaccgccatcagcatcggcacaaatatcggagccagaatagcccattttgctgaagcagaggtaattataagattaagcagagcaacaaaaacaataataccgaaaacagttacctgcggcggtaaattcaatgattttaagaattctgcaccggatacagcaatcagtgctcccatgttcgatgcgccaaacgcatataggaattgagcagcaaaaaaataaaatacgatcagctgcactaaagttttcgtaatctcttccattgccgccgtaacatctttaggtgatttgaatttaccgcaggcaataccatatactaaaccaaccaaagctgcaaaaataaaaatcagagacactatcgactgcattatcggagccttaaagctggcaataacgccatcaggagcacgcaggatagaatctgccggatacagtgctgcggcaagcccggtcaacatcaacagcaatactgctgtagctattttaaaagccctgttctccgaaggcgtaatcgagctgttattttcgttgcccaagtccagatcgtcatcaagcggacaagccttccaaagccatgggttagtaatcttttccgttacccaccagcaagcaccaataactataaacgtagaagcaaacgcataaaaatagttgcataatacgtttacctgatatcccggatcaataatctgggccgcactttgagtaaacccctgaataacaggatcaatagccgaaggcgtatagttggcagcaaacgcgccggcaatacctgcaaaagaagcagcaatacctgctaaaggatgcttacctactgcataaaacatataagcggctatcgggataatgatgacataaccagagtcgggccccaaatgactgagcatccctaccagaataactaccggtgtaatcagaactttaggtgttatagaaagtatctttttcaaccccgtattaatgtaaccagacccatcggcaataccaataccaagtgttgctacgataaccatacttagcggtgggaaatttgcataattagtgaccattttactcattaaatcaactagcgccttaccgctgagcatattagttatttcgataggcctgccggtcgccggatgcacataattgaaatgtatctgcgctaaaactgccgacactacacaaaccaaaataaaggcactgatgaaaagaatcgtaatatccggtattttattaccgatacgctctataaatcctaatatgcctcctacctgctgtttactttgactttgctgcaattttgaagcctcctaactaattttatctgagaaatatcataatttaatattatagcaaaagtcagtcggcaataccacttactgcagcaaccttcataaaaaatttgtactcttttcataaaaaactgccgcaagcttttcgctcttggcagattcttttctttacgcttttctcactgcagcaaccatctcttcaacatatttttttaccggccctgcggcatcttttccatattgctcaacaatcttcacaatcgcgctgccaactatcgctccatcacttagcccagccattttttcagcctgttccagcgtagcgatcccaaaccctactgcaacaggagtatcggtgacttcacgaatacgtttgactatcgctccaatatctgtagttatattactgcggatacctgtaactcccaatgaagaaacaacataaatataccccatggcctctctggcgatcatttgaatacggtcatcagacgttggagctatcagtgaaataagatcaacatcgtatttcctgcaattagaaagcagctcatttttttcttcataaggcaaatcaggtacgataacgccatcaatttccagctgacggcatttttccataaaccgctcagttccgtaaataaaaatcggattgacataagttaaaaataccagcggtacctgagtgacatttcgtacttctgcaagcatatcaaaaagcttatccgtagtagtacctgcatttaacgctctgacattggcccgctgaataacttctccttctgcaacaggatcagaaaaaggtatgcctatttcaataatatcggcacctgcggcggccattgccaatatcagttctttgctaacttcaagattgggatctcctcctgtaataaacgggatgaagcatttctttttatttttaaaagcctgccttattttactcatgtaaatctacccccatatatctggcaatcgccgctacatctttatctccacgtccagacaaattgacgacaatgattttctcctttgacatttcaggcgcaaccttcatcgcataagccagcgcatgcgcactttcgatagcagggataattccttccgtttcagataaataactgaatgcccgtactgcttcagtgtctgtaatggctacatagctggcacgtccggtatcatataaatgtgcatgttcaggtccgatccccggataatcaagtccagctgaaattgaatacaccggtgctatctgaccatacttatcctgcataaaatacgatttcatcccgtgaaaaattcccaggctaccacgattaatcgtagccgcagtctcttccgtttcaatgccgcgccctgcagcttcaacgccaatgagctgaacatccgtctcagaaataaaatcataaaataaacccatcgcattagaaccgccgccgacacaggccatcacaatatcgggtaaacgcccctctttcgccagcatctgttcttttacttcttttcctattacacgctgaaaatcacgaactatttccggataaggatgcggccccatcacactgcctaaaacatagtacgtatcattaacattcgtagtccacgaacgcaaggcttcattgacagcatctttcaaagtcatcgtgccagtttcaaccggcactacctttgctcccagcagctccatacgaaaaacattcaatgcctgccgctctgtgtcttcctttcccatataaacaacacattccatatccatcaaagctgctgctgtagccgtagctacaccatgctgccccgccccagtttcagcaatcacacgttttttccccatttttttagccagcagcacctgccctaaaacattattgattttatgagatccggtgtgattcaaatcttcacgttttaaatatattttggctccacctaaatcacgagtcattttttcagcgaaatataataatgaaggcctgttagcatattcgcgatataaagcctgcaattcctccataaactgcggttcgtttttataataatcatacgcacgctctaattccaaaaccgcattcatcagtgtctccggaatatattgtcccccatgcctgccatatcttcctttactcattttctctgctccctttcactgcggcaataaacgcacgcattttttcaaaatctttactgccgtcagtttccaccccgccgctcacatcaacagcatatggttttgcttctaaagcctcatgtacatttttcgcatccaagccaccagcaagaaaaaacggacgctgcaatttaatattttttaaaatctccaagtcaaagcgctgaccgctgccgccataggcagtctttgtataagtatcaagcagcagataatcacattcataatcaatcgtactctcaaaactctctatatttctcacgcgaagaacttttatcacaggcaaatttattttacggcgcagctccctgcaatactcctgactttcgtcaccgtgcagctgcaccacattaataatgcgttctgccgccagccttttgataaaattaatatcttcttttacaaaaacacctacagtccgaaccctcaaatccaattctgcccgcagttttgcagcttgctcggccgaaacctgccttggactggccgcaaaaacgaacccggcatattccggcaacagtatgttggcaaattcaatatcttctttacgttttaacccgcatattttaactttagtcatttatctcacctgaaagccgctgtaaatctaaagtaatattattgcttctcatcagcatttcaccaatcaaaaaaccatttacaccagcggcacgcagcagtttgatgtctgctgcacacgtgatcccgctttcagaaacaaatattttatctcgtggtacaagcgacctcaaacgcaggctattctgtaaatcaacactgaaatctttcaaattacggttattgacgccgatgatttctgctcccgcattcagtgcagactccacttctgactcatcatgtgcttcgactaaaacatccaaacccacactggcggcaatatctaaaaattctctgatcatggacgtttccaacagtgcacaaatcagtagtacagcatcagcaccaatagttttcgcttcataaatctgatattcactgattataaaatctttgcgtaaaaccggtaatttcactgcagtactgatcgcctgtaaatactcgtctttacctaaaaaaaactgcggttctgttaaacacgaaatcgccgctgcacctgcagcttcataatctctggccagtcgcagatagtcaaactctttgctaataatacctttagagggtgaagccttcttgacctcagtaataaaattcatcccatctctcgacaaacgagtacgaaacccacggttatttttaggtaaactctcagcgtcagatctaattttatttaaatcttttattctttgcagttgctctactctgagccgtgtagccgctgcaatttcatctaaaatcatcatccacctcaaccattgctcagaacgatcagctgctgtaatttctgcaatgctttaccattgtcaagcgttatcctggcaagttcaatacattctttaattgaacctttgcctcccaaatacaaactcaacccagaatttaaaactactgcattacgttttgcgccttgttccttaccactcaaaatatcataggttatacctgcattgatttttgcatcaccgcccataagatcactttttttgcatggggtaaacccaaaagcctgtgggtcaagtgtataagtcgtgatttcaccatcattaatctctgctatcgtattcgttgaagaaacagttacttcatcaatcccatcattgccgtaaacaacaatgccacgcttaacacccaagttagcaagtactttcgctaaaggttctaccaactcttttttgtaaactcccaaaagctgcagactggcaaaagctggatttgccaaggggccaataatattgaaaaccgtgcggattccaagctctttacgcacaggaccggcaaatctcattgaagcatgatacgcctgcgcaaacaaaaaacataaatcgatttcctgcagcagctctttattacgttcagccgaaagatctattttcacacccagttcttccaaaacatctgcagctccgcttttgctggaaacgctgcgattaccgtgttttgctacaggaacccctgccgccgcaatcacaaaagaacttgttgtagagatattaaaggtattcgcacaatcgcctccagtacctacaatatccagtacatctttacccggatcgatatgtgtgcatttctcacgcaaaacctttgcacatgccgttatttcttcaatagtttcacctttcatacgcatagccgtaataaacgccgcaatttgagcattagtagcttcaccgctcattatttccccaaaagcacctatggtctctgctccagtaagattttgtttttctgctaatttatttattgcttcattgatcattattttcactccttactatattgctaaaaaattctttaaaatacttaatccgtcaggtgtcataatagactctggatgaaactggacgccataaatatcataatcgcaatgttttacagccataatctctccatcgttcgtagtcgctatgacctccaggcattcgggcttggaatacttatcaattatcagagaatggtaccgtgcggcaagtattgtctgtggcaacccttcaaataatctgctgttcttgtctatttcgatcatactctgtttgccatgtaccagctcacgggcatgtacaattttcccgccgaacacttcaccgatcgtctgatggcccagacacacacctaagatcggcatcttcccctgcaacttttctaaaacagtttcgcatattcctgcattttcaggaaaaccaggtcctggtgacagaataatatgcgaaggctgcaaagcttctatagcttccacagttatttgatcgttacgatatactttaacctcatcagtcagcatcccaataaactgaaacagattaaatgtaaaactgtcataattatcaataataattaccattactttgctccttattattcttttgctgtttctcgcagcgccttcatacaggcccctgctttatttactgtttctgcgaactcattgtcaatcacagaatcggctacaatcccaccgccggcctgtatataaactttaccagcacgttttaccatagtccttatcgtgatacaaatatccatattaccgccaaaatctatatagcccataccaccgccgtaaattcctcgacgctgaggttccagctcatcaataatctggcaggccctgatcttcggagcaccgcttaaagttccggctggaaatacggactgcaaagcatccaggcaatctttatctgctctcaatcgtccagtaacacggctggttatatgcatcacatgagaaaattttttaatttccagataatcaagtactttaacagtgccaaattcacttacgcgtcccacgtcatttcggcctaaatctaccagcatattatgttcggctatttctttggcatcagccaaaagttctttttccaatgcctggtccagttcttctgtcgcccctcttggtcttgtacctgcaatcggcatcgtcgtaatctcgtgtccattcaccttcacaagaggttccggcgaacttcctgcgatttcaacatcatcatttttcatcaacaccatatattgagatgggttcgtcgtccgcaagatacgataagcattaaaaagatcctgatcgtagtctgctgtaaatttctgtgaataaactatttgaaatacatcgccattcttgatatattttttgcatttctgcacattagctgcatatagatccttactttgattagattttacttcaccaagtttggccgctataaatggcctctgagcaaccgagctagacaaaagcgcttcaacggccgtaatttcccgctcagcttttgcataattcacctctaaattatctgtgcgtacattcacaataataaaaagtttctgttttaagtgatcaaacgctactattttatcaaacaacatcaaatcaaaatcaggaaaatctgtcgcttttgccgggtcaaattgcagactcggctcacaatactgaacaaagtcataaccaaaatagcctacaaaacctcctgtcaaaggcggtatccctccgattttaggaaccctatattctgccagcacctctttaatacaatttacaggatccttggtcttgaattttactttagcaccgttaataacttctacaactttatctttagctctcagtttgacgattggatcatagccgacaaaagaataacgtccccagcgctcaccgccctccaaactttccagcagaaaataatcgttgctgctgttttttacagctgctaaaaatgccagcggcgttgtcatgtcagccagacattctttcgcaactggaactgctgtatagtctttttgataggctttaacttcttccagcgtaagattaagcattgttttcactccttcatcgttaaaataaataaaaaacctgcccttgttataacaaggacaggttgaaaaaacatatacctgcggtaccaccttgattcacgaaaataaatcgtgcacttaaagcagagtgccaacacacccctcgcccttaacgcaggcgttgcgttgcagagtactttcggcaagccgatttgactgcaccctcagcggtccatttatcaaactgcatttctatccggttcccagctccccgaactctctgtaagcgcattttttgacttgatctccgcctctacggttttgtggtcgttatttaattgttgtaagtttagcaccatgtttaacaagcgtcaacaagtttttcaaaaatcgctaaaaaattttttcaaattttcaattttgtcaatcagtttacacttttaataaattcacagaaaattcctgttattttaatatttatacaaattcactcttcgccactcaaaacaattctacacacatcaccatcactgctaatataaaaatctaaacttttcccgattttactgtttttgggaaaattataaccatacataatcacagcgccgtctttatcatctttcaaataaacgacccttgccggaatcccatactggcctataacacgggcaccgtcgtcacctgtaccaataccacgcattgtatagattacaggagaagctgtcataagctcaacgattttcttattaccacgtctggctttaacctgcagctgctgaaaatcataaacctgactgctcccatctttactttctttttttacttttcccaacgattttgccgctgaactgtcaaaaatctgacccaaatgccaatcccccaacgaattatcttcatcgatcaattcttcagtctccggcttttccagatactcggcaaaaatataaccttttttaccattccattcaactttttgccactccccgcttttactaccgctcaaacgcaaaagtgaatgtcttggcaggcatgctaaaacatcagcagtagttgaaggccccgaacgaaaattcacatcatcatcagctaaaactgcaaattcaccttttttataatcagaaattttctgcgttgtataataagcttcgctttttgcagccagtacagttcctgtctgcaaaagcaagctcgtccccatcataatgcccagcgcaacagctgcaaacctttgtatcagcattgcagttcctccttcttaattcttacgttttattatatgctaaagtttctgggaatacaaatctgtaaaattgaaataaatgtaaaaagcctgccttaacaggcaggctttttacatttattattttatatacttagcgtctaaacgggcaaatgttccattcaactccatttcttccatccacatattcacatagttaagaaaaatctgatcaccttgctgcatcagtatgccaaagttgttttttgtaaatggttcctcgatcaaaggagccgcaagttttgcattatcacgcacataacggcgtgcttccatcgtctctgtaatcataatatctgctttttcttccgcaatcaaacctgggatctctgcattttgctgatgtacgatcaatgtacagtcaggcagattagcaagggcaaatttttcattagtacctcccggattaaccattacacgcacatcttttttattcatatccgccagtgttttaaattttttagcatcgtccttacgacacagaatagttttaccaaataccagataaccattgctttgcgccattttttgttctcttgccaaagtgcgggtgataccgcacattgcaatatcaaatttaccagctaaagtatcggcagtcaacgtgctccaggtagttggtataaacttcacctgtaccccaagcgattgtgccagaagttcgcttgcttctgtatcaaagccttcatatcttcctgtctcccgatttaaataactcatcggtttataatcgcctgtagttccaaccaaaagacagcccctactttgaacttcgtccagttttgaagcctctgcatgggggaacaaaccgccaagtccaagcatcgttacagctacaagggtcaccattacaattttctttacacttaccatactaccatcctccaattttaagatcactaccttttaattgtaactataaaaaagctttttgtctacgacatatttttttcatttgttttcaagctttctttctgctatcatattaaatataatatcttttgtacatattgaagaaagtctggtactgcttatgaaaaaatatctatggctgatagctctgatttttttaagcatcggcatttggcaacaacaatatcttagcgtgcttcgtaaagcagctatgatctgtctggagtgtatcggcattggctaaacgaaccctcattcaaatccttaccgcatttctttataatggcaatctgccgggattccttaatggtcgaatctggcagggtccaagtaaaagtatttgcgtccccgggcttaactgttattcttgcccaggtgctttaggagcctgccctttaggagcgttacaaagctctttatcaggagtgctcctacgctttccgttctatgttttaggacttatgcttctctttgggctactgtttgggcggactgtctgcggctggctctgtccatttggattcatacaggaactactttataaaattccgtcgccaaagtttactaaaaataaagcaacgcggactttgacaaagcttaaatacattattggtttgcttttcgttattattttgccagtaatttttttctatgtcgttggtgttggcgcaccagccttttgtaaatatatttgtcctgccggtactttggaagcagcattaccgcttttaagcaccaatcccttcctcaaacaaaatcttggtatgctttttaactggaaattatttctactgctcgtcactgttattgccagcatcgtcatctatcgacctttctgccgctttatctgccctttaggagccttttatagtttatttaataaactttcttattttgggatccaggtagataatgtcaaatgcattggctgcgatgcctgtatacgcaaatgtaaaatggactgcgcaaaggtgggagatcgtgaatgtattaactgcggcgagtgcatcgatacttgtcctgtaaacgcaatctcgcttggatctaaagtgaaaaaagcagatactaatgttgccgaagcaacaaataattaacttttgtaaccatttataaaattagtataacaaacgttacaagtataaactttgttatactaaaataaagtttattatgatattctaaaattttacaaagcgaggtactgttatgagcacactcaaaaaagttctcttaggcgtaatcttacttactgccgtcgctgtaagtggcgtacattttttcgacctcccgcatattgccaaagcagaaactaacgcagctccgccttttactgtaacagatatgaatggacagactgtttcccttgcttctctaaaaggtaagcctgtttttcttaatttttgggctacttggtgccctccctgtgttggagaaatgcctgatatccaaagaatgtatgctaaatatggagataaagttcattttgttatcgtcaacatagacggcacaaaacctgatgtaactgcatttatggaaaaccatgctttcagtttccccgttgcacttgatacgaacggctcagctgcttcagcctatgccgttcaggccataccaacaagttatatcattgatgctgatagcaatgtcgttgacagccatgtcggcgcattaagtgccggtgatatggaaagttttgttacatcagctttttaaaatcttaaaaccaaataaaaaaacgactgctatgcagtcgttttttttatcacactttattcatataaacctaaagtattttctgaaagattaatcataatattttttgtctggctgtaatgatccagcatcaccttatgagtttctcgccctataccagattgtttatatcctccaaaaggcgcccctgccggaatagcattataggtattgacccaaattctaccggtctgtacagctttagccacgcgcatagcacgattgatatcctgagtccagacagcaccgcccagaccatagacactctcgtttgccatacggataacatccgcttcgtccttaaatttaatcactacggcaacaggtccaaaaatttcctcctgagcaacacgcatcttattagtaacattagtaatcagagtcggagcaacaaaattacccttctctaacccattatcagtcaatttatagccaccgcaggctatagtagcaccttcctgtttggcaatatcaatgtagctcaaaatctttttgacctgatttgcatcaatttgtgcacccatttgtacgcctttatcaagcggcagacctacttttactttttcaaaacgtttaacagcttcttctacaaatttatcgtagatagcttcatgtacaaaaacgcgtgatccagcacagcaaacctgtccctgattgaaaagaatccccagcagtaaaccttccatagccaggttccagttgcagtcggggaagaaaatattagctgatttgccacccagttccaaagtagcaggaatcaatttctcagcggcagcctcggcaacagaacgcccgacttcagtagaaccggtaaatgccagcttagcaaaaccaggatgttcaaggatgtcgttaccagattttgatcctttaccggtaataatattcagaacccctttcggcagtacgccttcaagcaatcttgccagttcaagaatactaagcgatgtctggctggaaggtttaatgacaatagtatcgcctgcagccaacgccggagctaatttccacgcggccatcaaaaaggggaaattccagggaataatttgtcccacaactcccagaggctcgtgcagcaccaaactcatcgtattattatccagcatggtcgcagtaccttcctgcgttctgatcgcagcggcaaaataacggaaatgatcggcagacattggaatatcgattccagaagtctcacggaaaggtttaccgttatccatagattcaacctttgccaagtgtacggcatttgcgtcaataatatcagctattttatttaaaatctcagctctttgctgtgcagtggtatctttccatgtttcaaaagctttctgcgccgcttttactgcattatctacatccaccttagttgcttcagcacataccgccaaatgttcgccagtcgcaggatctgtagaactaaacgtagctccatctgaagccggccgccattcgccattaatatataaaccatattctttcaataaattttcttgcatcatttacacttcctttattgttttttattgccggcagttgattgtcgtcggctcttttatatatgattatagtagattttcggcatatgtcaataaacttttatgtaacatctactacattttgttgttttctaatttatttaacaatatattttgtattttaaaacatatgccgtttatcatcatattataaaacgcggttttaaaaaccgcgttttataatatcttcaccaaatttagcttttaatatatcgaccgcctgattacgtttacccaatcgctcatcttcggcaaaatttagtacaggcaccgcatcggcaggttctaaatgcgctacgctgacgcctaataaccttacgccttcgatccattttacagactgcatcagcttctgcgccaacgcaaaaatttcttcatcataagcaacaggaccttcagctgtaatactgcgggtaatgattttgaacgacgcaaacttcacctttaaagttacagtatagccaacaacgccactgcgccgcagccgccaaccaacacgtccgcatagatcaagaacggcatgacgccgctcatcttccgtatgaagatctttttcaaaagtacattctttcccaatagatttagcagcataatcattaacaacaggtctgtcatccaaaccatgtgccagttgttttaccacagcagcattattccccagagctttacgcaaaatacccaaatcagcatctgcaatttgcccaatagtcgctatgccaaactgcagcagacttttttcagcactgcgcccaattccaaaaatacgccgcaccgacattggctttaacatgccttcagcctcttctgcccttatcacaaccaaaccatccggcttctgcatatccgaagccagtttggccaaaaatttattgggagcgataccaactgaagcagttaaaccagttttttcttttatcgatctttttactttaaaaccgatatcacgttcagaaccagccaatagctccattcctgaaatatccaaaaacgcttcgtccaccgaaagctgttcaaccaaaggagaaaagctgtcaaaaatattcattatctgccgtgatacttcctgataccgcttcattcttcccggcaaaaagactgcctgagggcataaacgcctggcttctatcataggcattgccgagtgtacaccatacacacgtgcttcataagagcaagtagatacaacgccacgatcagactgtcccccgacaattaccggcagtcccatcagatcaggattatcaaattgttcgacggatgcaaaaaacgcatccatatccacatgcatgatccatctctgcataaacaaccctctcaatacagcattaaaaagtataccgccggcactaataaaaacagacctatcacattatagtacagaaacatcagcaaataatgtctgacctgcgcagggtacgcctctgcaaacagcttgtaagatatcacactcgccatcgaagcgatcagagttcccagtccgccgacattgaccccaagcagcaaagcttcactctgctgagaaaacgcagccagcagcattgcagcagggacattgctgataagctggctgacagcaattgcagaaaaatatgtaccggtcgcacttccaaaaaaactgtctcggataatatttaaaaaatcaaattgtgttaaattaccaataaagataaaaaaaccggcaaacgtgaacaaaagagaataatcaatttgcctgaataagccacgatccagcaccagcattaccgttaccgttatcatcatcagcaaccaatgatcaaaccagtgaaagaccgtcaccacacacagcaaaaacagtaaatttaaaactatcagaccccagccacgttctacattcacagaggtcaagcttacttttaactgcctgtcctgctggcgcattaaaaatactgccagcaaagccactgctaaacatgtcggtatccatgtgaccttaaaaaaagcaataatatcaaaattataacgggcatataaaaacaaattttgcggatttcccatcggtgtcagcatactgccaagattagctgccaatgtctgccaaacaattatttttccaacatcaactcctgcttctttgcctataatcaaagtcaaagggacaaaagttattaaagccacatcatttgttacaagcattgaactgataaaagttatcagcagcagtgcggcagttatctgacgcagcgaaatacatctctgcaaaagccgtacggcacagttatcaagtacgcgacgctttttaaacccgcctacaactaacatcaggcaatataataaaactaaaacacgccaatctatatactctgccttaggaacaactgcaagcgaagaagaaacagccagaacacaggccagcaataatataccttcacgctttacaaagctttttgaaaacttccaaatctcttttgtatccaaatttttcaccatgcctttgatatggtaaattataacataaacacacgtttttgaaaatcactttgccgactgcttttattgacataagacagtaataacgttatgatattcacaataataaaccccttgaagaaaggaggcttctactatgtcgagacctattaaatggcgcaagatctgctgtatgccgctcaataaaacttttgctccctccggcagcaaaccgcaggggaaaataaccatgactattgatgaatacgaaacgatcaggctcatggatctggaaaactgcacacaggaaacctgcgcaatggcaatgaatgtagccaggaccactgttcaaaaaatctacgaagaagcacgttataaattagcggatgctcttattaacggcaaggaattatcgatcgaaggcggggaattccgcctttgcgacggccataatcaaaactgtgtccgcgcttcctgccgtctattgcagcgcggagaacttttgcaaaacaaataataatctaccggaggcgtatcccatgtccgaacaaaaccgtcaatgctctgatactggctgtgacaaaacatcctgcgaaagttgcgaccatgctaatactgtaataaatttttccgctccactccatgaaatgagtactgtaaaaaaagttattggtattgtcagcggtaaaggaggtgtcggaaaatctatcgtcacttcgcttttggctgcagccatgcagaaagcgggtaagaaaactgctgttttagatgccgatatcaccggcccatcaattcctaaagccttcggactgcacggaaaagccaatgctacagaaattggcctgctgccaatgcaaacaacaagtggtattgaaatcatctctactaatcttctcttgaataatgaaactgatcctgtcgtttggcgcggcccgattattgctggtactgttaaacaattctggagcgacgttatctggacggacatagaatatatgttcatcgacatgcctccaggtaccggtgatgttccgctcactgtttttcagtcacttcccgtcgacgctatcatcatcgttacatctcctcaggaattagtttctatgatcgtcggtaaagctgtaaaaatggcagccatgatgcaaattcctattttgggactgatcgaaaattattcttatttccaatgcccagacaatggtaaaaaatatcatatttttggtcccagtcacctgcaagccgccgctgatgcttatggacttaaaattctggctgaacttcccatagatcccgatttagctgcagcctgtgattccggcaatattgaaaattatcaaacaaacatccttgataacgtaatcaatatattaaaaaatactaaataaaatagaaaactggcatcaggtactgatgccagttttctatcattcacgtaattcttttatcaattccaaagcttcagcttcactgatatctgtcaattctccacgcatatcaaaaaattctttaaaatattcagccccgacattattaaaataacaccagcaccgttccttccgacgccataattcaaaaccatccctgtcagcatgttttctgatcagcagcaggcattgacccataccggtggtcagtttttgataaatcatattactacctctcttaacatacttattttttctatttatacaattattatagcacagcagtacccccccacaagacataacaactttagcgcaacagtactttggacgtttttgcagctcagtttgatattcaactctgctagaactataatctctctctccttctatccataaatattgacaagcaggtcaatttgtcttaaagtaaaatcaacaataggtatttattaggagaaatttatgcgcacatggaaaaacggaatacttttaccgtttttattagttttactttggtatattataagtaaattacagatcttcagctcttatctgctgccaagtccagctgcaacagccattacagcaggagaactgatccgcagcggtatgctgtggcagcatttactgataagcctgcagagagtagccggtggcttcctctgttcagtcgttgtcgctttacctttgggtatcctgtgcggacgcagcaactcttttcagtcctattgctggcctatcctggaattcctgcgtcatgtgccgcctttggctgcaataccgctgataatcctctggtttggcattgacgaaggctctaaattagtcattatttttctggcgtccttctttccgctttttctgaacacctacagtggtattaaaggctgcgaccgtaagttgctggaagtcggccgttcactgcatttcactgcctggcaacaggcaaggcttatccagttgcctgcagcgcttcccgctattgccgtaggtttgcagctttcgctgggttacagctggcgggctcttatcggcgccgagttaatagctgcttcgtccgggatcggttatatgattttagacgctgaacaaatgtcacgtccggatatcgtattagtaggtttattcgccattggcatcgtcggcagtcttatcgactggctgttcttagcactgactaataaaatactgccctggaacacagaaacaggtgataaatatgctgcttaatataaccgcactcactaaaacctataccatttccggaaagcttattacagcacttaacactgttgatttaactttctctgaaaacagtttcacctgtatcgtcggaaaaagcggctgcggtaaaacaacattactgaggttattatccggcttggaacctgccacttctggaaccatcgattatggcaaagctgccaaaataggctttgtttttcaggaaccacggctgatgccctggctgactgtcaatgccaacatagcttttgccgttaaaaatgatcccagcctgccggcagcgccagacgaaaagcttttagaactcttgggtcttaaagcattccaacattcttttccggcgcaactttctggaggtatggcacagcgcacagctttaggacgtactctgtttcaaaatcctgatcttattttgatggatgaaccgttcagcgctttagattactttacacgccgtagtctccagcaaatgcttttaaacttatttcaacaacagaaaaaaagcgttattttcgtcacccatgacgttgaagaagcactactgttagggcagcgtattttagtcatgcaggagggcaggataaaaatagaccagcgcattgatatggaatatcctcgccagcaagcatctctttctttccagcaactacgcctgcaaatactgagcgcaatagaaaattaatcagataaggtggtaatagaaatgctttccagtaaaatcatcaaaaaaataacagcctgctgttgtatggcggctgttatgcttgctgcatccggctgcagtgacagcaaatcttatgtttccaattccaacgaacccaaagaacttaagattacctatgttaaatcgccattgaacattccttcgattattgacaaaaatctgcaaactgtcagcaaagaatttgcaaaaactgatactaaaatttcttatcctgaaatcaattccggtgccaaacaaactgaagcactggcagctggaagtcttgatatctgcagtgccctcggcggcacttctgctattttggcagcttccaacggagttgatctaaaaattgtcggtatctacagccgcgcacccaaagccttcaccatcatggccaaagatccgaatatcacaacagtatcagacctgacaggaaagaaagttgccggtcctaaaggaacaatcctgcaccagatacttgttgccgctttggccaaaaacaatctaaagccagatagtgtggaactactctccatggatattcctccctctgtcaacgctatgctgaacggaaatgtcgatgccgcactcgtagcaggctcagatgttctgcgtgctcaaaaagcaggcgcccacatcataatcagcggggaaggccttgttgacgccacgatcgtcatcgccgcacgcggagatttagtaaaaaacaatcctgatattcttaaacgttatctttcagctcatcgtaaaaatattgactatatgaatcaggagcaagctaaggcatacgattttaccgctcaggcaacagggcttgcccctgaagacgttgtaaccatggccccatggtatgacttcgatcctgaaataaaaacttctgatatcgaagatttgaatgctacgcaggaatttcttttagcaacaggcctgcaaaaaaataagatcgatctgacaccttatattatcaaactttaaaaataaaaactttaaataagtaaaaactccgccagcagaggctggcggagtttttatatttaattcaggccttcacgttcaactatacggtctaaaatttcaccggccttaaaaataaccagattacattttatttcatcattacgatatttcgctttgagatcagaacagtctattgttcccatttccttcgtaaaggtttcaataaattccttttccaacgctttgatacggccgctttcatgcccgttacggcttacatacaggctgctcaataccataacgccgccggttataacgccacagctgctttctacccccataccaccgccaaacccggcagcaagttttaaggcctcacagggcagcttcatattataagcccaattcgcaccataaagaattttttccgcacaattcaaatccatagcgcttccaaaaccatcctgtaataactttagcagcatctcgacccctccaatatgccttataaattaacttcaactatgctacctgactttctagtcgctgtcaggtcgattaaacgctggttatctgacccgcgaaacggcagatcaagattacgctgcgccaaaataaaaggcccgtcaaccaaaacatctatttcctgcaaaacaggagaatcctttacctcgtcataccaataaccagtgtaacaccaaattgtaagttttgggttttctctacgcaccagcttcagaaactctaaaatgtcgtccgcctgcgccaacggatccccgccgcttaaagtaatacctctgtgcagcggcgtcagctttggaaaaacttcgtcggccagctgctgcggagaatactccgtacctccctcaaaaggtaacagatcaggattatggcagccttcgcaatgccgcgggcagccctgaaaaaaaatcacagacctgatccccggaccatccacaatagactcttctaaaatagcggcaactttaagcacaatagacgcctcctattcagtacaacaggtttcccgacaatatttttgggtcagagtcctttcgcaaacaggacaataatcactgtcaatgataccagtgtagccgcattcttcacaataatcaatcgggaaattaatacctacataaccacagtcacattccagcatatgtctaagaacatcttccactgcccctagattatggacaggagacgaggcaaactcaacataacttatatggccaccatttgtaaatttatgatatgcaccttctaagcgcattttctcaaaagcactgatcggataagataccggtacatgaaaggaattagtgtaataagctttatccgtaacaccgggaataataccatattccttgcggtccatacgaataaagcgccctgacaaaccttcggcaggagttgcaataaagctgtaattcaaatcatatttatcgctcatagcatccactttttcacgcatatgaccaatgatatcttcaccaagcttttgtgcttcctcactttgtgcatgatggcaccccagcaaagaagtcagtgtctcagccaagccaatgaagccaacgcccaaagtaccatgcttgatagcctcttcaatcctgtcgtcactggccagtttatcactgtccaaatataatccctgccccattaaaaacggtagatcacggactttaagatttgcctgcacttgatagcgatgataaagctgatctcgtacaagatccagcaaatcatccaacagtcggtaaaaggtgtctatgttgcgctcagacttaattgccaaacgcggcaaattaattgtagtgaaggacaaattaccgcggccttctgtaatttcaggcccacgacgattagcaataacacgtgtacggcagcccatataagctacatccccgccataaggtttattaaagctagtatccataaaactaaaagtcggattcaaacgcttggctgcaactgaaatagccagctggaataaatcatagttaggatcacctttgtccagatttataccgcgtttaacacggaaaataacattcggaaaaataggattctccccgcgtccaagacctttagcatatgcattcaataaattacgcgtcaccttgcgaccattttcagaagtatcaagacccagatttaaactcgaaaacggtacctgcgcaccagccctggagtgcatactgttcaaattataaacaagcgcttccatcgcctgaaatacttcttcctcagaagcaccttccataaaaggcgctatatcagtatcaaaataaccaaaagactgtccaccgaacatatcattctgagagctttgcagaataattgccgctaaagctgtcgcagaacctggacgtctgggaggacggataaacccatgtccattattaaaacctttggccagcaaccgacctaatggaatattgaggcaatttaatgtttttccataaaaatcaagatcatggatatggatatcacctcgcttgtgagccgtagccatttcttcagggatcaaccgattcagataaaattcccgactggcagccgatgctatctgaagcatttttgcagaaggagagttagaaatattagcattatcgcggtcagtttcctttaatatctctgccacagtgtccatcagctcactgcgagagctgcgcataccagttcttctagctctgtacagaatatatgatttagccgtacgggcatgtccgctttcaatcagtactttttctacaatatcttgaatatgttcaacatcaacagtctgcttattttcattttttaaggcttttaaaacattcaaagtcaattccattgccagctgcctgtcggcgccgcctactgatttagccgcttcaaaaatagcatccgtgatttttgtttcatcaaactccacaaccctgccgtcacgcttacggatcatcattccttatcactccgatcaatactttcattgtttttcataatacgttgtaattcctgcataaaattattaacgtcagcaaactgcctataaacagaagcaaaccgtacataagcgatctggtcagttttctctaaatgattcattaccgcttcgccgataacttcgctcctgatctctgcttctccgcgcatcctcagttcccgttcgatatgctcagcaatttcctggattttctcataagaaataggccgcttttcaaaagctttgatcaatccactcaaaagttttttagcgtcgaacaactcccgacgtccatcttttttacttaccatcaaaggagtttcctcatatttttcataagtagtgaacctgcgtccacaatcaggacattctcgacgacgccgaatagaaacgccatcatccacagcacgggaatcaacaactcgactgtcacgataagagcaaaacgggcacttcataacgtcacttccttttacagctttatttgtatcagcgcttttattatatcataactttcagtttattcaaacaatatcttgtgtttttcatccatatttctatcatatatgcccaagatatagaaaaactccctttgcataagcaaagggagttcgcatttgtaagtttaaccgcgaatccaaggcggaatttcagtatcggaggttggcggtttgataacaccagaaccatacgaaggagcttgtcccggctgcgcaggagcagcagcctgttgtttttcactgctgtgctgctgtgcatagctgttgttataacttggacgggaagcgccacgcgctccgacagcaggatttctacgctcaaaaccggtagcaataaccgtaacacggatctcatcttccaactcttcattaataacagcaccaaaaatgatattagcttcagcatcaacagcttcagtaataatattagatgcttcagtaacatcgaacagtgataaatctttaccaccagtaatattaaagagtacaccacgtgccccttcaatagaagcttccaaaagcggactcttgattgcagcttcagctgctgcacgggctccgccctcacctttggccgtaccgatacccattaaagcagaccctgcatcagacatgatagttttcacgtcagcaaagtcggcattgataagtcccggaactccaatcaggtcagaaataccctgcacaccttgacgcagtacgtcatcagcaatacggaaagcatcaagcatcgaagtacgacgatcaattacctgcagcaaacgatcattaggtatggtgatcaaagtatcaactttatctttcaaattaactataccgttttcagcctgcgtcatgcgacgtttgccttcaaaagaaaacggtttggtaactactccgactgtcaaagcgccaacttctttggcacactcagccacaacatgcgcagcgccggtacctgtaccgccgcccatacctgctgttacaaaaaccatgtcagcaccgcgcagagattccagcaactgatctctggactcctcggccgctttttcaccgacttcaggattggcaccggccccaagacctttggtcagtttttcgccgatctgaatacggttgggagctttcgaaagcaacaaagcctgggcatcacagtttacggaaataaattccacaccctgaacaccggctgaaatcatccggttgacagcattgttaccgccgccgccgacaccgataacttttatattggctaaattttcaaaacttttctcttcaaattcttcaaacatcgtattgtgctcccccttatgtatttgggtcaaaatgaaaaatcaaaaccattgacattttacattcaacattaatagtcttttttcctgctttttataaaaatttttttattttttcaaaaacagatgtctgatcgccgccagattttggaaaatgcgcatcccaaaaatcaggataccaaccagatacaagtcgataccaagaatcataccaacgtagcacaaaaaagccgccagcacagcgttagtaaaaaatcccgtaataaagaccgtattatcataagacccttccatgctggaacgaatcccgccgaaagcagtatccaatgccgccatcaaagctacagaaagcattttaccatattcaggcggtatataaaccgggaaatacaatccggcacagatgcctgccgccaaaccagcaagaacataaaaaatcatttttctgccgcctccttctctgcatcggaagcttgcccttctgctattttggcatactcaaaacttttacggcctttaaaagccggaataacgatatcatcagactgacttaaatcggcctggataccccaaaatttgaagttttccagaacgccgccgcgcaatttgagcgcactttctaaattgttaggattcccaatagcttttatctcataaggcggtgccgaacgattgttatttaccgataaagtcggacccgcacagcggatctcgctcatcgctacaatcctttcgccgttgatggcaatagcctcagcgcctgcggcacgcagctcattgataactcttaataaatcatcatcatgaataatatacaagttaggattttctccaggtttgctggcaatcttactgtcatccaaaaccagtttgatacccttaccatgcatttcaaaatcacctgcaaaagcttttaaccgaactatttctctggcaacaacctcgtcacctgcttttgcctgcagcttttccatttctttagataattcatctcgttctttttctactgctttcaaacggtcagacaaatcctcggcacgctgaatattaatagttttttgtcgttctgtagttttaaactgtgtagccaacataaaaccgagtacggcgcaaaccagtgcaattaaaatttttgcatgtttgttcgcaaacattttatcctccgtgtaattcttgctatgttactgtttcaatttaatatatggcttcgtaaatgtcaagtcaataaattcagcttgtatgttttttgcttttatttcattaaaaacagtaacaaataaattaagtttatccataatcttataaacatcacccaataaaatcggataaccatattgcagatagaacttaacattattctgctggtctacagcaatttcggaaatatgcgccacagtatcacgatccaattgactcaaaaattccaaaatcagtaaaacctgcttttcaccgattctgtctccaaagtaaatattacctgtaacaatacctgataatacaggagcgttggcatccttgattccatcactgacttccatcaccacgcctgtataatctacctttgcatatccgttataagagcaggccagatatactgccggccgccgttctgtgatcttcacgcgcatcacaccaggccaactgtaagaaacatcagccttctcgaatcttacgtcatgagtcagcgccttctgtacctgccatggtgatatcacaaacaaattaacaggctcctgcacaccagagatctgcagaatatctttagccgtaaccttatcgctgccttcgacattaatactgccaaaagcaaaacccggctgacgaacccaatgccagccagcagccagcaaagcagcacatattatgcaaaaacagatgaaacgcaaaaggcgcacccgacgccttctccgctcttttcgcaaacgttcacgtgtcgactgcacctttctcacctcacttcgtcaatatcagcagtatcgatcttactatttatcgttcaaagatgccgacaaaagaatcttctcacacaagtcagggaaagatatccccacagcagctgctgctttcggcaccaggctggtagcagtcattcctggaactgtattagcctccagtacatagcctttacctgcttcatcaagcatcacatccacacgcgcaacaccactgcatcccaaaaccttgtaggttgcaacagccagttcctgcacatgccttgtcgtttctttatcaagcggcgccggaactaaatattcagtttcacctttggtatatttagaatgaaaatcataaaccccggaatgcggtacgatattgataacaggcaatgcaacagccatgcccccatcctgcataatggcaacagtaagctctttgccctgaataaactcttccacaacaacctcacgggaataagtaaaagccttctccatagcagaattaatatcagtatcattttttacgatctcaacaccaatactggatccctgtgtcgccggtttaacaacaacaggcatctttttaaaagcagatagaatctcaccgcaaaaatcatgcgtttctccctttacaaaaatcaacgatttaggagtagcaatacctgcggcctgcatgatgcgtttagatgccgctttatccatgctcaacgcacttgcaagcatacctgaaccagtatagggaatttccagcatctccagtaaagtctgcagccgaccatcttcaccatacattccatgtacagcattaaaaactacttttgcactgcattcttccaattgcagtgccagttttttcggttccagatctatttcggcaacattgtagcctttttcacgcagagccccagcaatagcggcaccagtaaccagagaaatttctcgttcagccgacgggcctcccattattactgcaacaacatcgtttttattcatcattatctacctctctcaagctcggtaacaagctcttcaccgaccttaaaaatatcgccggcgccaacagtcataatcaaatctcccggctcggcaattttaaacaagtactcctctaacttcggcaaagtaggaataaacgtaacctgctgctgtgtcgcctcagtcacagcttctgccagtgaagccccacttacaccatcaattgggaattcacctgcagaataaatatcagtcaatatcagctgatcgcaatcagcaaagcatcggctgaattcatcaaacaataattttgtgcgggtataacggtgcggctgaaaagcacaaatcaaccttttaggctgggtctgcctggccgcttttaacgtaacaccgatttctgtcggatgatgcgcataatcgtcaacaacccagataccatcaatgcggccttttgtttcaaaacgtcttcttgcaccgctgaatttcttcaatgcaggtaaaatctgctgcatcggtatccccattgcctgtgccgtcgctattgctcccaaagaattaagcacattatgctgtcctggtacgatcagctccacggtgctgacaaaaactccttctacatataaatcataacaggtaccattgacactgtatcggatgtttctcgcctgataacgagcgtcttcatgctccaggccatagctgataacaggagttgtcgtttctgatgccagcttgcgcagttttggactgtccatacataaaattgctgcgccgccgtctttgacattagacaaaaactctgtaaaagccagataaatattttcttcgctgccataatggtccatatgatcgttttcaatatttgtaacaatggcatacttaggataaaactttaaaaaagaaccgtcgctttcatcagcctcagctaccacatatggtcctgccccattacgggcgttaccgcccaagctgccaacctcaccgccaataataatggtcggatcgatatccgatgcagcagcaatacaggaaatcattgcactggtagtagttttgccgtgagcacctgccacagccaccccatcagcatgattaagaatctctgccagcacatctgatctgtgcagaataggtaaattacgttttttcgcttccatcagttcggggttattttgatggatagcactggatataactacggcgtcgacatcgtcgacctgacattcggcatgacccatgtaaaccaaagcgccctcttgagcaagcttagctcccatatgaccggcattaagatcagaacctgatacctgataaccgcgtttgagcaaaacatgcgcaatagcactcattccggctcctccaataccgataaaatgaatgttttgcagacctttaagcactaaaagccctcctccgtcattttcttactaagttcaacgcctgctgcgcgatttctgccgccgcctcaggtcttcccaaactttttgcagcttttttcatagcctgcagttggttatcgttgatcagtaatttttctatctcttccaacaatttttcgcctgtcagttctttatccaaaataaccttagctgctccggccgcctctacggccttagcgttaaattcctggtgattggctgtagcgtaaggatatggtacaagcacagcaggaacaccctttgctgtcaactctgccaaaccgatagctccggcccgaaatacagccagatcggcagctgccaaagcaaccggcatattatgcagatatggcctgatcataatgttatcgtccaatgatccggccttcctcatttcagccatataatattcataattaacttcaccggtagcatgcagcacctgcacatctgagcgtcccgacagctcgcgctctacatactgcatggcattattgatgctgcgggctcctcggcttccacctgatacaagaatagtttttttgtttgcatcaagcccaagctcagcaacagcatccttacgttttttctgcataatctcgctgcgaataggattccctgtaaaaatcttttttgacgaaccgccaaaatatttttcggcctcactataacctaaaaaaacctttctcacataacgcgccagaattttattagttacaccaggcattgcgttctgttcctgaatacatgtgggaataccttttaaagaagctaaaaacacgattggaccacaaacataaccgccagtaccaataactaaatccggcttcaacttatcaagcaggctgtaggcatctttaagcccatgcagcagttttatgcctgaacgcaatgtgtctaaacttaaactgcgtttaaaacctgcaacatcaataaattccaaattataaccgtaacgtggaataatatctttttccaaaccttgccttgtcccgacaaaggtaatttccacatcaggacggatagccttgatttgatcggcaatagtcagcgccggataaatatgcccgccggtaccgccgccagaaagtataactttcacagtttttcctcctagcctttactttggcaatgccgcaaccaaatttttaaaataacggccgcgtgcagggaaattttcaaacatatcatacgaagaacaggcaggtgacagtaatactacctgtggcgcagcagccagcttatacgccagctcaacagcctcatccattgtctctacttttctgatatcgcctacgcctgctgctgcggcggcttcataaaaacgttctttcgcttcacccaataaaatcagcacatctgccttggcctgcactaatttcatcatcggttccaaagatgtcattttatcatgtccgcctgccagcaaaattatatgcccgtcaaaagcttccaaagcttttattgtcgaatcaggattagttgctttcgaatcattataatatggtacaccgttaactgtcatcacatactccaaacggtgctcaacacctgtgaaatccagcaaaaccctgcgcatattttcaatagtgaccccggcaaaaaaacatgccgcaatagccgccagtacattttcttcattatgaccgccaaatacacgcaagtcttttttatgacaaacagtataaagctgtctgtcccaggcaatagtaaaattacctccgtttaaatatacgccccgattaagctgctccctgcggctgaaccagcaaacccttgaaggggccaattcgccccagctgcgtataataggatcatcataatttaaaatcacgatatcattctcacgctgttttttaaatatattacacttcgccgcaccataagcttccatcgtatggtggcgatctaaatgatcgggagtcagattcaaaattactgctacatctgggcgaaactcacgcacaccttccagctgaaaactagacagttccgctgcaagccaggcgtcagctcctaaattctcaacttccttagacaatgcctgtccaatattaccgccaacggccgttggcacaggcaaagttttcagcatttctcctactaaagtagtagttgttgtttttccattcgtacccgtaattcctataatatgcccatgataactgcggtatgccgcttctacttcacttatgacctctattcccatctgcacggccatatcagtcaaatgattagccaaaggaataccaggcgataaaactacctgttctacttcctgcagcaaagtttccccattgccgcagtacaggccaccaccttgctttttcagcagttccagcaaagcattatctatctttgtttccttatcgctatatagaagcaccctgcagccttgtttcgccaaagcgtcagcagctccgcagccactgatgccactaccgtatactaaaaccgtctttgtcattagcagccgcctccgttccccaaacaccataacccgataccgattaaaccaagcagcaaactactgcccgcaaaaacttgcacaatctttgtttctttccacccgcccaattcaaaatgatgatgaataggcgtcatacgaaaaatacgcttaccgcctgttttcttaaaataaccgacctgaataataaccgaagctgcttccataacataaatcccgccaagaataatcagcaacagctctgtccgtgtcaacagggccaacgcagcaattcctccgcccagtgccaaagaacctgtatcgcccataaaaactttagccggataacgattgaacagtaaaaagcccaaacaagcacccgtcaatgtcaaagcaaaaatactgaggtccatactgcctgactgataagcaatataagcataagccaacgttaccggtactgttacggatgcagccaggccatctaacccatcagtaagattgacagcattcgtagtacctaccagaagcaaaaacgccagtacgtaatataggcttcccaagggaactgacaatgaggttcctggaatattcaaccccaaatttacatgcggctgcaattcaagataataaacataggcaccagccagcaagaattgtaaaaacagtttctgtttagctgtaagcccaagattacgtttcattaccactttaatataatcgtcaacaaaaccaatcagcgcatgcccaaaagtcagaagcaatgcaatcaaaactgccggcgtcagcttgcaccataccagcactgcaaccagaactgcagtcagtatcatcaacccgcccattgtcggtgtgccactctttttttgatgtgcctgcggcccgcagtcacgaatgctctgaccaaatttcaatttatgaagcagcggtatcagcacaggtccactggctgcgcagatcacaaaagatgtcgccaatgctccccaaaggctgtaatccattttctatcaatctccaaaccttatagctatagctgtttattttttaaaactaactccaaaagagaatccacctgcatcgaatgcgaaccttttaaaagcactatgtcatgcgactgcagaaggctatccaaaagcttggccgcttcatctcggccagcacaccaatatgctttgcctcccaaagcttcaactgccgcggcaatagcttttgcttcatcaccataagcgattaccatatccgtcttttcgcgaacagcaaactgaccaactctgcgatgagaatcgaaagaaatatcacccagctccagcatatcagccaacactgcaatcgtgcggacgccgtgggcagctttctttgcttcatgtaaagtttttaacgctgcttccattgaagcagggctggcattataggcatcattgattaccgtcatagtacctatatgcactatttcctgacggctgcctgtcagttttgctgtcattaaagctttagcactattatttaattttacaccaaaagcagcacccactgcaatcgctgccaaagcattttgtacattgtgttcaccaataaatggcatattcacttccgtacgttctcctgatctgctgtcaatgcaggtaaatacactcccatgagcagttgttaccacattatcaccgcggaaagtagctttacctgaatacccataagtaacaacctgtgccttagttttatccgccattgctgcaacatattcattatcagcattcagcaccgccaattgttcctgtgtcagatcttcaactagctcactttttgctctggcaatattttccatacttcccagaagctccatatgtgtttcaccaacattagtcacaaccgctacatcaggttttgcaatatcgcataattccctaatctgacccaagccgcgcattcccatttcgacaacagcaatctctgtatcagccttaacgctcagcaatgtttttggcaaaccaatttcattattaaaattttcctgagttttgatcaccttaaacttagtcgacaagcaggcagcaatcatatccttagtagaagttttaccattagaaccagtaacagcaaccacctttaaatttttattactcattctgtatgcatgcgctatctgctgataagcaagcagcgtatcctcaacagtaataattacagtttcagagggcagttcaggcacaggctttgacaccagcactgccgccgctccatgttccaacgccattttacaataagcatgaccgtcaaaacgctcaccacacaaagctacgaacaattcaccactgctttcaatccgcgaatcagtcgtaatccctgtgaaaataagctcctgcatattttcacaatgtccacctgttgccgttattatttcctgcaagctcaacatacaatcaccttttcttccagtattcctgcactacttcacgatcatcaaagtgaatagttttatctgccagaatttgatagttttcatgtcctttaccggcgatcataattacatcattcgcggcagcctcagacaaggcgtgataaatagcgtctctgcgctctgcaatcaattccacactcttcccttccggaacatccttcagcgcctctgcaatctcgtcaatgataactgccggatcctcagtacgcggattatcagaagtaactacgaccctatctgccagctccaaagcgatccttcccataataggcctttttttattgtcacggtcaccaccgcagccaaatactacccacagtttgccttccgtaatactacgagcagttttcagcacattttccaaaccatcaggagtatgagcataatcaacaataacagtatacggctgtcctgcttccactaactggaaacgtccaggaacaccgtcgaaaccatttaaaacatcaacaatagtttttttatcaatttgttctgccaacgcaatagccacagccgccataacattgtaaacattaaattcacccgtaatttttaaaagcagatccatctcgcccaccggcgtatgcagctgtaaccgcatttgtttagcctcaactttaaaaaacaacggataaatatcattattacgtccttcgccataagtcagtattcttgtttttgtgcggtcgcataaaatcggcgaacttgcatcatccatattaaaaactgctgttttattctcttttttaccttcatgcaaatgttcaaacaacagccctttcgcatcgcgatagttttccagtgttttatgaaaatccaaatgatcctgcgttatgttggttaaagcagcagtgtcatattcacagccggcaacacgattaagtgccagtgcatgcgacgaaacctccatgaccacatactcacatccggcttctttcattctgtataaagcacgctgcagatctactacgtctggagtagtattatgagctacaatagcctcgtcctcgatcattatattgatagttcctataagcccaaccttaaatccggccttacgtaaaatagcacgcacaatattggtagtagtggttttaccattcgttcccgttacccctatcatccgcatagttttacctggataatcatagaaaaagggagcgataacttccattcccaatcgggtatcagccacctttaaaagcgtcaatccatcaggacatacctctggaacatcctcaaccaaagctgcaccggcaccagatgcagcagcctgctccaagtatttatgcccatccacatgtgcccctttcagacatataaacaaactgccttctctcacttcgcgcgaatcagcagttatatccttaatgattttatcgcagtcacaaacaacctgtacttcaggcagtacagcaacgatttcttctaacagcttttgcatatagcatacctccaaaagtgaaagggcagcctatatacaggctgccttctaaaatcttcatatattatagcatatttttaataagaaggctatgaaacgattattttgcataagcatagccgtcataagcaactttacggctatcagccttcacatagatattattacgggcaactgtcatacccaattgtttttcagctatactggtgactctttccggccccttcagctgctcaacttcaatttttatttccgaattttttaaaagcaacgtagcttcctgctgcttcaatgcaacaagctcatcacctgtacggaccaggctttcgctgcgtgcgaccgcagcaaaataagccaccatcacgagcagtactaacacggcagcacggcgacgcacaagtttatagtcaacttttttgactttgcgaacccgctctacaggtctctcatattcaatttcttcccatgcgtagttatcatacttacgtgctaacatgctccaccctccaaatcagcgtttgatcgcataacgtaaccgtgcgctgcgcgaacgcggattcgcctctatttccgcatcgctgggaactatattccccactttttttacaagcggctttctgccgcaaacacaaactggaagctgcggcggacatatacaccctttcgccagctgtgccagtgtttgtttcactatcctatcttctaaagaatgaaatgtaatcactcctatacgcccgccgcttttcaaacgttcgaccgcctgcgttacaacattttccaaaatattcaattcatcattcacttcaatacggattgcctgaaacgtacgttttgcaggatgcggaccatcctgccgcgctcccttgggaattgcctttttgatcacattcacaagttcaaaggtagttttaataggcttttcagaccgttccttaacgataaactgagctattcttttactccagcgttcttcaccataacggtaaataatatccgccagttcttcttctttgtaacggttaactatataataagcatcttttttactttctttatccatcctcatatccaaaggaccatcatgcatatacgaaaatccacgctccggtgtgtccagttgataagaagatacaccaagatcaaaaaaaattccgtcaatcttatcaatatccaagccatctaaaacatcgtcgaaattcttaaaatttgacttagcgatttttattttacaaggcagtccctgcaatctaacacttgcagctgcaatcgcgtcatcgtcctgatcaatagcgaccagcgtgccccgcgaactgagctgcatggcaaaccctttggaatgtcccgcaccacccatggtgcagtccacataaattccatctttgtcagttataagccagttgatgctctcttccagcaatacgcttttatgtacaaattccattatcatggccgcctgtccttagattcctaaatcaagatctgccaactgttccgctaattcgcccacatcttcggcattttcttcgttatatgcgttccagcgttctgcgtcccagatctcagccctgttgccaacgccgacaataacggcatttttatccagtcctgcaaactcgcgcagattaacaggtaaaagtacccgtccctgtttatcgcactcaccttcggcagcaccgccaaaaaagaaacggttaaaatcacgggcacccttacgggtcatcggtaaagaattgagctttgcttctaaaagccgccattgctcaagatcataaacaaataagcagccgtccagcccttttgttaaaacaaactttgttcccaaagcctcgcggagctttacaggcataaaaaggcgtccctttgcatcaaggttatgttgaaactcgcccattaacattttgagacactccttcctccactttgctccacttttcaccattataacctcatttttgtgaaattacaacatttttttactaatatataagaaattatataaaaaaaacttccgcaagctttagcttgcggaagtttaaatctttttagtatcagtaattggtgcttctcagttcaaaatagccctgcggatggtcgcagaccgggcatttttccggagctttttcagcaacaacaattctgccacagttgctgcagatccaaacctgtttttcttcacgtttgaatactctgtcattttcgatattggcgagcagtgccagatatctttcttcatgctctttctcgattttggcaacttcttcaaaaaggaaagcgattttatcaaagccttcttctcttgcttcctttgcaaaacctgcatacatgtcggtccattcataatgttcaccggctgcagcgtctttcaggttagccatagtatcgggcaggctggcatgcggaataccgccgctcattaaaattttgaaccagatcttagcatgctctttctcgttacctgcagtttcttcaaaaatagaagcgatctgattatagccttcttttttagcgataccagcataataagtgtatttatttctcgcttcagactcacctgcgaacgcggtatgcaaattagcttctgttttacttcctttaaattccattggaaactcctcctttaaaacaataatttttttatatacaacccgttgcgggcgtacgttcttagttcttctccttggcttccagcttttgacattcaggacagacgccgttaaacacgatgtcatggtcttccattttaaaaccggtgacttcgcctactttttcgtccagcccttctatatagtccatatcctcaacattcataaacataccgcaatgagtacattttatgtgataatgcctggtcaggatatggtcaaaacgatcagcgccgcttggtacggaaaccttgcccaacaggccgctttctaccagcgaattaagatttctgtacacagtgcctttgcttatatcaggatattccatagtaatacggtcatacacttcttcggcagtggggtgatctgctaaaaatcttacggcagctataactaactgcctttggatagtgtttctcttagtcatatatacctctcctatcgaaacttattcttaattagaattatacacccaattaaatcattgtcaagcattttcactgttttttcacctgcacaaacagcatttttaccagtccggacagtaactgtttttgaaaattgcgaaatcaatatcgataagtttttttcataaaatagtacttaaacaaatcagataattcataaaggaatcagcttcattgacaaccgggaagcaggcgacgtataatttaggcagcagttaaccgctccaacacaagcagcttcaataataaaacatctatcgaggtccatatgcaaacactaacattagacaaacttgccattggtcaaaaagcaactatcactactgtcggcggtgaaggaatcctgcgccgccgttttttagatatgggactgacccccaaaaccaaagtcatggtacgtaaaaaagcccccttaggcgacccgatcgaaatttttctgcgtggctatgagctcactctaaggctggatgacgccaataagatcaccgttgcaccggaggaaccatgagccttaccttcgccctcgtcggcaaccaaaactgcggcaaaagcacacttttcaactatctgaccggcagcaatcagcacgtcggcaactttcccggcgtcacagttcaaaaaaaagaagggcggctcttaactaataaagatgtcaccgtcattgatctgccgggcatttattcgctgtcgccctatacctcggaagaaatcgtgacccgtgacctgcttttacgcagcaaacctgatatcattatcaacgttatcgacgctaccaatattgaacgcagtctctatctttccctgcagctcatcgaactcaacaccccgatgatcatggccctgaatatgatggatgaacttacggccagcggcggttctattgatatcaaaaaaatagaagaccgccttaccgtaccggtcgtcccaatcacagccaattcaggtgccggcgttgacgaactgctttcacgcgccctgaaaaccgctcatgataaaaaaatgcctgaacgactcgacttttgttcaggcgtcactcatatggctattcattctatcgcccacctgatcgaagccaaagtccgcagcaaaggactgccgttgcgattttcggcaacaaaactcattgaaggcgatgaaccactggtaaaagagcttgaactgacagccaacgagctggatattattgaccatgtcaccaaagacttggaaatagctttagatacagataaagaagcggcgctggccgatatgcgctacacttatattgaagaattatgttcctacgccgtacataaaccacaggaaacaattgctcagatgaggtcagtcaaaatcgaccattatctgacccataaatattttgcaatacctattttcctgctgactatcttcaccattttttggctcaccttcgatgttatcggcgccgcattaagcgactggctcgaaatcggcatcagttccgttactgaagccgccgatctgggtcttactgcaatcggcctcagtgctcctatccattccctcattattgacggtatttttacaggtgtagggagcgtcctttccttcctgccaactattgttacactttttttctttctatccatgcttgaagacagtggttatatggcccggattgcctttgttatggacaaactgctgagaaaaattggcctatccggttcttcattcgttcctatgctgataggattcggctgcagcgtcccggccattatggccacacgtacccttgccagcgaacgtgaccgcaaaatgaccatgattctcacaccatttatgtcctgcagtgctaaactgccgatctacggtgtttttatatcagccttttttgccgataacaaagccgcggttatgatgttcctgtatttattgggaatcttcattgcaatcgcttcaggactgcttttaaaaacctttgtttataacggtcagcccgttccttttgttatggagctgcccgcctatcgtctgccaacagcccgcaatatcatgctgcatatgtggagcaaggccaaagacttcttatacaaagcctttactgttatcttcgttgccagcatcgtcatctggctgctgcaaagctttgacaccagattctatatggtagacaatcccgaaaacagtatgctggccggtataggcagttttattgcaccattctttgctccgcttggattcggcgactggcgtgctgcaacggcacttgttaccggtctaacagccaaagaagttgtcatcagtactctatctgtcctgatgggaggagacggcgatatacccggtacagcgctgcaaagtatctttacaccgctgactgctctaagcttcctaactttttctctgctttatcccccctgcatagcagctctcgccgcaatcagacgcgaaatgaattctacgacggagacattttatatcatgtcctaccagataatcacctcctggatcgtcgctttcattgtctataatcttggtaaaatacttggatttaaataaaaaacatccggcttcttaaaaggagctggatgtttttattatctaacacttactctgtttaaaacaactatagctgcaataatatttgtgcttacgtcctgcataaacggcatattcctaataaatacaactaaaggaaccgtttcattactgaatttttctctgaaaacttccgcatcgtttctcagttacgtttttataaacaaagcccgggccgttattaaataacagccctggctcggggaatatttccaaacagaacagagggttgcaatgttctgccgaaaagcagatattattttaacaaattgttagaaagtccagcgtgcaccaacattccagctccaatcttttttgaaatcgccgccggcactgcgttcaaagtccagataaacatgattattcgtgcctgtctggatagccgctccaataccatactcaaaccatgtatctttaaaactgcggtctatctttatccggctgccgctgttatcagccatcgcagcgtggtaaccgccgccgaattcatgcagcagattggcttttaaataaatattcgttttctcatcgatatccttgcccaagttaaaacctatgcgccctaaagcactgcgaattccgccctggcgtactgctatgccattactggtagtatagttatcaccgcctaaataaccaatggtcagctgcccctgtggttctatataccaacctttatcatcaatcattttcttacggccatattcactgctcaacgaaataccgacattgtgcatatcaccgcgtatttttttaccgttttcatcaaacattttaaaattggtatcaatatggtggaaccttaatactacatccagataatgtcctttattacccatttcagtaacataaaaattcatagcccgactgtgattatcaccactgccgcgggagtaactggcatcaccatcagcatagctaatagatacaccgccgtaccgcgtataattttgcttttccttcattacttcatcgtagcctaattcataatgagtatatttatttttgaagccaaaattaccgctgcgccctatttttgcgcccttgaccctgagccaaacacctttttcatccacgccattatgacgtaagtctcccaaccttttcatcaactgatcatgatcaagccatgtataataagctaaggatccggctgataccgcaccatctacacccggtgtcggcttttcttcaggatcaacggtcgtcacagcttttaaataccagtcagtagtataattagagtcatacgtattatcttttttatccagctcgtaacgctgatagtacagtgtaccttctccatcaactgcagtaaatatcccgttattgttttttacgcttgccagtaccgtattttcagcctctgtacctgtataaagaccggtgatttcatttaaggcgatcgcatgcgtaccatcaaaagtatcggtcacataaatacgatcgctgttattgacattggtcgttccatcaatatccaaaacaaaataaccgccattaccactgagattttcagtagtgagactgctgaacacacctccgtctttcgtcatatccactactgatttattgttagtaaaatttgtcagtgaagacgatcctgtcatacgccacatgctgtcggtcatatcaaggtctataatgccggaattttctgtttccgacttacctgtgaacagcgagttcgccgccataaacagttctatactgccgctgttatcagcaagcatattaccaagaacagtaaatctgctgtcagcggtaatcccttctattttcccactcttatcagcataaacagcataactgtccggatctgctgcactgatatcagctccgccgttaaatttgatactgccgtcggcagagtcggcataggcagcatgagaacctgttccctgtgcactgagccgtaatccgtctcctgtttcaataacaccacgggaggcataaataccatgtgagccactgcctttagtagttacgctaatatcatcacctaaagaaatctccgcatccagcatatcggtataaacaccatgtgactgattcccttgagtataaacggtagaatcactaccaaccttcacttgggctgctttttcttcactgcctttagatgatgcggcagcatatacttcgatgccgtgtgccttatcaccagatgttgtaaggtagttgcgtccattcaatgttgtcgtacttgcaccatccactttaactgccgacgccgcggcaccagcagtaaaaatattaacatgcgattcagcatttacaacagctttattattataaataccatgggcattatctttagctgtagtaataacagccagtgcctctgtgccgtcactgtaatgattaagattaacctgtccgctaagcgcatgaattgccgttgcgtcctgccctgtagtatctataaacaggttaccgtggaaatttgtagtgccggctttattataaacgccatgcgctcctatatcactaccgcttcctcgtccccattttccgctgtcaccggcagtagttattttagtactaccaaaaaattctgtagtaccgcctgccagttcagttactactgcagcgctgccagctccggttgtattgatctgagtgttaccggtaagcttaacatgtgcgccggtagttggagtaacgccatagggggtagcgccgttccaaatgccgaatgctggcacataacgatctatatatgccacatcaccgattaaattgataaccgtattaccattgaattcaaccgtaccattgatagcacgtaatccagaaccaccggcaccgaccatatttatatttgtatcgccgttgataacagtgctgccatgatcgtgacgaatagcataggcttctgtcgcagaagccgaatccgagaaatttgtattaccattaatagttatctgagaatttgtagctgaagctcctgtccaaatgccgtagccgcgattatagccattgttttcaaaattgatattatccgcatttataacaacgttctgattattgttggcaacatagatcccagctacttcatcatatttagtactttgcccgccagcagcatccaaagccatggtaacgttataacctgctttgtctattaggaggctggcaccatcgttatgcagtctgactgcattggtatgtgcataagaattatcattataagtgcgaatttctacatgtccgtcaccgtcaataataatagcttcatcggtacgtatacttaaagcactgccatgggcaccagtctgattatcggcatcattgataactttaactgtacctgtgatacggctgccgccagtaatattgacatattctgtattcgtttccagacctgacggcatatccccattgatgactttttcactggcaacagccgctactgcagtactagcaatgcctatactgcaaaagaaaccggcagccagcaatgaatacattacttttttctgcaataaatcttgttttttgttgttaaactgtgtttttttcataaccctctcacctttcttgaaataaaagttgcaacatataaaaaaatttccccaaattttttgctgccattgtaaatttttcagttatttactgtaacaaactttgttttttattcttgatattttaaattattctcttttttgtaatttattaacctttatatttaatattatgtttataagttatttttgatataatatcacattcgtccccccccgcaagacatttttacttttgctgtatattttagtttgagaagtcttgcaaaaactacttttactaaaaaaagctgccgatttcaccggcagcttggataaacgatatcatttaaaatataaaaaagcgcaatgttataaacattgcgcttttagcttattctcaatcatgtaggtatggtgcttcataatccgaaggtaaccagaaaagcctgatcggcaaatttgatgcaccaggcggtgaccaagtgaagcgaccttcactatttggttcaagcctggctatgcaaaatccttcttctcctaaacggccaaaggctgggctctctggaatattaatgattttcctttggccgccctgctctaaaacccctacgccagcgaacatcccaccccagggattgagccaaagttcatagggtttatcgccttttaatttataatcaatattataaattaccccgtaattaccataattttcagcaggcaggccggtagttgcatcagtaccgcgcagatattcaccggtctggctgtctgccaaaagcagagcataaccgacgccagtttcagtatcaatagaatgctgaagtttatagtttagatcagctttgacaaaagtgccacgcagcggatgctcatcaatcggcagctgtttggccaaagcagaaaaaagttcaatatctgttttcggatcgcacatcaacactgttacttcaaccggtcggtcactaaaaaagtcgatagtaccggtcaacaattgatcggtgggcaacaacattccttcgccacttaaaagctccagcgttttaccaaagccaagcgtactgttttttgatttttgttcctcgaaataatattcctgagattttttgccaaccgcctggtagtcatgactgggaccgtctataccactgcgtgtcactgcaaaatttacaggtcgcagcccgttatttttaacaatgatcgcaagcttcttcaatttacttgtaccattgacatgatgaaaaaacaaccgaccttcaccttgcagtgtgtcacgatataaaataccagtctcataaaccatttccggactgtcagaaaacagtaacttcgggccctcagctttcaccttagcccgcagttcctgataatcaggaacgccctgttcaggccagacagcctgagtaaaacctgtcacaggaacatttacaagaaagccgcacatacatgcggctaaaagatttcctaaaaattttttcataagtataaatttccccagcagttatcacaaactgtttttatagtcttgcaaaaatttttccaggcccttgtctgtaagcggatgcagcaacatttgttccagcacattggtaggaattgttgcaatctgcgcacctgccagcataacctgatttacatggtcaagattgcggatactggccgcaatgatttctgtcttcaagccatactgcttaaatattttcaccatattggcaacaagctgcacgccgtcttcaccaatatcatctaatcggccaataaaaggactgacataagaggctccggcattggcagccaggattgcctgcgacaagctgaaaaccagtgtgacattagttttgataccttcggcactaagtattcttactgcttttaagccttcggcaatacatggtatcttaacaacaatattatcggctatctgggcaagctgacgcgcttcacgcaccataccagcacattcggtgctgattacttcagcactgacaggacccgttaccaatttgcagatttcaggaattacttcagcctgtgtacgaccgctcttagcaatcaagctgggattagtagtaacaccataaacgatacccaactccgccataccgacaatttcgtcgacatcagcggtatccataaaaattttcatcaatgaaccctctttcccattgaaactgtactatttaaggtaatacaattaccttggtagcattggtctgacctggcaggctcatggtcatgatactgtaccatgccatgatacggtcaccttctttgatattctgataatcttcataaacatctttgctgaccgttacgatgatatcgcggtttgaattaagcaaacgcacagattctccgttttcacttggagtaactttttcaacatgcatatacttaccttgtttttcattgtttttcccaaaaacaatagcaaatccttccgcttgaggcggatagctgcgggtcattttactggaataataagctgttactttacggccttttttcagggcgcgatcacctttcagatctccgtctttaccatcgataagcaatgtcttatccgttacgataactgtggctacaggataattgccatcgccttttactgtcactttatcaccgtcaacagcaattatttcaccggtagtggccatcacgtcacgtaccggactaggataaattttttccggctctgtcgcactgacgatccctaatcccagtgtaaataagcaaactaaagttaaaataaatgtgcgttgtaatttcatgatcacaactcctctcataggttcgtactttttatattatagcaaacctttgtgacaaatgcgtgttattttaataacttaatcacgataaaaatcttacctatattaaaagagcccgctatgcgagccctttcttatttgttagtataggcaatagcaagctccgtaagcatggccaccgctttataaaggcacttttcatcaaaatcaaagcagctgttatgatgtccggctgcaatttcagtaccatacatcaggtaagctgcacgtccgccgttctgctgtactctttccataaaataagaacaatcttcactgccacctaaatccatataatcaacgacttgaccatactgtccacaagcttcagcaagcgccttgatttcggctcccaattcatggtcagccacacaggctggcgcacctcccgcttcacttacagttacgtcgacattatacatatcggcagaagctttgatcatacgacgggcttcagttaccataaattcgttaatttctgtattggcaccgcgagtttccatctttataagcccgacatcaggaagaacattacgtccggttccagcctgcaagacacctacattaatcctggatgccccctgcccatgacgggaaatagagtgcagcgcaatacatgatgcagcagctgctaaaagggcattccgtcctctttcaggcgctgcaccagcatggcttgattcacctttgaaactggcatccagctttgtagttgccagaaaacctcctgtcaggcagaccagagaatcagattttgtggctttgaagccgatatgcccgccgaacatataatcgacatcatcgacaatacctttggctaccatagcgcgagcaccacgtacaccttcttcagcaggctgaaaaataagtttaatcgtacctgccatttcttccttatattccgatatcagtttggccaaacccaatccaatagtaacatggccgtcatgtccacaagcatgcatttcttttgcatgtaatgactgaaagccgctttctaaaggccggtgatcagcagtatcacactcttcgacatcattacagtccatgtcgaaacgaaaagctactattttaccaggtcgggaaaatttcatcacacccacgacaccggttttaccaccccgcatcttttcaactaagtctgcatcggcaccttcactgacagcacgtaccatagcctgttccagcacttctgttacgggcagccccatcatttcctcttcaaccaaggcgtcatcgcccatataaacttcataccccagagcctgtagctccttaattactattgaagccgttctgaattccgtccagccagtttccggatgacggtgtagatcacgacggcgttcgactaattcggtctgcagcgcttctgcttcctgccagattttttgcatactttcatgtcccctctttcaaaaatctaaaaaagtaccagttgatcgctgtcaataggcatcaaagcatcggccggtgtttgttttctgtttttatctgttacccatttgccgcaaccagggcagctcatactagctgtccggacagcccaggccagatgtttgccgcacttagggcaaataaattcgacctgcattatttcgcttgctttgcgcttttccatggctattgcttcgcacctttcatttgtactctttggtttattatactatactgcgccgaactttgcaggcatttttatcagtaacatacatagacaaatactgaaaaatgggctattctataaataagatgattgtagaaataaaaaagcgaggtaatatcatggctgggttagcaaaagaatttgaacagcttggttgctgggaatcggcaacagaggaagaaaatattgttatttatggaatggatttcgaagacgaaaaagtttttattgtctttacggatgatatgggaaaaacccctgtcgatgcaaaagcttctcttgttgccgcctgctatagcgaagatgattgtttttactggggcaaagaactggaaaacttcgctgcctggcaacatatgtgcaacgaatacaaacccggctcgtctgcattgctgcatgctttggaagtctatgaattacctaaaaataaaactaaataaataaaagcctgctgctttaagcggcaggcttttatttatttagttagttaagtttaaaagtcacttcaacactggcgtcaatttttaaagttcccggcatcagttgtgtaggagctgccacatcggccgctaaagaacgtttataattcgttccagccgcaaccatggtctcaccgttataatcactgatatctgcactaagcatttcaccaagattacggccgccggcattagctacgatagcagccttagcacgggcgttatcaacagcagccgctaaaagctgacgctgcacattgctttcttcacttaaagcaaagcttacctgattaacattcgtcacgccttcctggactgttttatcaataatatcaccaagttttttcaaatcgtcaaccttgatccgtaaagtagtattcaaagcatagcctttttgcttatttttaccgttgacgttttcatagtcaggatacaaattatagcttgagctttggatattgttttcactgatcgccatccctaacaaagcccgacgtactttctgacttgcttctgccgcctgagtgcgcacagactcagccgtatcgcccttaacactgattccaagtgttagataagccatatcaggtgctacttcctgcttagcaatacctctgacagatatcgtattatcttcggctgccatagcgtccccctgcattgagaataaacttacggcaacaactgctgcagctgccagtgtttttatttttttcatagtaaaacctcccaattcattatgccttcattatagcattgaatatgtggcaaaactatgtttttcagtattcttcacctagatgttacttttccatcacaaaatcgtcactgctattgccaatttacaaaaaaaattttacaattatataagcatttaaacttagaaaagaggtcatcatcatggaacgcaaagtcatccaagtagaggaacgcccgccgcttctgctcaacattccactcagtattcaacatctgtttgcaatgtttggcgcaactgtcctcgtcccatttctcttcaacgtaaatcctactacctgcctgtttatgaacggtattggtacattactctatctgtttctcactaagggtaaaataccttcttatcttggttccagtttcgcttttatttcccctgtaatggttattttaagtacttccagttattctgacgctcaatctggttttatcgttttcggtcttatctttattttattctcacttatcatcaaatatactggtacaggctggatagacatcattttcccaccagcctgcatgggtgctatcatcgctgttatcggactggagcttgctcctaccgcagcaggtatggcaggtcttaccggtgacgtaatagatttcagaaatattgccgtttccatgtttaccttagccgtaacaattatcggttctgttgcttttaaaggctttatggctattattccaattttatttggtgttatctgcggttacatcttttcattcttcatgggcctggtagacttagctcctgtagcagcagctccatggttccaaatgccgcacttttatcagccaacctttaatctcaatgctatcctgattattgctccggcggccttagtagtactggccgaacatatcggtcatttagtagttacaggcaatgtagtagaacgtaatctgatcaaagatcccggtctcgcacgctccctttttgctgatggctgttccaacgttctgtccggcttcttcggtgctacacccaatactacttacggtgaaaatatcggcgttatggctataaccaaagtttatagcgtgtgggtcatcggtggtgctgcagtaatggcaatttgtctttcctttgtcggtaaactatccgaacttattcgcagcatcccagtaccagtcatgggcggtgtctgcattctgctgttcggcgttattgccgcatccggtatcagggttcttgttgaaagcaaggtcgattacagtaagtctgctaatctcgtaatgtcctctgtaattatgatagttggtctcagcggagccaagcttacctttggaacgatcagcgttcagggtatggtgcttgccacactggttgcgattttaatgagcttgacttttaaattacttgattccttaggtttaatgcgcaatgattaataaaaaaatccttacctttttaggtaaggatttttttatcgttgccttccacacatagtatcaacggacttccatatctactttttttacagctttaacagcagtggtatctccatgcactgttttatgctgtgattctgaagcatattttttaataagcacactgaccaatccagattctgccaaagctccaggaccgtctatacagccgttaacgcaagccataccttcaaaatactgacatggtaatttacctgatgccagttttttcatatcgtctaaacaagcctcaagtccactggcataatgagcttggacctgagtttcctctaactcttccaaggtatggttcaatgcaccctggactcctttcagcaatgggaaactaatcccaaacccagaagcttggtttatatagctttctgaagcaagcgttgccggatctatttcagcacccgccatcatacaagcaagttcttcaaacgtcagcacataatcaatagcatcactaaacttccttgcttcacctttcttagctatgcatggaccgataaaaactgtaacagcttcaggatattcagattttacatagcgtccgcaagcaaccattggtgaaacagtagtagatactttatccgcctcatttggcaaatgtttttgtatcagtgcaacaaaagccggacaacaggaattagtcatatatttttggcgtgccggaactttttccataaattctttcgtttcgtgtaaagccgtcatatcagctccgactgcaacttcttcaatcgcggcgaatcccatcttttttaatgctgccacaatttgcggcggagtcactttaaaacccatctgaccaataaacgaaggtgccagtaaagcatgtactcgctgccctgctctaatagcctgaatgatctgcacaatattactgcgttcatcaatggcgccaaacggacaagcactgcgacaggaaccgcactccacacatttagaagtatcaatctttgcttttctgtctgcacccgcatggatagcattaagagcacaggatctctcacacggccgactgatctcaataatagctccataaggacaaacttttttacacataccacattcaatgcattttgttttatctatatatgctcgattttgatggatagtgatagccttcttaggacatttattcatgcatttatgggctacacagtgccggcaagcgtcagtgaccaaaaatttatcaattggacattggtcacaagcttccggcaagacatcaataataggcagcgctttattaacaggctctgttaacgcaatttttgatgcctcgacaatattcaatccaaccgtaagccccagtgccatattgatgcgatttttcagtacagcccgttccttatgcacacagcaacgaacacgaggactgtcttctgttacaacgctataaagtatatcataaatatgctctggtaaagtcccttgccaggtaaagcgtgctaaaccggttaatactgcccggcgaaatttcgtgacttcagtcagttccatatggtatacctccagtgtaaagttttatacattattattgtaacgttttttatcttaaacagcaaataaaagtacttagaaaattacaatggagcctatagaaaacttctatacataaaaaaataaccataccgtatggtatggttattttttaaccggcagctttctatcctcccaggccgcttccagccaagtactttcgacgtttaagggcttaactactgtgttcgggatgagaacaggtgggtccccttagctatcgccaccggattgtttcagaaggtctttaagccttcaaaactatatagaagagtacaaacttttgagttcgctgtgtgttt

SEQ ID NO: 9973 - DNA, 7038 bp, Unknown
  gut microbiota DNA sequence
ggaacatgtacgtcaggcattgcttaaaaagcgtactgtagcaaataagcatcggcttatactaccgataaagtctaaagtagtagaagatcaacccttcccgcagtggcagggcttaatgacagttagttacacactgggcaagccagtagaggaggaaataaattatggctattaacaaaaaaagcagtcagaccactaagcctgaacgcttgatttatgtaggcccgtcttacaaaaacggaaagttattgaaatatcaggtattcattggcgggttaccaactcatattgatgatgtatttgaaaagtgtccgcaaattaaaaaactgtttgtagctgtttcagaattgccagaagctgaaagggctattgcaaaagcgggaacacctatgaataaatattaccaagctgctgttttggcagaaaaggaggaataacatatggcatataagcatggcgtatatacatctgaggtgccaacatctattgttccggcagtaaattctactgctgggttaccagttgtttttggtacggctccaattcatttggcaagtaacagagcagaggttaataaacctattttgtgctatacatatgcagaagcggtagcggctatgggatacagtgaagattgggagaaatacactctttgtgaaactatttatagccaatattcgctttatgcagtttcaccgacagtttttgttaatgttttagatccaaaaaaacataaagcaacggtcagtgataaagaagttcagtttaacagtgaaaaaacggtgattgtaaatgatccagtgttacttgaaacattgaaagtaaaaaaagcatctgccggacaaccgctgacggaaggcgttgactatgaagctgcttttgacagtgatgggaatttagtaattactgcattaagtggcggacagcttacagacagtgcttttttggactatgaaaaaattgatccctcagccgtggataaggatgacattattggtggtattgataccagtacgggcgcatacacaggtcttgagaatctttcaaaagtatttcctctgtatcgtttagtacctggtatggtgcttgctcctggttggacacacgatccagaagtggccgctgttatgactgccaaagcaagtactattaacggtttgtttaaagcttctgttttggtagatgttccggctgacacagtaagaaaatataccgatgttcctgcttggaaaaataataacaattatgttggagtggatcaaatagtctgctggcctatggtaaaacttggcgaaaagaaatatcatctttctactgcggtaatgggggcgatgggcgttttggatgcaaaaaatgatgatattccctatgaaagtccttcaaataaaaatatacaaatggatggtttatgtttgtctgatggaactgaagtggttttagatctggaacaagctaattatcttaatgggcagggtgtagttactgctctgaactttatcggtggatggaagttgtgggggaatcgtactggttgttatcctgcaaatacagatgtaaaagacaattttatttgtttacggcgtatgttcaattggcatgcacagacctttattcaaagttattggtctaaagtagataacccgatgaacaaacgacttattgatcttgtcgtggatagcgaaaatattcgcattaatggatttgtttcaagagggttcttgcttggtggaagaattgaatatttgaaagaggagaatccaacaacagatcagatggatggtattgtaagattccatacttattttacgccaccggttccggcacgtgtcattgaaaatactatcgagtttgatacgtcttatcttgagacgttgtttggttaatgaggaggatgaaagatgagtaataatgttgttccggaaaagctaattaactttagagcctataatgacggaaatgatcttcttggcgtaactgatgtccagctaccgtctttggatgcaatgaccgaaacagtaaagggtgctggtattgccggtgaggtagacagtcctgttttagggcactttgggagtatggaaactgtacttaactggcgtactatttctaaacctggaatgaacctggcatctcaaaagggggttagcttagacctgcgcggcgcgcagcagttttacgaccctgaaaaaagtgagtacgtcgtaaaggctgtaaaatgcgtgatccgcggcgtgccgaaaaaaaccgaactcggcaaattagacgttggaacgactaccggctccagcaacaccattgaaactaattatattaaagtgattattgctggcgaaaccgtgctggaagttgataaatataattatatttctaatattggcggtactgactatcttgccgatgtccgtgaggcgttgggtctgaattaaaaataaataaagggggcggcccgcagagtggtgccccttttaaaatttggaggtaaatgatgaaagtagattataaaaaacttaaacaaggattgggagaactaacgggatatgattttgcggccgcagagcagcaggcaaggattcttggagatggtaccccggaaattgtgtactctaaaacattccatgctgttattgcggcgaaggttttaggtgtcacaattgatgatattaagggtttgccaattagggaatatgttgcagtgacttctaatgtatcagtttttttagtaggcactttgaccgatcaagccctgcaggagttatccgggaaatagcagtatgcttatttgaatatggtaatgttcatttttggtttaatcaaccagtgaacgaattagagaaatggcttgaaacaataagtgccgtaaataaaaaaagaaagcccactgcatgaataatgctgtgggcttttaacgtaaatattctttttttattggggaacgcgaacaaacttcgtcacaatcttttaatactgctatcacttctggatcgtgaatgccatcatatgtgtcaggatcatagaggggcttgtagacgccatcatatttagcagaagaatcatattgtaatgctttttcttcccgtctattttttatcattgcatgaaagaacccgactatacacatcaatataaaaccaatacaaaacaaaattgcaagaataatcataaagctcacctctttatagttattatactataaatttttaatggaggcaaaaaatggcgaatatatttacgacagcatttgttataaatggaatgctatctaatagttttacatcatcgaccaagatggcaaattcgcaattgacagaattacaacagactgttaaaagaatagatcttgctcaaaaaaaattaaatgctgagtttactaatggagctatgagcgtagagcaatatgaaagaaaaatgggtagatatcaagatacgcttaataaaactcagcaacaacagaagttgttacaggatagattgaataaaaaaaatattgcaaattctcagtttgtagagagacgccaaagtttcttaactaccgcagctgctattggcactattgctcagccgttcatctctgcagctcagactgcaatgaaatttgaatttgctatgtcgaaagttggtgctattgcaaatgctacagggcctgaattatctttgttgacgcaaacagcaaggtcattgggcgaacaaacaaagtttactgcgacgcaatccgctgaagcaatgagttatctggggatggccggttggaagacaaatgagattgttgcaggtatgccaggattattaaatttagctgctgccggcaatactgatttagcacgtactgcagatattgtttctgataatctgactgcttttggtttaagtgctgataaagcgcaacatatggctgatgtttatgctgttactataacatccacaaatactaatgtggaaatgttgggagaaacgatgaaatatgctgctcctgtagcacacgcatttggggcatcgatggaggagacagccgctttagcaggtattatggctaatagtggcattaaagcgagtaatgcaggtacagcgctgagagctggtttaattagattggccggaccgcctaaaatggcaagtaaagcgctagagcagctggggctgtcaatggaagatttgacaaatgaacaaaaagaagctgcaatggctttaaaaactttgggtattgaaactggcaatgcagaaggacctcaaaagatggctatcatagtaggccaattgcaagaacgaatgaaaggattaagtaaagaagaacagctggctatgtcgaaagctattttcgggcagcaggcagcagcggggtggctggcagtactacaggcaggacctaaagtgcttggtgatttgacaaattctttagttaacagtgatggtgcgtctgaaaaaatggcaaagcagatgaatgctaatgcagaaggtgcaattatacgtctttcttcggcatttgagtcgttgcaaatatcattagcaaatggatttttacctgtcatagctaatgtaggtgattctttagctgtatggacggggaagttatcggctttagctacagcacacccaatagtagcacaggggatcatatacactattggaacttttgggttattatggcttacatttaaaacgggtagagctattatctccggctataatgcgtttatggctacctgtgctttatggcagacgactttgggaaattgtacggcagtattaagatcaaaaacaatgcttcttgccggcacacaaaggactgtggctttggcaacgaagctgtggagtggtggaatgatgttggtaaatgcggctatggcagcttgccctattggttggttattgattggaatcagtttattagtcgttgccggaactattttatacaggcattgggatacagtcaaacagttctttacaactttgtgggacagtccaatagctagaatagccttttttgtcactgggcctgtaggttggatcattggcgcggttactgcaataattgctaactgggatacattagcggcatattgggattatttttgggataatccatctgctgcaatatttagattcacaagttatattcaggaacaatttacaagtgctgaaacctggcttcgcgaaaaatggcaatctattagtaattttttatctacacctatttttggcaaagttaatattacggcatccggtaatggtgcagaggttgcagaaaatgcgtatggcggtatttatggcagggggacatttcttactacttttgcggaaaactctggtgaaagtgcgatacctcatactcctaataaacgtaatataggcttgctggccaaaactaatgaaatcatgggtaatccattgggtaccagtggcagtataaatgcgacttttgctcctcagattaccgtacaagggaataccgatactgctgaaatttcaactttgttagatcaaaaaatgcgtgaatttaaagcaatgttggcagaagtgcagaatcagaacaggaggctttcgtatggctaaaacctattacacaattcagggcgatatgtgggatggtatagcaaaaaagttatatgacgatgaaagtggcgtaaacgcgctgctggaagcaaaccagcaatatgctgacatagttgtttttccagcaggtattattttggatgtgccggattatgaaaagcctactccaaccaacttgctgccgccgtggaggcgttaaatggaagcacgtagaatattgacgatcataaaatataataataaagatatttcagctgatatcagtaaatatctaaaaagcatcagctataccgataatctatcgggagaagccgatgatttgcagataacactggaagacaaggcggggctttggcaatcgacatggatgccggaaaaaggagcacttctagatgtaatgctgcagcaaaaatattggcaaactttgtcggcgttaccacaaagtttgcgtttgggattgtttgaaatcgatgaaataacaagcagcggctatccgtcagaagtacaaataaaagcagtttccgtgcctgataataatactcttagaggtactgaacgtagccggagttgggaaaaggcaaagctgcaggtaatcgctaatgatatagcttcagctgcaggaatgtcattgttttgggacacagaagaaaatccggtgctggatagggcagaacagacagaacagtctgatctgtcttttttatatgcaatttgtaaggataaaggcctggcattgaaaataagtgataaaaaaatcattatttttgatgaagcaaaatatgaagcggaaaaagcaaagataacaatagtaaaaccaggtaccgtttataaaaaagagtctggaatgaaatatttgtttgttggtactggctacagtttgcgtactaaaattagagatatttatgctgcctgcagagttagttatcagcagggcagttcaaaatctaatattgaggcaacttatactgctgctggtaaaaagggaaaaacattgcaagtaaatgaacaagttgaaagtgttgcggaagcattagatttagcaaaaaaacggttgcgcgaaaaaaataaggatgaagtcactggatctttaaatatgttgggaaactttgtcttattatctggggttacagttaatttattaggatttggagcttttgatgataagtacttgataaccagagcatcacatgatattggcagcggttatacgacaaatatcgatgtaagaaggtgtttaaatggatactaattttataaaaaacataattcgtatcgggagggtatcttctattgacgtcaatacaaatactgcaagagtagctttttctgataaagacgatttggtatctggtaatttaatgattgtaaatcgtggaagcatggtcgacaaggattactggatacctgatattgatgaacaagttctgtgcttaatgctgccaaataaaagtgggcagggattaaatgagggttttattattggttcat

SEQ ID NO: 9974 - DNA, 37440 bp, Unknown
  gut microbiota DNA sequence
tcgaaccgcaggcccaggtgatcatagggcgtttaggaagcagcagctacacgactgatcgtggcaataatgtttatatgggcggtgtaaacagttgcattggacgtttgggtgtagtagcaggcaaaaaagatgcgtcaggcaacgatgtatatctgaaagtgaatatgctgcatgagtttggcggtaaccgtgatgtcaggatgctggcgggcaatggggaaacattgagtgaatcgcaggattacggcgatacctggtttgaactgggtcttggcggcaatatgaagcttggcagacccagtcatttatatggcgatatcgaacgtagctttggcgccgatatccaaaagaaatggcaggtaaatgcaggagtaaggtttgaattttgatttatggttttgataaagatatcgtttctttattgcagtatttagatttgagaagattataaaagcatagaccatattggtctgtgctttttttaattattttattatgcgtaacttattataacttaacagttatatttacaatcttttagtggtaataattttgttaaaaacgaaaagtatcaaaggtgaagaacggataaagcatctgtatcacacaaaaattgtcgtgataattcagaaatgaagtgataaattgatgagaataacttgtcagaaccattaatttattatactataagcgaagtatctatggttttagttgatttgcataagcgaatgaaaaaccaagagcaattgtaaaggagagggttaaactatgaaaaggaaaaaagatgtaattaaaaaagcagtcttggcaagtgttttagcaatgtcattaaataatgtggtgtgggctgctgaaggtgtcgatcagccattttcgacagtaagtgagttggaggcgcttgggggaatagcgtctatcgactccagcagcattagccatgttacgaagggcatttatgccagtggtaatgattttatttataatagcggtgctatcaagctggatattaatggttttgccaactctacaagcagtggctacgattctattggtatttttggctataacagcacgattgacctgaagcagatcgagatgaattttattgatacttcaggaacggtacataatctggatgtttatggtattaagacatatgcttccggagttgtaaaaatcggtgatgattctaaaatcactgtttccggtaatgtcagcggtctggattccaataatcagcctaatgtgatgaagggtatgtatgccggtgataatgcgacaatggattcaggtattattgaagttggcgataatttagagttgaatgttatcaatgcgggaactggctggacttatggtatcgattcttatgacggagctactatttctgttggtgatgggttgaggttatttgttacaggcggaaaggataccagaggagtcgaggttggttttaacgacgctaaggttactttgggggaaaatgcttgtatcattgctaacagcagggatggcgtggcgttgggagtatttgtatttaataaagggaagtttgaggcagctaaggatcttgttattaacgtcagtgcggatgatggaagccaatgggcagcaggtgtgttggcgcaaggcactggcagcgaggctgtattaaatggagctgttatcagtgcgactgagggcggtactgcgagttatgctatttatacttataataacggcagcgtggttggtaatgcgggcaaatataatatttacggcaatatccttaataacagtggcggcacagttgatcttactgctaatagaggatcgtttatcgagggctggataagcactgccagtacagctgaaactaatatttcgctggaggaggcttcctattggaaggtgactggtgattctaacctgacgcatttgcataacgataattcgatagtggatatgactcacgacagtaatattttcagtactttgacggtagataatctcagcggtgagaacggcgttatcaaaatggatatcgatgccagtcagaattcgttgaacagcgacaagctgtatgttaccgatacgttgaccgggacgcagtatattgatttgtacgaggtcaatggttatacgcctgtaggggaagaaggcgtcggtacggtgctggcgactgtcaataaccataacggcagttttgccgctgtagatggtgagggtacgctgtactggaagcgttatgagctggatcatcaggatactgccgatacgagtggtaattatactaaggactggtatttgaagcaggtaacgaatattgatcagcctactaccagtacggatacgatccttgcagccaatgcgctgaactatcacacgtggcggacagaaaacgacaagctgctgcagcgtatgggtgagctgcggcataatggcgaagaagcccggggggcctggttccggctgcggggaacaaaaatcggccgtgacggaaaatttgattttgaaaacaagtatacttcttacgagctgggttacgataccataactaaaaatactgacgacaagatacgttatcagggggcggcggtgagctatgttgacggcgacagcagttacaatcgtggcagcggcgacaacagcagcaaggcgatcagtttctataatacggaaatcggcagtaaagggcattatttggatgtggtgtttaaagtcagtaatctggagaatgattttaaggtgtacgatacgaaaaataataagatcaccggtgattttaacaataccggcgtatcgctgagtgctgaatacggccgtaaaaatgtcttgcacaacggctggtatatcgagccgcaggcccagtttactttaggttatctgggaggtgacagttatactaccagtaatggtatcgaagtcagccagagcgggatcaaaagcgctgtcggacgtatcggattcaatatcggcaaagaggtcggcagcaaaggcgtcgtttatgctaaggccaatctgctgcatgagttcggcggcggttatgatgtaacgatgtatgacggcagggatagagttaaggttggcgatacctttaacgatacctggtttgaatatggtgttggcgccgcttttgccgcaggtaaaaacagtcatgtttatctggatgtggaacgcagctcaggcagtgattttactaaagactggcagtggaacatcggtgccagatggacgttttgataacttggcattgttataggggaatattagcaatgtataagtgagggatgcaggcttgtgaaagcagcgggcagaaattgcaaactgcttttgcatgccattataaagcagggaacaggttaagctggcaatataaaaaccactcagcttttatagttgagtggttttgttgtgcttaatcccagcgttttaaaatatcggcgacgatttctttttgtgtctttttacgttttttcttttcaaagttacgatagttgttatcgcggtggtcggtcgaataatctgcataatctatgtcgttgttttcgtattgttcgtagctgcggttataatcgccgtgtccgtcgtccagcagtagcgggacaaaaactgcagcggcaggcagctgaaagtttacagtcaggttttccatatgggcctccgtcatcaaaggttaatagttgtttatattttaacacggctgcacctgctagtaaatatttttgcagcgattgacaaaaactggcggcggttataccataaaaacataaaggagatgttactgtgagcaaatcttataaagaccagtttaaggaagaaagtgtcaggcgccggcagcgtcagcagaaacagatcgccgctgtaataattttgatcggtgtgctggtttcggctgctatatggtatctagacgggctgagtaaagaacagcaggtgccgcagcagacatctcagcagcagtcggcgcagactgctgagcagccagggcaggaggtcaagccggaaactcctgctgcagagcctcctaaagaggagcaaaagcagccggaagctgttaaacctgcttatacgatattgatagataaaagtgattacaagctgtatgtgctgaaggataacgaagtaattaagcaatggggcgttgctgttggggcaaaaccgggtcaaaagcagcgtgccggcgatatgactacgccgacaggtaattttgaggtggacgagattttagacgcatcgtactggacgcatgatttcggcgacggcaaaggtgagattaaaggggcttacgggcccaatttcatttctctggtaacaggctgggacgggattggtattcatggtacacatgcgccggaatccattggtacgatggtttctgaaggttgtgtgcggatgcgtaacggcgagctgctggagcttctgccctatgtcgaggtcggtactaaagttacgatacgggaataaactgccggacagcctggggacattgatttttacgctgtcacagcttgacaaaaaggtgattctgcgctaaaataacatcgttgcggaactatagctcagttggttagagtacctcgttgacatcgagggggtcactggttcgagtccagttagttccaccagattgaaaagtaaccctataacttcgtcagaagttatagggtttgttttttattatttattacggcattgctgtcaaagttgcggatatgctgaagcataaaagtcaaaagcacctgcgtgaaaacacaggtgctttgtgctccaggcggagcaaaagatatcggctcatcaatatcaagtgagattataacacagatagtcattgctggcaatgttttattatttttcaaaggataggcgccgggctgtttagatttagctgattgttaacttttaatctggatagtgactttgcaaataatatatgctatattgttaagcaaaactataggtgaggtgtttggatggatgcaaacagtactggactgcgggggctgcttgatgtggtgaagtcgaacaggctgatgtcgacaggggtgataggatttcttctgctgatggcggttatggcggtaattgacggtggaataagtatgatgccgctgattttagcaacttgcgcagtggggacggctgctgtatttttttggcaggccggcagctacagagtagatatttatgaaaacgggctggaaatttttggcggggtattaacaagagccggagtatatttgtataaggatattgagagtatcgatatcgaagatacgacatacagattatttggtgtttttccggtactaaaatatacgactgtttccattcagggtaaaaatgacttgtggacgcagctcagcagttttaattttactgatttgaaagtaaaaatgcagcaggtaaaaaaacggttggcaaagtaaaaaacatacataagataggggatgaaatttatgaggatcaaagtaagcggtgagctgggaacggtagttatgagcttggcggtgataggtctttattatggcgctgccagctttctcatcgaaaatgttattctgcgcaatcttactgaagaagaacgggatgaacatattctaagtaagctgttgttctggagcacggtgattttactggttgccgatgttctgctggtcattttaccagccttcgggatgcagttgttgccggtaacgattttagattttatgtagctgagccgataaaaatattaaagaactgtactttggacagtctgtagcttatgataactgctgcaggctgttttttatttgaagttcataattatttcgctggtaacttgaatctgaaatagggtaaaatatagatacaggctgcatgagaatatcgggcggcaattataaaggagtgagagcaaatggcaacaggctatccttttaaaaaatataattttaatgttttgatagatggtaaagcagtagggtatttttcagaagtttcagcacctgagatggctgacgagcccatagaataccgggcaggtgatcatcaggcaggcacgcctgtgaaaatgccgggcttaaaaaagtatggtaacgcaacactgagatggggcacatctgtttcgcggtatttaacggattggtttgaaagtgttgagcgtggagaatttgagcggaaaaatgtgacgatcgagcttttggacgattgccaaaaagtaatggcacgctggcagcttgttaacgcctggcctgttaaacattgtgttccggggtttaacgccgaaagtaatgaaaatgcgatagagaatatggagctggtgcatgaagggctggaacgtgagttttaaaaacagctgtgagaatgaattttaaatattgaatgaggtaattgttatgcgtaagattttggcaggcagggtctatcggcattttaaagggaaggactataaggtgttagttgtggcacagcatactgaaacaggtgagcagtgcgttgtttatcaggctttgtatgatgattttgcttattatgtgcggccttacgcgatgtttgcttccgaggtggatcgtgaaaagtatcccgaggtggagcagcaataccgttttgagctgaccgaggaagaatatgactgattatattttaaacggcgttttaggcttggcggtgggcgatgcgttggggcagccggcgcagggaaaaacacgcgaaagtctgaagttcagcccggtacttgagatgaggcagggtctgtggtcggacgataccagtctgactctgtgcactttagcaagcctgcgcgaaaatgactggcggcttgattatcatgatttgctgcggcgttttgccaagtggctggaatatggctatctgacgcctgaaggcgtggcctttgatattggcgcaacaacgaagcaggcgctgctgaattatttgaacggagtacctctggagtgctgcgcaccgcgtaacgaatggaactgcggtaatggttcgctgatgcggattttgccggtagagttttatttgcaggcacagccggcagcaggacgatatgaaatcattcgtaatgtttcggcgctgacccatgcgcatatttgctgcactttgggatgttttttgtattgtgctgttgccggtgagatcattcagcaccgggagcgttttaagctggcaactttacttgtgcggggtgttatcagggctgtagatgatctgcggcaggtggctgatgcagatgataaccgtgagctgcattattacagccgtattattgaccgcagtgtgtatgaattgccggcagatgaaatcgagagcagcggttatgttgtagatacgctggaagcggcgttgtggtgtctggccaatacaaattcataccgcgaatgtctgttgtgggctgtaaatttgggtgaggatgccgatacagttgctgccgttgccggcagtctggcaggtttgtactatggttatgacagtattccgcacgaatggctggcggggttgaacaataaggaaatgatcgtgcgtgtgtgcggttaggcagaattttaaaaacagcataaagatatggagacaggaatgacagtagcttatgagttgatacgaagtaaacgcaggacgattgctattgtgatcgacagcgagggcaagtgcagggtgcgggcaccgttgcaggcccgtttgagcgatatagaacattttgtgcaggcaaagaccgggtggatagagcagaaacagcagcattatgccgcagtgcagaagaagcggcagctgatattgaccgatgggatgcagttgtctgtattggataacagctatacgctgcgtctgacggaggttgggcaggtgcaggtaaacggtacagtgctgttgtgtccacagttcaaaccgcagcaggcactggaaaaatggctgcggcagcaggctttagcagttttgcaggaacggacagcacattatgcggagttgatgggtgttgtttatcagagtgtgaagctgtcttcagcggcgaaacgctggggttcgtgcagtataaagggaaatttgaatttttcgtggcggctggtattttatccgctggcagttttagattatgttgtggtgcatgagctgagccatattggcaatatgaatcacagccgccgtttttggcagcgtgtagccagtgttttacctgattatcagatgcggcagcgttgtttaaagcagcaggcgtatattttgcagtggttaagatgaaaacccgcttctatattttgtatagaaacgggttttgtttatgctgcaagtttttattttattgttgtttgggaggcatttgtgccagcaggatcgcggcaaagaccagtacgcagcctcctatttcacgcagggaaagctgttcgcccagcagcagccagcctgcgaaaaccgaaaagacggattccatacttaaaatgatggaagctaaaataacattgacgtatttttgaccaaggatctgcagggtataggcgatgccgcaggacatgatgccggcgtataagataggcagccaggcctggtcaagcgcttcccaggacggcgtttcataaaagaagatggcaggcagacttaaaataccgcagacggcaaattgcagcagcgacatccgcacaccgtctaccaatacggaaaaacgttcgatagtgatgatatgcagtgcgaaaaagcaggcgcaggccaaaatgatcatatcgccgtaattgacgctgaaattttcggtaatacagataaaatacataccgacagcggcaataaaaacgctgagccattgcagtttggtaacggttttgtgtacaataagcccgaaaaggggcacgataacgatatagagcgtagtaataaaaccggctttgccgacagtggtatgaccgataccgatctgctgcagagtactggcgatagtcagcacgataccgcagacgatgccgccggtaataaggtcctgctgttctgttttgttatcagtaccccaaatagaaaaaggtctgcctgcaagccggtcaaaaaaggcgacgcaggggatcagaaaaaccgcgccgatcaatgagcggaggccattgaaggtaaatgcgcctacgtggtcggccccgacgctttgtgcgacaaaggccagtccccagatcagggcgcagaaaaacagcatcaggctgccttttaattgatgttgctgcatctataacactcctgttgtttataaaagtatgaacttttatattttagcattattttagggaaagtttaagtaattaggcaaaattttataattcggaaaattcagcagatagtgcattaatggcagatggtgttataattaatgtaaatatttagaaaagatggtggcagattgatgagcagggacttttttgtggcagattttgagtttactcaatataccaaaagaatgggacatccacgaggatttttttcagaaataattgagatcggagcggtgaaaatagatggaaattcccttgcggtcacaggtaagatccaaaattttgtccatccgcatttttatccgaagcaggctaaagagggaatggatttttgtatgatcactgaaaaggatatggaatcagcaatagaatttggagagatgcttgaacagatcaaagctttatatgtaccggggcagacttattttgtggcctggggtgatgaggattataaggtggtggcggaaggctgcagacggcataaattggaaaatcctgttttacctgaagactatcttgatctggcggcagcttataagctgctgaaaggcgatacgtatacgaccgggctgaagaaggcaacagaagaacaaaacgttgatacaggcggtttgtggcatactgcttatgacgatgctgccaataccggcaagctgctggtaaaattgcttgctgacggctggaagccggaggcttactgggacgaggtagcagagctgcataaataaaatacaaaaaaagcttcgcagcgggtaattttatgctgcgaagcttttttataacatttttaatcgcgatacttttcgggaaagaaaatacgcagaatatgttcgtcgtgttctttgccaagggcgttgccgataaggaagaaaatcaacgaagcgccgatgccgataactatctggtgcagatcaaagaatttgatttgcagcgccatagtagtgcagtaggcgagtacgccgccagccatagcgaaaacggcgccgatgcggttggcttttttccagaacagcccgaagatcaggacccagaagaatgctgtttccaggcctccgaaagcgaacatatttattttccagataacgctgggtggggcaatggcaataaagtaaactccaaggccaaggataacggtagcacccatgctgaacagacgtatcgtattattggaaactgttttatggcgtttggagcattcgtgcatatatacgtctttgatgatagcggaagaggaggccagcagcagggaagacacggtagaaatagttgctgcgataggaccgatgatggtgatgccggcccagaaggggttcatggtgccaatgatagtaagcggggtgatgttatcgacgctgccgccgtaagcctgcagggtatcggtaagcacgcccttggaaaggacgccgatccaggtagcgatcagagtcatggcgccgataactacggtgccgataatcatagcgttatgcagggcttttgtgtttttgtaactgataccgcggactactgattgcggtagtgccagtgtacagacaccaacaagcagccactggctgatatagagcgagatcggcattttgccgcgggaaagcggttccagcatatcgggatgattggtttggatatgggtcatgattctttcataaccgcctcctgtttccagcattgagaagaagaggataaaaaggccgatgatcatagcgacggcacagatagcgtcagtaatggcaacgcctttgaagccgccaacagtagtataaaagacaacgatcaggccaaataatgtcagtccagtgacataggagaaacctgtaacagcttcaaagagcttggcagctcccacgaactgggcgaccatcgtcgcacagaagaaggcaacgatcaccagcgcggaaatattggcaagcaaatcggattgatagcggctgcggataacatcgactactgtaacagcgtcaattttgcgtgaaaccatagcgatctttttgccgaaaatacctaaaacgaggaagatgactacgacttgtacgatcgccatataaagccagccataaccgatggcccaggccataccgggaccaccgacaaaggtgctgactgagctgtaggtcgcaacggtagtcatagccaggacaaaaccgcccagactgcggccgccgataaaataatctttagcaaagttctgctggcggtcgccgcgggaagctcgctgcacccaaaagctgacgccaagcataaaggcaaggaataaaagaacaggccagaggtggaagaaattacccattgatttcatcctccttgtcgtccaagtccatatctttaaagatgcaattggcaagaactacagaaacgacgatggcaaacagccaggtgccgatgcagcctgcccagacccacaggggcgtctggaaaaattctaccttaacgtcagcaagaccaaagcctgcgacgcaccaaaagacgatgacaataagaagggctaaccaggtggcatttgcttcccgattagcctgtttgaatttttctttacgattcattttttgctccttctgcagtatcggccaggatgaaaagagtgagcggtccggtctgcgggatttatcgctattattgtaccacatttttgttatttgccaagctatttatcagataaaggagatatttttgggaactggacgattatcaaaacgtttgagcaaaaacgttgcgtcaggcgaagataaaaagttcttgtatgtcttgtgggggggtactcttgtgctataataaggacagaggggaacggagggagaatatgttttataaaaaagtaacttcccgtgatcataaatggttttttctactgcgttatggtgatttaaaagagggtttggaaatgtggagcagccgcagtttaaaatggcagtattttgattatcagcagagcagaagcctgcaggcgattttgaatgacactgacttatgtaatgatattatgccggaagaagccgcagatatcataaaaaaatatcttgatcaggagcaaggatagattccctgctcttttttatttggcaatttataaaagtagctgccggagcaggtcggtgctataatagataatatcctgtaaattgtgaggtaataatgatgattaataaaacacgtattttaaatgaatttatagaactggtcagtgtgccctgtcctagtaaggacgaaaaggccgaagccgatctgctggtacagaagctgcaggcaatgggactggaagtaaaggtggacgatgccggcaggaagatcggcgggacaacaggcaatgtgtgggcatttttaccgggcaatgtagagggtgcagccggactgttttttgaagcacatatggattcagtgccgccgacaacgggaacgaaggtcgtgcgcagggacggagtcctttattctgacggaactactactttaggcggtgatgataaagttggtatagcggctgtgctggaagcagtgcgggccgtgcaggagcagaatatcccgcatggcgatatccagctgtgttttacgattgccgaagagatcggttgtctgggagtggtcaatcttgatccgaaggatatcagggctgatctcggttattgcctggatatcggtggtgcgcccggtatcgttacgaactctgcgccgcggctgttcgatatttattttacagtcaaaggtaagtcggctcatgcaggtatcgagcctgaaaaaggtatcaatgccattatgctggcggcgaaagctttgacggcgctgcctgcttacggacgtcttgatgaagaaactacattaaatataggacagatcgaaggcggtgctgcaacaaacatcgttgcggagcaggctaaattcgtgatcgatatgcgctgtatggaccctgataagctggagcggctgaagaatgaaacgatcaggtgtatcagagaagtggttgaagccggcggcggtattttagaggttgatccggtagaaggctgtcctgctgttcatgtagcggaagaccatacggcggtattgctggctaagcaggcagccgataatctgcagctgccttttgaactgacgaaaacaggtggctgcagtgacggcaatttcctctgcggctatggtttgccctgcgtgcttctagctacaggtatgaacaaggtccatactacagaagagtgcctgcgtgagtgtgatttgtacgactgcgctcgctgggtaacggaaataatccgaattaccggggaaaaatagccaggctgttttcacaataaccaaaaacagaaaattacattaaacgagaaaaatgaaaaagaatattgactttgtgtaaaaacatatctataattgatagtgccgaaagttttgggtgtcctcctgaaatacttggcgtggagccgtaagtttttgcttacggcttttttatataaagaaaagtttagtgtcaggaaaatagtgtatactttgtcagtttaattgactttagccgttaatttttatataattttttattatgatgtttcgactttaaaggagcgataaaacgattatgaagtacatgactggtaatgaaattcgtgagaaatttttaaaattcttcgaagatagaggacatttgatcctgcccagcgcgtcactcattcctcaggatgatccgacgctgcttttgattggcgccggtatggctcctttcaaacctttttttacaggtaaaatgaaaccgccttctcctcgtattgcgacctgccaaaaatgcgtgcgtacaggcgatattgagaatgtcggccgtactgcccgccaccatacttattttgaaatgcttggtaatttctctttcggcgattattttaaaaaagagatcattccctggagctgggaatttgttaccaaagagttggggattcctgctgataagctgtggattactatccataccgaagatgatgaagcttttgatatctggcataatgtcgttggattgcctgaagaacgcatcgtacggttggaagagaatttttgggagatcggcagcggcccctgcggtccctgctccgagattcatgtcgatctgggtgaagaacgcggctgcggcaaaccgacttgtgctgtaggctgcgattgtgaccgtttcctggaaatctggaatctggtattcactcaatataatcaaaatgaagatggtacttatacgccgctggctaacaaaaatattgataccggtgccggtctcgaacgtttggcttccgtgctgcagggcaaaccgtctaattttgaaacggatctgattttcccgatcattgaatatgcatctgaagtagcggctgtagaatatggcagagaaagaaaaaccgatatttctttgaaggtaattgccgaccatgcccgcagtatgacttttatgatcgccgacggtatcctgccttccaatgaaggccgcggttatgttttacgtcgcattctgcgccgtgctgtacgtcacggacgtttgatcggcatcgacaaaatgtttttggccggtgctgtggatgtggttattgaaatgtacggtcatgtttatccaaacctggtcgaaaaacgcgaatatatccaaaaagttatcgaaatggaagaaacaagcttcctgcgtactctgcgtcagggcagtgaactgctgagcgacgagatagctaaattagaggcggcaggcgctacggtactggatggagctacagcttttaaactgaacgatacctttggctttccgtgggaactgactgctgaaatcttggaagaaaacggaatgacgatggataaagctggttttgacgcggcgctggaggttcagcgtaaaatggcgcgtgaagcccgtgatgataaagcaggccgtccggttatttataatacccgcggtattgatattgcttccttaaaggttgatgaagctgcagatacaggtaaaatcgttatgctgtaccctgcgcatgacgcacagccgatcgaaaatgcagaagatggtaaagacgttgccgttattcttgatgttactgcctttcatgctgaaggcggcggccagttaggtgatttgggccgtatcactgctcctacaggtgtgattgaagttgaaaataccaaaaaactgccggacggcgctacgatccagattgggcgtgtagttgaaggtacggtcaatgtgggcgatgcggtaacttacgaagtaaacagctgccgcaaaagcgatattgcccgtaatcatacggcaacgcatttgctgcacgcagctttgaaatctgtcttaggcggtcatgtcaatcaggcaggcagttatgtaggtccggaccgtctgcgtttcgacttttcgcatttctcgccggtaacagaagaagaactgagccgcgtcgaagctattgttaatgaagagattttggcagccaagggtgtgaccattgaagaactgccgattgaagaagctaaaaaacgtggtgcgatggcgctgtttggcgaaaaatatggcgatatcgtgcgtgtcgttactgtaccgggtttctctatggaattctgcggcggtgttcatgtgactaataccgctcagatcggtatgtttaaaataatttccgagtccagcaccggtgctggcgttcgccgtatcgaagctgtgacaggacatggcgctgtggctcatgtcaacgaaatggaagctatggtaaaaggcctggctgcaagcttgaaatgccgtgtaactgatgtgcctgcacgtttgacagctctgcagggcgaactgaaagctgttgagcaaaaagctgccgagctggccgataagatcgctaaagctcaggtcagtgacgttgacagtcagattcgcgacatcaaaggtatcaaagctttagtgcagcaggtcagtgtcgatgatatcgaagcactgcgtaatctgggtgaccagatgcgtgataaggtcggcggcgtcgttgtgctggcttcagtatttgccgaaggcaagatcagtattctgactatggctacgaaagatgctgtcgctaaaggtatccatgccggcaacattgtcaaagaggttgccaggatctgcggcggcggcggcggcggacgtcctgatatggcacaggcaggcggtaaagatgcttctaaattaggtgaagcgttggaaacagcctggggcgttatcgaaacacaggtaaaataataaattgtgtaaaaaaacttaaaggccgagagtattctcggcctttatttatacaagttcacagttattttatatttttttgtctcaaggtatgctacaataatagtgtatctatatcaaacggttgttcaacaagggaattttgtatcaaggagggatcaacgatgactcaggtatcgcaggaaacaatgatgttcaagcgcaacaatgaaaataaagacgtctctcaaacaatcagcgaggtgtgcaaagcgctggaagaaaaaggctataatcctattgaccagctcgtaggttatctgctcagcggcgatcctacatatattaccagtcatgatgacgcacgcacgaagctgcgtcgttttgaacgttatgagcttattgaagaactggtagtaaaatatttggaaaaaaacacaaaataagacggggagagctgcttacatgagaagtatgtctctggatgtcggcacgcggactatcggcgtagccgccagtgatctgatggggatgatcgccaacggggtggaaacaatccgtcgtaccagtgaagaacgtgatctgcagcgtatcggcgagcttatcgctgaatatgaagtagatacgatggtggtaggttatcctaagaatatgaacggcagtgtaggcgaacgtgcgcagagctgcgaggattttgccagagtgatcggcgaaaggttccagcagcttaaaatcgtcttatgggacgagcgtctttcgacagttgccgctgaaaaagttttgatagatgccgacctgcgccgcagcaaacgcaaaaaagttatcgacatgatggcggctgtggtgattctgcaaaattatctggatagtccacaaagtaaaaggacggaatgaaagtatggcgaaaaaaatatttatcggctttgttgcgctggttctggttgctttcgtgctgctgttccagttcggaggccgtgctgccgaagagctcactaaaaagcttctggcagagcagactgcgctgcaggggactttaaaagctgaagaaattcaggctaactggtcgggtgatgttattttcaaaaatgtcgtctgggtagggccggatggcaaaacgattgccgaaatacctctggctacggtatctgtcaatttatttgacgctttgctgaaaggcggtaccggagcttctgttggtgatgtggtgatcgataagcccagtttttttgtgtcttataataaaaaagacggtttgaacattgtcaattatatcaattttcaggttgaagaagagcagaagaacaatgagctgctgactgtaaaaaaggcggctgcagcaacgcagttccgcggtttgatggaaatcaaggacgcgaaggtgaatctgctgctggagaacaagccgctggattttgataaagtacagttccagggaaattttaaacaatatccaaaaatcaaatacggtctgcgtgttaaagatggtaaaagcgatattatcgctgacatccaaaatgattcaggcacgacggcagttgtggcagaggtaaagaaaatgccgctgcagaatatcctgaatgttttgccgcaggctgctgatgtggttatcactgaaggtaatctgcctgacgtaaaaatcagggctgataaagccgatgataaatggactttgaatatcgacggtacgatcgacggtttgaaaggttctttgatcaattatcctgtaacgaaaggcagcggcaagttttcggctgataccgaggctttgaagtttgccggactgaatctggaggttgccggacagacggtgatcatagacggcaatgtttattatgctgaaaagccggaggcaaaacagacatatgctttgactgttaatgcgccgagctttgtgatagaagctttgagtccgggcctgggcttgaaggatgctgttaccgctttgggtaaggtcaagggtactatcgacaaacctgaggctgaaggcaccttcggacttgataagctggcctacgatccgctttatattactgcgctcagcggcaagtttctgtataaagacggaaagcttaatatcggtgatgctattggtaatgtttatgctggtcaggtcaatgtcaatggtcagattgatactaaaaccaaagacttcaaactggaagtacagggtatagacctcgacagctccgtagttacggaaacgcaggtcgacggtccgctgtcatttaaaatgctggcgataggaactgctgatgcaggcagtgccacaggtgcgggcagcttccgcatcgaggaaggcaagtacatgatgctgccgttccgttccatcaaaggttcgatcaccagacagcagggaaaatttgctttttccaatatcaagatcgctaccgctgtcggcagctttgatactaatatcatagttaaagataacggtaagcttggatttgatctggataaaggttttttagctgcacagcttggtgaaaaatgataaattgacagcattactgtaaatgatataaaatgtatataatttagaaacgaggtgtcgtaatggaccaaacagaaaataaagaaaatatggaagctatggaagaagaacaaatcgtagttattactgacgatgaaggcaacgaattatattttcgtgaagaaatggtagtacctgtaggcaagaaaaatttcgctattttagcgcagatcaatttggaagactgcgaatgtgaagatgaagattgtcactgccatgaacatgaggaagacgaagaagaaaatgtgattatcgcccgtattgagtttgatgaaaacggcgaagaagtttatttagctcctacagacgaagagtttgatgaagtaaaagctgcttacgaaaaactcatggaagactgggacgaagaataacaactgctagtgccggacatactgtccggcactttttgagctttattatctctggtgtgaagggaatggaaaaatgaggaaggtactgccattttttttaggcatctttctggtagttgtagtaggtgcttactgggtattgaactacactggcagcaataaagatctggcgactggaagcccgtatctgattacggttgagccggggatgactactgcggatatcgcaaatcttctgcataagcagaaattggtgaaaactccggaagcgtttcgactggaagccaaattccgtggattggaacgcgatctgcaggccgggcgttatgaaataacagccgggatgtctaacagtgagatcgttgaagttctgtcaaagggacaggtgcagcgggtgaagtttacggttccagaaggctttaccgtagttaaaactgcgaaaaaaattgaggcggaaggtcttggttctgctgaaaagttcatcgaagccgcgcgtaattatactccatatccctatatggaaaccagtgattctaatgttatttataaggcggaaggatttatttttccctctacctatatgtttgacatcggtatgaatgaaaaagatatgctggccatgatggtcaaggaattcaatacgcagatgaacaaagaaaatattccggaagaagcagaaaaacagaaaatgtcgatcagagatctggtaaatatggctgccctggtagagatggaagctgtttttaaagaagaacagccgcgcattgccggagtttttctgcgtcgcttagagatttatatgccgattcagtcagatactactattcagtatattttggggactcaaaaagaagaaattacaattgcagataccaggattcaaaacccttataacacttatcaaaatccaggtttgccgccgggaccgatttccagtcctgggatgagtgcgatcaaggctgttttaaatcctgaaaaaacggagtatttatactttgttgctgaaaaagacggacatcaccgttttacgaaaacttatgccgagcatttgaaggcaatcgaagatattcatggaccacaataaggaagtaatatgacgagaatgaaaaataagccggagcttttggcgccggcaggaaatatggaaaaatgtaaaatagctttgcgttatggcgctgatgccgtttatttgggtggtaagatgtttgggctgcgggcttttgccaataatttcagtattgaagaaattgcagaagcggctgcttacgcgcacggacttggcaaaaaggtctatgtgacggttaatatttttgcccataacgaagatttggccagactgccggactatctgctggaattgcagcaggccggagttgacgctttgcttatttctgatctgggtgtttggaacgtggcacgtcagactgtacctgaaatgccgctgcatgtaagtacgcaggctaatacaagtaactgggcagcagtgcaggcatggaaggcactgggagctgaacgtgtcgtgctggcacgcgagctgtcactggaggaaatccgggaaatcggtgcaaggactgatgttgagctggaagcctttgtgcatggagcaatgtgtatctcatattccggccgctgtctgctcagcagttatctgactggacgcgacggcaaccgtggtgcctgtgcgcaggcctgccgctgggaatacagccttatcgaaaagaaccgtcctgatgaaggctttgatattgaagaggatgaacgcggtacttatgtaatgaattcaaaagatctgtgtctgatcgatcatattcctgatttgatagaggggggcatttgcagcctgaaaatcgaagggcgtatgaaaagtatccattatgtagcgactgtggtcagcgtataccgtaaagcgatcgacgcttactgtaacgatcccaaaaaatatcaggtcacggatgaatggcgtcaggagttggaaaaagtttctcaccggccgtatacgaaagggtttgcttttggcaaaccaggcagtgacggacaggtctatacgacctccagttatgaacagacacatgattttgtcggtatcgtgcttgcatatgatgctgacgctaaacgcgcttatattgaacagcgcaacaatgtgaaaaacggcgaggtattggaactgctgatgccggacggggaactgttcccgctaactttagaggatatgcgtaatgcagacggagaaagtatcgactgtgcaccgcatgctcaacaaaaattttctatcgtcagcgacagggctttgatgcctgattcgctgctgcggaggaaggtaatatgttagaagaccgaagtaccatctacgcgaaggtggcgcctgagcgtatagcagacgtaaactggatcatggagggctatgagcatctggccttagtcagcacgattgatcatcaggaaggcatcattcttttgcgtggtacgcctgatacctataatgatgttttagaaattgttgaaaatatgccgttttcagtagaaattcttgaaagttttaatgaagctttgtaggcaaattgtcaaaagtgtgataaaatatttgggtatcgtattattttataaaaaaagtgaggtaaggatttatgccgcgtatcggtaaaatctttgattttctggaaaaagaacatttggattgcgtcgttattaaagacgttaatacaattcgctatttgaccggcttcagaggtgattcgagcattctttatgccgatgaccgtcgggctgtccttgtcactgatggcagatacttgtatcaagcaagggcagaagccaaatgctgccatatcgtcgaatatgcggaaaacatctggcatacagttgccgaattggcgcaggatgctaaaacagttggttttgacggcgattatttcacttataatgacttcaatactttgcaggagcttctatgcggcaaagaactgaaggtcattgacctgaaatatatccgtatggtcaaagataaacgcgagctggaattgatgtggcgcgctgtaaaaattgccgacgaggcgtatttgcggttgctggatgaattacagcccggcatgactgaaaaaactctggctggccgcctggaatactatatgcgcagcctgggagcagaaaaactcgcttttgaaactatcgtagcttcgggtgaacgttctgcgctgccgcatggtatcgcttccgataaagaagtggagatcggcgactttattacttttgatttcggtgcagtttatgacggctatcattctgatatgacccgtaccgttgtcttggggatggccaactcatggcataaagaaatttataccattgttgaagaagcccagtggcgcggtttgaaaaatgctaaacccggtattaccggtgcagagctggacgctgttgtcagggattatataacttcccgggggtatggcgaaaactatgtgcatgggctgggacatggtatcggtcttgagatccatgaaatgccgaatatcaacaaacgcggtcagaatgtaattttgcagcccggtatgacatttactgttgaacctggtatttacatccccggcaagggcggtgtacgtatagaagacacggttgtgttgaccgacgaaggcgcaaaagtgctgaccggggttaaaaaacagctgatggaaattgtttaattttttatataggaggactatttatgatttctactaacgaatttaagactaatgtgactgttactattgacggcgatgcctggcaagtcgttgagttccagcatgtaaaacctggtaagggtgcagcttttgtccgcgctaaaatgcgtaacatgtgtactggttctgttgttgaacgtacctttaatgcaggcgaacgtctgcctaaagcacgtgttgaccgtcgtgaaatgcaatatttatatgaatctgacggacaatatgtttttatggataacgaaaactatgagcagaccgaattgacaaaagagcagttgggtaatgctttgaacttcctgaaagaaaatatggatgttaaaatcatggtttacgaaggccgtattctcggtgttgacctgccgaatactgttgaactgaccgtagttgaaaccgatcccggcatccgcggcgataccgctaccggcggcagcaaaccggctaaaatggataccggttatgttgtaaaagttcctctgttcataaacgaaggcgatgttcttcgcatcgataccagaactggcgaatatatcgaacgtgcataattaaaagcgactgtttaaacagcggtgaatttactttcgccgctgtttttttatgcatttatacatagtattcacgcagtagttatggtataattaaaagcaaaatagggtaagtatattctgttgccgcacagacaggaggtggcatggtagttgaaatcagattctgaagataaagaattggaaaccggtacaggggagtttgtgaatgcagacgatgcagctgagaaagaagaacagctgcctgacgaaatcggtgatgtgaaagttgccgacgaagtaatcagtatcgttgcaggactggctgcgcaggaagtcaacggtgttattggtatgagcggcagttttgccgaaggcctgaatgaatttttaggtaagaaaagttttgccaagggtgtacggatcaccgtcgatgggcatgttgtgacagccgcagtttatgttaatgttgaatatggttcatgtatccctgaaatagctttggaaatacaggaaaaggttaaagaagcaatcgagaacatgaccggttatgaagtcaaattcgtcgatgtgcatatacagggcgtggcgcgccgacccaagagcgaattggaagagagcctggaaaaaatggacgccgcccatgaaaatttctttggtgaggagtgagttattttgggaatacctgatagaataattttaactttatacacttttttgatggcagtagtggctgttttggtagtgctttgcagcttgggcgttatcggccagactgctatcactgctttctttgctactattcccggcaactgggagtatgcggtgggcgggatcatcattctgctggtaagtatccgcctgcttattgcaggtattggcgcgactggaatgacttcgctgacgatcagcagtgccgattccggtaaagtatctgtcggtaaaagcgctattgaagattatgtagcggagatcgctaaagaggtttatggtgtttatggcgttaaggtcgaggcaaaaatgggcgaagaacatatcagcattcgcatcaatgcgtcgatagagcctggtataaatattcctgaaactacagatgaaattaaatataatgtacgtgatacgatcaaaaaggtcttgggtatggagatcaaggacatagatctgttcttcaagcagatcaaagcgaaaggctgaggaggtagacggcatgcttaacgaaattttcagtgatctttggaagaattaccgtggccggctgctggggtctatatttggtctgtttatcggcgtaatgtttttgatcttaggctttctgcagacgatttttctgctcatatgtattactgccgggttcttcctcggcaataagctggacaaaaaagaagacctgatggaatggctggacagactgctgccgccaggctatcataaataaatttcagacaagagagggctaatatgattcgcaggattgcaagggaattggttttacaaagtttgtttcagatagattttgctcaggtcgactgtgaggcagcgttgaatgctgctgttgaagaacggtctgataaaagtgctgaaaaagccaaagagtatgcacaggatgttttaaatggtgttttggctaatagtgaagcgatagatgccaggatcagtgagtatgctattgactggaccttggagcgtatgccggctgtcgaccgtaatattttgcgggtcgccgtttatgaaatgttttttgcagcagaaaagctggtgcctaatgtggcaatcaacgaagctgtggaaatagcgaaaatttatggaacagatgatactccgcggtttatcaacggagttctaggtaaaatggttcgcagtgatgtctaaaaatgaggtctatctgggcattgataccagctgctatacaacgtcggtcgcactgatcggcagagaaggcggactggtaggtgaggcccgcaggattttacaagtgaaaccgggctgcagaggtctgcagcagtcggagatggtgtttcagcatacgcgtaacctgccgattttgctggaagaggttttaaaaaagccgctgaaagtcatcggtatcggtgtttctgcccgcccgcggcccttggaagattcgtatatgccagcatttttggttgggttgggcctggcgcgctctttagcggctgtaaacgaaattccgttatggcagatcagccatcaggaaaatcatttggaagccggattgtggtcagcgcaggggcctgatgccgaccgttttctgcttttacatgcttccggcggtactactgacttattattagcggaaaaacaaactgacagcacttatgcactgacacaggcaggcggcagcaaagatctgcatgccggtcagtttgttgatagagtaggtgttgcgttgggactgcagtttccggcaggagccgctttagaacaactggcggcaactgcggccgattgcatcgaattgccggtagcagtacgtcagggtgacgtcagtttatccgggcctgctactgctgctttgcgtaaaatcgaggctggcgctgatcctgcagctttggcggcaggtgtgcaatatgccatggcagaaacctttgtcaggatgatccgtaacgtggcagcgcagaaagaaatttttgatgttttgctggtaggcggtgtggtttctaatgcttatatccgccgtcatatgatagaaaagcttgctaaacgcaggatcagggtctggatacccgaaagccggtttagccccgataatgctgccggctgcgctgcttatgcgttcaggcagggagaaagcagttatgaatgaagtaatttattccgtaagtgaattgaatttgatgatcaaaagcctgctggagggcgatcgtacttttactaatatccagatccagggtgaaatctctaattttaaacgttattcttcagggcattgttattttaccttgaaagatgccggcggcgtactgaaagcagttatgtttcgcaatcaggcgcgcagtctgcgatttgaaccgcaaaatggtgatactgttgtggctatcgggcgtgtcggagtgtacgagcgcgatggcgtttatcagctttatacagacctgctgctgccgttaggtgctggagatctgatgctggcttatgaagaattaaagaaaaaacttactgaggaggggttgtttgacagtgaacgtaaacgtgaactgccgctgaaccctaaaacagttggaatgataacatcgccttccggtgctgctgtacgtgatatgattactgtcgcgcggcggcgcaatcgcggcatcaagctgttgctgtttcctgtcaaggtgcagggagatggttctgctgctgaaattgtcagggcgatccggtttatgaataaacaccgtttggctgacgtcctgatcgtgggacgcggcggcggttccatagaagaattgtgggcttttaatgaagagcctgttgtgcgtgctattgctgcgtctgaaataccagtagtttcagcagtagggcacgaaactgattttacattgtcagattttgctgctgaccgcagggcagctactccttcacaggctgctgagctggttgttgcagatgctgattcgtatctgcgctatgttgaggaactgacagcacgcggcgagcgggtgcttgtgcatcaactggaacaggcgcagcataagctgcagcggcttcagggatcatgggctttagccaagccggaacgctggctggagccattgcagcagcgtacggatatggcgatgcggcagctgcagggcaggatggaaagtattctgcagaaacggcagcacaagtttggactgctggcagcgcggcttgatgctttatcaccgctgacggtacttgccagaggttattcgataaccaagacagactcaggcagggctttgcgcagtatcgcagatgtgcgctggggagaagaactcaggactcaggttgctgacggtgatgtgatatcggttgtgcagcaggtagaaaggcgtgaaaaacaatgacgatgaaaaaaatcgccaaaaacataaagtttgaagaagcgttggccgagctggaacagcaggtacagctgctggaaagtggagaactgccgctggaagaagcgctggcagcgtttcagcagggcgttgctttgagtaaggtatgcatgactaaactcaatacggtgcagcaggaagtagaaaaaatcgtcgttgctgctgacgacgataacgaatatgaactggaaacattcgcagagctggaggattgacatggattttaataagtattacgaagacaggcagaagctggtcaatacttttctggaaaaacgtttggaaaaaaagggcatctcgcgtgtcgatgaagcaatggcttacagcctgctggcaggtggcaagcgtatccgtcccataattttaatggcaacagccgatgctttgggtgtcagcggttataattttctgccggtagcctgtggtttagaaatgatccacacctattcgctgatccatgatgatctgccttgtatggatgatgatgaatatcgtcgcggccgtttgaccaaccacaaggtttttggggaagcgctggcgcttttggctggtgacgctttactgacccttgcctttgaagtgatgctggaacaaaaaaatgtaccggcggaagctttgatcgaaactgtgcgcgaagtagcaatgtgtgccggaaacttcggtatggtcggcggtcaggtcattgatcttgattccgaaggcaggcagatcagtgaagaagaactgcgtaagctgcatgcaggcaaaacaggagcacttttcattgcggcagttcgcagtggtgcgcgattgtctggtgctgccagtgatgagctgctggctttgacaaaatttgccgatcttttggggcttgctttccagatcacagacgatatccttgatgtcgagggtgatgctgctcagatgggcaaggcagcgcatagtgatgagaaaaagcataagtccacttatgtgaccttatatactctggaaggcgccaaagcgctggctcagaaaactgttgacgaggcgctgggctgtctggaaatgtttggagaaaatgccgaagctctgcgtgagattacaaaaatgatgtgcgggcgtaaaagctaagttatttgttattgagaagaaaggcggattgctgaatgcaaaatgagcaattattgcaaaaaataaattctcccgcagatctgaaaatgctgactttggatgaaatgaagcttttagcaggcgagatcaggcatctgatcattgatgtcgtttctaaaaacggcggccatttagctcctaatttaggtgtggtagaactgactttggctttgcataaagtatttacgacaccgaaggataaaattatctgggacgtaggccatcagtcatacatccataaaatactgacggggcgtaaggaccagtttccgacgctgcggcaatataaaggactgtcaggattcccgaagcgtaaagaaagcgagcacgatgcttttggtacaggacattccagcacatccatctcagctgctttggggatggctgtagcacgtgatcttaaaggtgaagataataatgttattgccgttatcggtgatggttcgatgactggcggtatgtcttttgaagctttgaataatgccggcgatctgcataaaaaaatgatcgttattttaaacgacaacgaaatgtctatttctaaaaatgtcggcgcgatgtcacagtatttgtgcgatctgcgcacaggtgaaacctataacaaaatcaaacacgatgttgaaggctggctgaaaagcctggacttcggcactgatgttttaaatgctatcgaacgtgttaaaggcagtgtaaagtacctgatggtaccaagctctgtttttgaagagttgggctttaaatatcttggcccgattgacggccatgatttgaataagctgctggaggttttggaagcggcaaagcatgtcgatggtcctgttttagtgcatgtgatcactaaaaaaggtaaaggctatgaacctgcagaaaaaagtccgaataaatttcatggcacgggtccgtttgagattgcaacaggtaaaaaaatcaccgatccacaggctccgatcgcttacacggaaatgtttggtaaaactttggtcgaactagctgaacaagatgcggatattgttgctatcacagcggctatgcctgacggcaccggtcttaacaaatttgccgaatgctatccgcagcgctttttggacgtaggtatcgctgagcagcatgctgttactgcggctgccggtatggcggctgctggaatgaagcctgttgttgcggtgtattctacatttttacaaagagcgtatgattcggtgctgcacgatatctgcatgcaggatctgcatgtaacgatgtgccttgaccgtgccggtatcgtcggtgacgacggttttacacatcatggtgtttttgattatgcttatctgcgttcgatgcccaggatgacgattatggcacctaaggacgaaaacgaacttcgtcagatgctgaacacggcattacaattcaacggaccgatcgcgatccgttatccgcgcggcagcggtattggcgttgcctgtgaagacgaactgaaagaacttcctattggtaaaggtgagcttttgcgggaaggtacagatgtttgcctgctggcaatcggcagcatggtgcaaacagctttgcagactgctgatgctttggcggcaaacggtattcaggctggtgtgatcaatctgcgttttgccaaacctcttgataaagaattgatcgttcaggcggccgaaaaatatggaaaactggtcactctggaagaaggagtgctggctggcggtgttggctctgcagttttagagctgcttaataaagccggtctgatgcaaaaggtgcaggtcttaaatttgggactccctgacgagtttgtgccgcatggtgacaaaaaatatttgttccgggatctgggtttagatacagaaagtataaaagaaaaaattactgctttggtgaaaggtgccggagaagcaaagtgaaaaaagaacgattagacgcactgctgacagccagaggattttttgaaagccgggcaagggctcaggctgccattatggcaggtcaggtgctggtcaatgaacagaaaatagataaaccggggacacaggttcccgaagaggcagcgatacgcctgctgggcgaaaaacttaaatatgtgagccgcggtgggctgaaattggaaaaggcattgcagatattccccatcagcgtagaaggtaaaacagttgcggatatcggcgcttccacaggcggattttccgactgtgccctgcagaatggcgctgttaaagtgtacgccgttgatgtaggctatggtcagctggcctggaagctgcgcagtgatgagcgtgtcgtaaatatggaacgcactaacgtgcgctatcttgaagctgaaagcttgggagaactggtagacgcagtaactatcgacgtggcatttatttctttggataaggtgctgccggcggtacataaactgcttaagccaactggctttgttattgcgcttgttaagccgcagtttgaggccggcaaagaaaacgtcggaaaaaaaggtgtcgtacgcgaccctaaggtacatgccgacgttatcaaaaaagtagtagcttttgctaaagaagaaggttttggtattgccggactggatttttctcctatcaaagggcctgaaggcaatattgagtacttactgcatctgacactgggtgatgacaatgcggtaagtgaaactatgattgacgagcttgtatccaaatcacatggtgatttggataaaccacagacccaggagtagaaacagcgaggcttttatgaataaattacggttggggatattccccaatatgaaaaaagaaaatgtcaaaaacagtttgccgaaagtgttggatttgtgcgataaggctgaaatcgaggcggtactgccgcagcgtctggattatcaggacaggcccagctacgacgtttgcgacagggcaagcctgaagcagatgcatatggcggtatctttaggcggcgatggtacgctgctgcagatgacgagatttttggcgccgctgaaaatccctgtatttggtgtcaattttgggaaattaggctttttagcagaaatagaacttaaagaactgccggaagccttatccaagctgacggccggagaatatgtgctggaagagcgcagtcagctgcaggcctgtgtttggcgtgacggtaaggttttgattgacgctcacgccttaaacgatatggtagtggccaaggggcatttttcaaagctggcgcatctcagtctgaaggtcaatggcaaacgttcgggcaattatgccgctgacggtatcatcatggcaacggctacaggctctactgcgtattcgttatcggcaggggggccgcttgtacatcccagcctcgatgttactattattacgcctatctgcgctcatgcgctttatacaagaccgcttttgattccgatggacagggtcatagaactgaatgctattccgccctatgaagaactgttgctttcggcggatggagaaatagtagcatcgatagcggaaaatgatacggtaagaattgccaaaagccctgacaaagtaacttttatcaggctcaatggccgcagttattatgaaacctggcaggaaaagctgatccgtaatacggaaatgctttaaaatacccaaccgcttacaaatacagatatgaggtgagagacgtgaaaggtatcagacacggcaagatcaaagaaatcatcgaacacagcaaaatcgaaactcaggaagatttggcggctgctttacgccacgacggtatcgaggtaactcaggctactgtttcccgcgacatcaaagagctgatgctcattaaagttccggatgccgaaggcaattatcattatgcttttcctaaagaacataatatgctgctgactcccggacgtctggaacgtactttccaggattctatcataggcatgcgtgcctctgaaaatctggtagttgtccgcagtcttcccggtactgcacaatcggtagcttatgctattgattatatgaaatggccggaggttttggggactgtcgccggtgatgatactatttttgttgctgtcgattcaaaagataacactgtaacctttatggaacgctttaataatcgctgataggacgaggtcgtttaacgatgctgcaatctttgcatgtgcataattttgctttaattgaagatgcgaaaatagattttgcccccggtttcaatatttttacaggtgagaccggtgcaggtaagtctattttgatcgatgcttttggcgtcgtgctgggtgatcgggcttcggcggactatatccgcagcggagctgattccttttgggtgcaggcggtattcgatatcagcgggatagaagcagttaagtctttgctggcagagcaggggatagacgaagaggacgaactgtttttgaggcggcgtattttagccaacggcaaaagccaggctacagttaacggcgtgcaggtaccattggcagtactcaaaagcttcagcgaacttttggtcgatattcatggccagcatgaaaaccaggcacttttaaagtctgatgcaccgttggcattggtcgatttgtatggacgggaagagattgctcctgtgcgtaaaacgtatcgggagctgtatacagcttatctggctacgcaggcgaagctgacacagctggagcaaaccggcagtgagcgggaacgcattttagaccgtctggaatgggaaatcaaagaaattactgaggccgcattggaagcaggcgaacttgaagccttacaggaagaggtaaaacgtctgcagaacagcggcaagatcatgacagcagtcaacagtgctcatgaatatcttgacagcgaaagaggtattcttgataatttggcggcagctaaagatcagctggcggcagttgtgcgttatgatgaacggctgcataatgcgtgtgaaagcctggaaggcagctggatcgcattggatgaatgccggcgtgagctgagcgattatctaagcagagaggaatatgatgctgcaagagcagcttatgtagaggaacgcttggatctgtggtatcgtctgcagaaaaaatacggcgacagctatgaagcgatcactgcatacttagggcaggcacagcagcaggccgatgaattggcgcagctggaaagcaacattgctaaaacaaaacagctgctggcgcagcaaaaaggtgaattggaacagcaggcgcaaagcttatcgcagctgcgcgctaaatatgccgggcggctggcatctaaagttacggtacatatccatgatctggcgatgccggaaggcaggtttgagatcgaggtaactgctaaagacaccctgactaaaacaggtaaggatgaattgaccttcctgtttacagctaacctgggagaaccgatcagacccttgttaaaagtcgcttccggcggcgagctgtcacgtgtggcgctggctattaaaacggtgcttctaaatgccagcggtgtaccgacaatggtttttgacgagatcgatacaggcgtcggcggcgttaccgcacagaaaatggccgaaaagatcgctgttattgccaaggtaggacaggtactgtgtatcacgcatttgccacagatagcttcttttgctgacaggcatcttctgatccgcaaggaaagtacaggcggacgaacttcaacagggttgactgtactggatgaagaaggccgtatccaggaactgatgaggatgacagtcggcgataatgtcagcgaagtagcctacgctaatgctaaagagcttttagcagcggctgctaaaaataaacaggcaaggtgagagctatgaaaaaatttcatcaggcaaatttagatgaaacctttatctgcagtaaagtaggattttcaggacgcctgctgcaggtgaatattgattcggtaatcttgccgaacggaagagaaacgacacgtgaactgatccatcatccgggggctgtagctattgttcctattttagacgatggcagtattatttttgtaaaacaataccgttatcctgtgggaacagtaatgtatgagatcccggcagggaaacttgacccgggtgaagaaccggacgtatgtgctgagcgggaactgtcggaagaaaccggttatagtgcgaaggaatggcaaaggctgacttctatcgttactacaccgggcttcactgatgaagttattcacctgtatgcggcgcgcggtttggaaaaacacaaccagcatactgatgaagatgagtttatcgatgtcgtaaaattaacgccgcagcaggtcagggaaatggtgctggaaggcgatatcttcgattctaaaactctaagcgctttatgtgtattggaaatgctgaaataaaacttaataagtgatttgaacgcagactgtttctgacagtctgcgttttttgtattttggtagttggaaaagttctatagatggtttataacagagaagctgcggttattgttacttgcgttacactttgttgttttaaaaacggtaaattcttaaatttcagctaaaatgcaggaaaagcccttgcaaccagcgaattgtaataacatcaaattttgtaggacaagggggagtaatcatgaaagagtatactggagataggatcagaaacgtggccattgtgggtcacggtggggctggaacgacgtctgttaccgaagccttactgtatcgttcgggagcaatttccagaatgtgcaaggtagaagacggggctaccaccactgactatgagccggaagaaatcaaacgcggcgtatctgtcaatgcaactttggcgcctgttgaatggcgtgataccaaaatcaattttattgatacaccaggctttgccgactttgtagccgaggtcaaaggcgctttccgtgccgttgacagcgctttgatcgttgtatgcgctacttcgggcgtgcaggttggcactgagcagtgctggaagttggcagaagaagcacatttgccgcgtatcattttcgttaataagatggatcgtgaaaatgctgattttgatagtatccttgacaacctgcgtgctaagatcggtaaacgtgtattgccgctgcaattacctctcggtaaggaagccgatttctgcggcgttatcgacctctacaaaatgaaggcttataaagctaacggcaacgattccatcgaaatggacattcctgaagatatgctggagtatgccaaagaagcgcatgaaaaaatggtcgaagctgctgttgaggctgatgatgactgcatgatgcgttatctggaaggcgaaactatcagcgatgaggaaattatggattgcctgatcaaaggcattcgtcaagcgattattttccctgtcctttgcggaagcgcatataaagatattggcttgggacgcgttatgaacgcgattatcgattttacctatccggctattctgaatgactttgttgttacgaatccggaaactgaagaagaagagatccgcgatgccaacgcacctatggcagctttggttttcaaaactacgtctgatccttttgttggccgtttgagcttctttagagtattctcgggcacgatcaagagtgacagcatggtttataatgccagccgtgaaaaagaagaacgtattggcggtatttttacgatgcgtggtaaaactcagatcccgatgaaggaagttgttgccggtgatattggcgttactactaaattgcagtttacgtctaccggcgatacgctcagcgacaagaactcacctgttttgtttgcgccgatcgcattcccgctgccgatgtatactcgtgccatttacgctaaaaagaaaggcgaggaagagaagatcgccactgctttgaaccgtttgatggacgaggacccgactatcattgttactaagaacagtgtgacgaaggaaactctggtcagtggcatgggcgatcagcatatcgagatcattatggagcgtatgaaacgtaaattcggtgtggaagccgatttgcgtgcgcctatcgttgaatacagagaaactatccgcggaacggcggaggttgaaggcaagcataagaaacaatccggtggacatggccagtatggtcacgttgtgatcaagatggaacccttgccgccaggagaaggctttgagtttgttgacaagattttcggcggtgctgtgccgcggcaatatattccagctgttgaaaaaggtatgcgtgagtccatggaacacggtattttggccgggtatccggtagtcgatgttcgcattacgctgcttgacggttcttatcatactgtcgattcttcagaaatggcgtttaagatcgcttccaatatggcgttcaaaaaagctatggaacaggcgaaacctgttttaatggagcctgtttataatttggatgtttattgcgccgaatcaatgatgggcgatgttattggcgatttgaactctaaacgcggacgtattttgggtatgcagagtttggaagacggtatgggctgcgtaaaagcgcaggttccttatgccgagatttccgaatatgcggttgacctgcgtgctctgactcagggcttgggtacttttgaaatgaagtttgaccattatgaggacgtaccgatgaaaatggcagaaaagataattgccgaagctaaggaagctcaataattgatgtagtttctgtaaaactaagctgaaagcggtttgctaaaagggcaaaccgcttttttatgcttgtgcgttgctgttggtgtgagtaaataaaaa

SEQ ID NO: 9975 - DNA, 216264 bp, Unknown
  gut microbiota DNA sequence
tgcctacgccaataagccccggcaccaggaagctgtgattgatgataaatttaccgatatgtgttgttccagaacggtcaaagccgatgcaggccagatcggaaggataagtcggcagaacaaaataaccgtaagctgccggcataaaacctactattactaagggatcgacgccaacgcttaatgccatcggtacgatgacggtcacggccgctgcctgtgaattgatcagcttggaaaccaaaaacagaacgatcgcatacatccagggataagtaagtacgatgtcacttaaggattttttcattacgggcagataggcaccgaaataggtatcggccatccaggctacgccgtaaactgaaacaatggcggtcatacctgatttaaaaacagaaccggaagcgacttccgaagttttaacattgcacaggatcataatgacagcggcaatagaaagcatcatcagctggattgtcggtgtcatggaaaacggcttcaaaacgcctttggcgttgggaaagtgcggcaataattgtgggaagctgccaaagatagcaatcacaacgatacccagaagaaaaactaatgctgcctgataggcacttttaggcaggataatatttaaaaggctttgttcctgcaggccgccgtaaataaactctttttgttcaggatcagcgattttttcctggaattcactgtctttatcaagatctttgccgcggttgatgctccaaaggccggcgataacaacaccgatgaaggtagcaggaatggaaatagaaagaatctgcataactccgaaagggtgatctgtagcgccgaggatggcaactaccgaaacaacagctaccgaagcaggcgaagcgcagacacccatttgtgaagcaatggaagcaacagacatcggccgttccgggcggatattttgtttgatagcgatatcgtaaataatagggaacatagcgtaaactacatgtccggtgccgcataaaacggcaagcagccaggttgtgagtggagcaaggatagtaatatatttggggttgctgcgcaagaatttttcagcatatttcagcattacatcaagccctttggaagcctgtaaaaatgctgaacaggtaaccaccgccataattgtcagcataacgtctaccggcggtttaccgggtttcaggcccataacaaaaataaagaaaacaaggccgataccagaaatagtagccagaccgataccgccgcggcgaacgccgatcaccaggcaggctatcaaaacgataaaacctaaaaacattaacatcaagacacctccgagaaataaaataataattaaaaatatatctaacgacgtcaaggtatacagattgaaatgatataccgcagtcggagatgtcctgttacaggataactgtgattaagctgcaaaggtacaaagcaatagtgacactatataaataaagtgtatgataatagtggctgtaatacgggtattagtatacactattatggtgtttattgctagccctaaaaaaattttattttaactgaaaatcacgcttataaagataaagtgagttttataattatagtgaagcggcagaataaaataaggaataagcttataaaagccgctaaagataaaaaacacaggaaaatacacgatgtttatttcttcaacttatgctataattaatatattactatgagttattgggagggttcagtaaatgcaggctattgatcatgcatctgttaatactttacgctttttggcggctgaccaggtagaaaaggctaaatcgggacatcctggtttccctttgggcacggcgccgttgatgtatactttgtgggaccgttttatgcactacaatccaaaagatcctaactggttcaatcgtgaccgttttgttttgtcgccaggacatggcagcgctttgttgtatgcaatgctgcatctggccggctacgatgtttcgatggaggaattgaaaaacttccgtcaatggggcagcaaaactccggggcatcctgaatatggtcatacagcaggtgttgatgcgtctacaggtccgttgggacatggttttgcaatgggtgtaggttttgctgttgccgaagctatgctggcagcaaaatataataagcctgaatttactgttattgatcactatacctatggactcacttctgacggtgacctgatggaaggcgttgccagcgaagctgcttctttggcagggactttgggtctgggtaaattgatctacctttatgatgataataaaattactattgaaggttctaccgatatcgctttcactgaagatgtggaagcccgctttaaggcttatggctggcaggtgctgcgtgtagctgattcagaagatattgaagctatggaagctgccgttaaagaagctcaggcagataccgagcatcccagtctgatcattgtgcgtactcatatcggttatggcagcccgaaacaggacagtgcttcctgccatggcgagcctttgggtgctgaagctttggcactgactaaagaaaaagccggctggcctgttggtcaaccgttctatgtgcctttgactgtcagccagtatttcaaaaataaaatcgaagattgcgaaggcgatcaaaaagcctgggaagcattgatggctgattataaagttgtttatcctgaattgggaatggaacttgaagaacgtatcagcggcaatgctctggtaaatctgcacgatttggaagcgatctttaaagatgttgctaaaactgctacccgtgaagcttccggcgatatcctgcagaagcttgttatgcagctgcctaatctggttggcggcagtgccgacctgggtccttctaataaaactgtgatgaaaaatgtcggttatttctcgaaaacagaccgcagcggccgtaatattcatttcggtgtgcgcgaacatgctatgggaacagttcttaatggtattgctttgcacggcggttttattccattcggtggtacgttccttgtttttgccgactttatgcgtccggcgatccgtatggcagctttgatgggattacgttccatttttgtcttaacgcacgatagtattgctttgggtgaagatggcccaactcatcaaccgatcgaacaaactatgagtctgcggatgattccgggactgtctgtattccgtccggcagatgctttagaaactgctacagcctggcaaatggcttgtatgaatctacataaaccgacggcattgcttttgagccgtcagaaattgccggtattacacgaatatgcggcaatcgttcacgaaaatgcttataaaggcgcttatgtgctgaacccgggacagggagaaacaaaagcggtgcttattgctaccggcagcgaggtgcatttggctttggaggcgcaggctgttttggctaaggaaggaactgcagtcagtgtagtttcgatgcccagctgggatacttttgaaatgcagagcgcagattataaagcttccgttttgcctgaaggtttgccgaagatcgctgttgaagccggcgttactttaggatggagccgttataccggcagtgaagacaatgttttgggtatcaatcgttttggcgcgtcggcacctggcgatgtaatgatggaaaaatatggttttactgttgagaatctggttgctaaagtaaaaagcgttctttaattttataatttaaacgggcatggtgcttactcttaggcccgtgcccgttttgcttgcggtactgaatctgaagagttcagtaagacagtctgcagataggagaaaaaatgaaacatttattaacgatagcaggcagtgattccagcggcggagccggaatacaggccgatttgaaaacctttgccgcacatggcacctttggtatgagcgttattactgctgtaacagcgcaaaacacacagggtgtgacgatggtgcaggatatagacgctggggtgatcgaggcgcagataaacgcggtgtttgacgatattcgcgtcgatgcggtaaaaataggcatggtatcaaggccggaaatcatcaaaacgattgccgatagattgcgttattataaaccgcagatcgtggtgctggacccggtaatgatttctaaaagcggttatccgctgctggcaccggaagcctgtgctactctggtccaagagctgctgcccctggcaacacttgtaacacctaatttgccggaagcagaagttatcagcggtatgaaggtgacgatgaaggaagaaatgcgacctgtcgccgaacgtattttagagttgggtgccaaagctgttttggtcaaaggcggtcatttgaacggcagcgctgatgatctgctgtttgatggcagtacagaacgctggtttatgggcgagcggatcgacaccaaaaatacgcatggtaccggctgcacattatccagctcgctggcggcaaaccttgcccagggtctgagcctggtggatgccgttgcggcttcgaaggcttatgtaacagaagcgatagaatacagtttgccgatcggcggcggctgtggcccgacacatcattttgttgatttgtacagaaaggcaggctggttaaaatgagtttggtcatcaaagggcaatttgggttgatcgttgatgctgtacgtgaaaaaaggcctgttatccatcatttgactaattatgtgacggcgggagactgcgccaatataactttgtgtgcaggtgcttcgccggtaatggccgatgaagcggacgaagtggctgaaataactgctaatgctgatgcattggtactgaatctgggaactattgccaaagcaaagatgcaggcgatggaaacagcggctgcatcggctaaaaataaaggaatcacagttgttttagatccggtaggtgtgatggcgtccaagctgcgtttagtttttgcgctgaagcttttgaacgaaggtctggtaacgatagtgcgcggcaattacgctgaatgcctggcattattggaagaaaaagctgaaggcagaggcgtagattcaaatggcaatgtgactgatgggttaagggtagcgaaggacgctgcggaaaaatataactgtgtttttgctgttaccggcgttactgattatgtcagcaacgggaaacaggctttagttctgactggcggacatgagctgctgacgcagatcacaggagccggctgtatgacaacgacgttatgtgcctgctgcgctgcagtaacaaaagacccattgctggcagccgctttaggtatagtcataatggggcaggcggcagaactggccgcagggtttatggaaacaaaagacggaccgggaatgtttaaaacaaggctgtttgacggtgtttatcacgttacgacaaaatggaacgtgctgcatttggacccggaacggaagcagtgagatggagaaaatgaagctgaaaatagattacagtgtatatttggtaacagataccggatttttgcagggacgtgatttcgctgcctgcattgaagccgcacttaaaggcggcgtgaccctgctgcaatatcgcgataaaaatgctgacagtcgtgtgctgcttgaacgggcgctgctgctgaaaaaaatgtgtgctgtttatcatgtacctctgctgatcaacgacaggcttgatatcgcgttggctgtgcaggcagacggtgtgcacgtggggcaaagcgatttgccggttcctgtagtgcgcaggctgttaggcgagcaggcagttattggcgcatcggctcataaccctgaagaagccaggcaagcgcttgcggatggtgctgactatttgggctgcggtgcggtgtttggcaccactaccaaaaatgatgccggttatttaggtcttgacggactgcaaagtatcagacaggctgttacggcacctcttgtcggtatcggaggcgtcaacagcaccaattttgaacaggtactgcaaaccggtgtcaacggcgcagctattgtcagcgggattttggcagcagatgatattgaagcagaggtacataaattcaaaacaatagctgacaggtataaaaatatataaaaagacagacaaaaagagctatcgcttttactgcgatagctcttactttttatttatcttcgtttaagatttggttgacgcggtcacgcatcgaacctgactgcggagccttggtcttatcgtcgccaaactctttttgcagttccttcatttcctttgccagttctttctgctgggctttgattttagcttcagcctgagaacgctcggattttttgatatctttcaggaatctgttatcatcgaaatccttaaattcattttccagggactgagtatcataaatagccggggacgcgcctgcttctgtaatatgcggcgtcaggatcatcataacctcagttttatttttagttgtgctgcggtttttgaacagttcacctaaaataggaatattggagaggaaggggatcttctgaatatttttctgctcttcttcattgatcaggccgccgatgatcagtgtttcaccattgcgcattcttacataagtatcggcagtacggctggtgatcttataatttttgatttcagaaaccagtgtcggcgtgctgacttcggtatgtacggctgaggtgatcatatcgtcttcgctgacgagcggagtataggtgagcttgataccggcatctacatattcggtagtgttgacggtaataccgttttcgattttctcagtcaaaacaggaatatggtcaccgataaagatacttgcttctttaccgggaacggtgatgattcgcggagtcgctaaaattttggccttgccattagcaaacagtgcgttgagtgtcgcattaaaacggaattcatagctggcgccaaagtgaactacgccgccgaaatcttcatcatcatcgttattgctgctgttattgctgtcctcactgttctgtggtatcttatcccaattccagttgatgcccaggtttttactgtcttctttgttgatagaaatgatcttggcttccaaagtgatctgtttggtagcaacgtccatcgctttgattgccgagcgaacacgctcttcatctgtgctgctgccgctgaacagaatagaattggtgatagggtcgatactgattttcttttcactttccagaatatcattcaaagcatttttaacatcttctgctttggcataattcagcttaaaaacattgacgctgccgttgaacttgttcagattttcctgggtggaaaccaaaataacgccgtcgaccatgcgatatgccagtcctttggcactggtgataagcttgatagcagtgttgaacggcacattatctaaggcaatagtaattttacctttaacagattcgtcagtaacgatactggcatccgaaagagcggaaatagcagtcaaaacgtcgcgaacttcgccgtcgtgcacatttaaggtaacgttaggtgcggccaaagcaacagtagtgctgctgaaggccaaaagtgcggcgagagtagtgcttcgcagcgattttttccaagaatgcattagttattcctccctagggtcaaatgaagcggattttgcggatggctcaggtcaacagaatcgatgccgatagaggtaacagtataatcgccgaagctttgaccatctttgtaataattactggtgttgttaaattcgataatggccagctgtttgacgccgttattgatgatgccgcgtaaaacaggctgagctgcataaacaggtgcaccgcctccgataactgcaccgggatgcacagttggcttgttgagcattgctgccggagccataaaaggattacgggctatagtttgtacttttggtgccgcagctaaagcatctgcggcaggtacaactgctgcagcaggctgaacctgagcttctgactgtacttgtccggcccatgctttttcgaacaggccttctatataaccactggcatcaaagcggcacatgaaatgcgaggtgctcaaaaccaggaaggctgccagaatgataagtgacaaacgatcagttttctcttgctgttttcgcataataattcctccaatataaattaaactgataattataaaatcttaatatacttattataccacaagatgaaaaaaagcaaataaatattcttattctttttattaaaataagtttgttttagaatacatagcgtagtataattaaatataaaataatataggggtattatttattttgaaagcaataaaaaaactaagataaccgtgttattggcaatatttaaaatggaggagaacaacgtggcaactcagaaaagacgcttgggcgagattcttgttacctcgggagaaataacgcagtcccagctggatcaagccttggctgaacaaaaaacaaatggcaaaagacttggtgagactctgatcagtctgaattttttgactgagcgtaaaatgcttaaaactttagaaaaacagctttccataccatatatgtttttgagtgatatcgaaattatgccggaagctgttgcggcagtaccaatctttctggcagagcgctacactttagtgccgctgaaaaaagacggcaaccgtctgacgatagcgatgaacgatccgacaaatttctatgcgattgatgatgtgcgcatggtcagtggctgtgacatttctatcgtgttgtccgaacagcaggatatcattaacgccattaataatttttatggtgtcagcggccgcgtaggcggcagcctcaacaaattgaaagaagattcttttgctcctgtcattcgcagagttgaagacagcagtgaggacgcgccgataataaaaatcgtcaactccgtcattgagcaggctgtccgagataaggccagtgatatccatatcgaaccccaggaggatgatacgagggtgcgttttcgtgttgacggcgttttacgtaatgcggtaacacttccgaaaaacagtcacagcgctattatttcgcgtatcaagatcatggcggaaatggatattgccgaaaaacgtctgccgcaggatggccgcatcaatattgaacagggtggacgtgatattgatttgcgtatttcgaccttgccgactattttaggtgaaaaggttgttatgcgtattcttgataaaacggcggcttctattgatatcaatgatctggctttcacagcgaagaatatggagctgtatagcagtctgttcaactcttcctatggcatcgtacttgtcacaggtcctaccggcagcggcaaatcgacaactctgtactctacgctcaccaatatcaacaatcctaataaaaacatcattactgttgaagatccggtcgaatatcgtattgaaggcgtcaatcaggtagctgtcaataataaagcgggccttacctttgccaacggactacgcagtattttgcgtcaagacccgaatataatcatggtcggtgagattcgtgacgttgaaacggctcgtatcagcattcacgccgcattgacaggtcatttggttttcagtaccctgcataccaacgatgctgcaggcgcgatcacgcgactgatcgatatgggtgtagaacctttccttgtagcttccgctttgcgaggtgtcgtagctcaacggctggtgcgccgtatctgtccgcattgcaaagaaacctatgctcctgacgcggcagaaagggcctatatgggtattgcacttgatgaagaagtaaaactctataaaggtgccggctgcggtaaatgtaattttaccggttatgtcggacgtatggcgatccatgaagttctgcctatcattcctgaaatgaaggaactgattttgaaaaatgctcccgatacggaaatttttgctgccggacgttcttatggcgttacttctatgaaagaagacggtatccgcaaagtattggatggagagacaaccgcttcagaattgctgcgcgtagcgtacgcgtaaggagatgacaaagtgatcaaagagttaatgcgtgacgcttttgatgtcaacgcttccgatatccatctgacagtaggcttgccgccaatgttccgtgtcaatggcgtgctgcggcaggcgggcgaagaacctctgcgccgcgaggatacctataatatggcaatggagctgatggacgacaggcgccgcacgcagttccttgataacggcgaagctgacttttcttatgaaattgaaaatgtatgccgtttccgtgtcaatgtttttaaacagagtaactgtgtggcagcggcgctgcgtttgatttccaataatatccccagctttgaggatctgcgcctgcctgacgttatcagcgaccttgccatgctgccgcgtggtctggtgctggtgacagggccgacaggcagcggtaaatcaacgacactggctgctgttatcaataaaatcaataaacaccgcaaagatcatgtcatcactctggaagacccgatcgaatacaagcataaccatatcaacagcatcatcaaccagcgcgaagtcggcagtgataccaaaagctttgctaatggcctgcgggcagcgctgcgtgaagaccctgacgttattctggtaggcgagatgcgtgatacggaaactattgccacagctatcactgctgccgaaaccggacatcttgttttggcaactctgcatactcaggatgcggcatcgacagtgaatcgtatcatcgacgtctttcccgaacaccagcagcagcagattcgcattcagctggctggcaacctgcagggcatcgttgcccagcagctgctgatgaatcgcgaacaaaccggacgtctggctgcttttgaaatattagttgccacaccggcgctgcggaacttgatccgcgaaggcaaaacacatcagataccgtcatatatccagaccggttccaaattcgggatgatttgtatggatgcctatctggctcagctggtacgtcaaaataagatcgaccgcagcatagcggaagaacgctgttatgacccattatcattagaacgctatatgcatggactataaagctaaaggaggaaccgcagtttggagcaatttaaatataaagcacgtaaacgtgatggtgccgtagtttatggcacagtcaacgcccctaatgaagctgccgtagccgcctttatccgtaaacaggacatgtatgtggctggcattgaagcttctaaaaagaaagggctgttttcgggagtactttttgaggaaagtatcaatctttatgacatctcgatttttgcccgccagtttgcaactctgctgggagccggtgtaccgcttttaacagggctggagatactaactcagcaatctgctaaagagcgtctgcgtactgttttagggcagataactaccagtgtccgtgaaggtaaagcattgtcggcagctatggccgagttccctaaagtctttcccgagctgatgactaacatggtagcagcaggcgaggccggcggtattttagaaatcgttatggatcgtttggcagcacagtttgaaaaagattatcgaatgaatgccaaatttaaatcagctatgatttatccggcaatagttttatcggtagctgctattgtggttgctattattatgatgttcgttatgccggtttttgtcggcttgtttgaacagcttaaaatcgaacttccatttgtcacccgtgtcgttatcggcatcagcaatttccttggccattactggtatttggttattgccgcactgatcggcctgtttctgctttataaatgggccggtactaaagaaagttttcgcctgtggcgtgatggtgtttatttgaaagtacctattttcggagacttatataacaaaatcatcattacccgttttgcccgtacttttgccagcttgtcacgcagcggcgtgccgatcttaaacgctatgaccattgtcagcaaggctacaggaagtctgcaggctgaaagagtacttaatcaggcccgcggcagcttaaggcgaggccgtactttggcagatcctatggaagccagcggtatgtttccgccaatcgttatcagcttagtaaatattggcgaagaaaccggcgctctggataccatgcttgataaggtcgccgacttctacggcgccgaggtagatgatactatcggaagactgcagactatcatggacccgatcctgatagttattttaggcgtcattatcggtacgctggcagtagctcttttactgccgatgtttgaaatagttacaaaagtaggtagtttataaataaaataaaagttttatgataaaaatacttgataaaagtttaaaaaagagttattattaaaatataaataaaatagcggctatattattatgcaaataatggtagcaaagctatattaagaagggatgaaatccaatgaaaaattttattaaaaaccaaaaaggtttcactttggtggaactggtagtagtaatcgccattatcggtatccttgccggtatcgcagttccgcgttttcttgatgctactgcatctgcccgcggcgcaaaaatcgtagctgatatgcgtaccatccaatcggcagaaatgatttattatgcaaaaaatgctaaatatccaactcaacaatctgatttaaacactttagtacaaggcggttggcctggtgttccaactggcaaattcattatcgcccaagtattaagacaaggtggcggtactacagaaggaactgttccttctactggtgctgcatataaatatgacccagatacgactactggtggttctggtgaaatttctcttgatggtgctactattagtagtggtgacgtgactggtactttaacattaactgctcttttaggcggagacaaacaaactactaaatcagttaaataaaagtgaactttaaaacattaggggttgtctaaaacagacaatccctttatatttcacggaggtatgaggtattatgagacaatatagtaaaggttttactttagttgaattggtagtagtcattgctatcattggcattttagccggtattgcaattccatattatacagatgctcaggcaactgccagaggtgctaaagtggttgccgatatgagaacgattcaagcagcctatactatgtatcttgccaaaaatggcggagatcaaaaaaatattatagtaggagaggcagaagaatatccagatatcattccaatgttggttgaaaaaggatatttagaatcagttccgatacctcctgaaggtaaagcaattttccctaatgctatcgatcatttaaaagagtttaatatttatagaacttcctttggtggcaaacaacttggcggatacacttttataaaacactcagcagtggatggtgaagaattaattgtaggactagatttggctacatctattccacttactgatctagtaggaaattagtatactttttatttatcgtttataaagtaaggttcggcaaacactatcaataagcgcagacttaacagatttccttgaactggcaagttatagcttgcatagcagggctttaaaaaaacaggacaagaagttgagtgatgtgcaagaataccttattaaaattggtaaatcactactgtgacaatagtttgtgcagtaattatgcatctaagaagaaaaataatttttatcacaaaaatatttgcgtttttatttcctgttgattactaaaaacagaaaaggtttcactttggtggaattggtagtagtaattgccattttaggtattttagcagggttggcgattccacgattcattggtgccactgaaactgctcgtggtgcaagagtaatagcagatttaagaactgtagaaagcgcactttctatgtattatgctaaaaatggtaatttctatgatccagccacaagtacaactttagttaccgttgatggtttagtaaaaaatggtttattagctgctgtgccgattccgccgactggcaatatgaaaattgaaggaacaaaaaattttgacacagcagcggctgtacctactgggagttatacaataacagcaggagcgactggtagtggtgttgaagcagaagtacaattaggtaatcataatatctcttattttcttgagaaaaaaggttcaactccttcaaataataattaaatttttgacaaatagataggcttaagtctatctatttttttatccagtattttatccatcagcatattttactattaatcgtattataaatatatgttataattataataaataatataagttgcgaaggtaaaaaatgaaaaagctaaaaggttttactttaattgaattagtaatagtaatagctatacttggtattttagcgggtattgctatccctagatttatagacactacagaagcagcccgtggcgctaaattattgggtgatatgcgtactatcgaaagcatggctttagtttatgctgcagatcacggcggtcaatatcctaaggttagcactaccaactccggttttaaattcgagtctggttccgaaaaatttaatgattatttctctggtggttatcctttaccgccgcagggaataatttcttttcaaggcagtgacggcaatacctatcgttatgatttatctgatcgtcaatattattatggctataatagccaaaaaagggatggtgtggattttccatttgctacctgtgatggcaaatctatttatgaatttttaacaggtcaaaaaggcaataacggcggaagtcctatttctgtaggttccaataatggcataaatattgatgtggctaatggaattgccgaaaatgtaagccaaggtgtcctagatgcaataaactctggtaatattaataattttgggcaaggaaacattgattctgaagctaaaggtgaaggtacgcgaaccgctataataaacgcatacctgcaaaaaaatggctttgatttgaataaatacggctggtcaattagaggaacaaatactggaaattatactctatatgtctatccaaaactgactaaacccggttttatacaggctacagtttaccaagtaactaacggtaatattggtgcgggtaaaactcaaactgtagaagtcatccaaaaagataatattttaaaaatacctgaaatttaataaaacacgctttaaagaataatccccgctgacgcatagcgtcaacggggattatttcatttggcttcgatttttgcgatattactttgatacaggccgatactggcaagagtactttcgatcttaaactcatctttttcacgctgcagcaaaatgttataaacgtgctcaaaacgggaaaacatatcgtgttcagcagtacagagattcagataaccgatgtcgtgtactgcctgagaaacaagtttgttttcgtaatgaggttttttataagggttcaactgcctgcaagctgcgtgccatgcttctgcggcagtcagttcacgctgtccggtttgatgttgcagcaacattctggccgcctgcacaaaaacagcaggcttaggcggatcaaaggcggtgttttcaataacatacatcgccgcagcctgtgctacatccagaggaaactgtgcaataaacggataccagtcgtttacgacttcgctgccgtttcttaccagcatagggaaataacggcccaaacgatcaatgatcttggctgcatcctgcagcgtgacctgattattcatggcagcctccctgcgctaaagcacggatttgtgctgcaccagcagaaagtacgggtttggcttgttgggaaaaggaagtaaaagaagaattttgataaaaattatttttcttatctttctcttctttcttattcttcttattagatgcagagcctttgcagtcgctttgcattgcctttgtaaggtctttgcagtcagctgtgcaacgttcgtcatcaaggtactggtaagcgccccaattcacgacagtcagcaggcgtccggtctttgtagattcgtttgccaaaaaaccaagttttacaaatcggtctaaagctcccctaacattacctacgttgacacctttgccacaacgttcggcaatatgctgtaagctggtaatagtctgtcctggctgcacgctgaacttttgcccctgccattcccattcggcgggagcgaagttgaccatagacagcaaagtaagaagaacagttttttgaatcggagtagattgtttccagataggtttatcccaaagttcgcgataaatcttaaagaagccattgttcatggacagcacctcaattttttatatttttgatataaaaaacaagggattcccggctggctgagtgtaataatgtctgcttgcaggcgcactaccgcttaaaagcgttttttatctggctaaggctcaccgttgcacaatgcttgtttattgccgttgcataggattttataacgtcgccgctttagtttgccatcagtcaaattattttacacgttgctcagcgtcttgtcctgttttttgaagccttgccgcacaagctgtggtttgaaggcaacctgttaagtatgcgcttgttaacggtgtttgtcaaataaattaataaatttactaattatatctcactaatatgaaacctcctcacaaacatatgctaaataatgtttgtgaggaggttctttgaacattaaactaaaaactaaaatttaaatttatttttcattatttattattcaagatttgatcaacagtattaccattatataaggcacggccattatctacatctaaagtgtattcattagtactaggagccgtaagtgttacttcagaaccattaaaagcagtgacttttgccgtacctgtaggaggtgtcggccaagcagccaagactttaattgcactagtcacaccgccagtagtcttgtctattgttaacgcatctttgcttgtaggcaggttgccagttttagcattgtacatcataatagcactgtcaatggttcgcatatcagcaacgattctggcaccacgtgctgatgctgtagcatccataaaacgtggaatcgccaaccctgctaaaatacctaaaatagcaattactactaccaattccaccaaagtgaaaccttttctgtttttagtaaaattcaagaggattaataatttccattaagttagtatcatcagtctgagcgtttattaaacgcaggggttatttattaaatttataacgttttgtaagactctggtaagacacaaatcaatattttagtttgttgattgcagttaaaagctgccggatatttttgtgagtgtagctttcggtgacatcggcattggcgtgaccaactatgcgttttaaaataacgctgccggcgctgatcccgcatgagtccataccgctgataaaggtatgacgacagtcatggggcttatgctgcatttttaatgttgacattaacaggttaaaaaaacgttttttgtaggtatcgtagattattggctgtccattttctgtttcgatcagatatttaccgtgcatacgggcggcgacaagcggcacgatatctttatgcagtggcaggatacggtgtgctgcttttgttttagtaccgtgcaggtcaataatctgctttttgaggtcgatatgtaccgtttgtatttccagcagctcgccgatgcgtataccgctgtaaagcatgatcagtaccgtatcgaccagcctgacgtcattgtaatgatggcggctgccgtcagcaagcggcagtgtcagttcaagatttttccataaacatttgatttcactgtgagtaaaaatactgcgggatgtttgtttggcagtagcgttcttttccagataacgcgaatagtctacgttgataagatcattttcaagtgcgagacgaaaaataccgttgaaaatagtttttaagcgcgtttgcacactgggggaaaggtgctgattattatccatgactgcctgcatttgtgctttttttacttttttgattggttcgttggcaatatcagtacattttttccaggctgccgtaaaactgcagcgtgaggaacgtgaaagacggacggtatgtttgtcataccactggttgtaaagctcgcctaaagtgatatgctgcagatttaagtcgtaagggcgtttgttgtagtcggcaagtgcgattagggcagcgcgtctgctggtatagtaaccaagtgtgtgatatttttgcagtggtttgccatctgtttgatactgccagcctgctgtcagtcgtacacgatagggtttgcggcggttgccgggcagtttgctgatgcccccgtaaccgttaggatttttcatagtatacctcctttttatttatcttagcagattattttagctttaaaactgtaagacacaagtaaaccacagaaaaaataattttgtagataatgaaagcagtattgtagttttcaaaatgttcacagaagtgaatatttttgtataatgaagatagtaaaggacggtgatacagtatgacatacggtaaattgagtgatcgttgtctcaaagtattcgtagttctgctgatcgcgggcgttttgggcgggttctgtctgccccattttgtggaagcagtcgctggaggctataatacccgtgctgtcggcatgtcgcttggtgcagaagggctggcggcacctgttttatcagttgattttaaaccgcagggcggcgagctggctttggctaagctgatagaggcaggctatttcgatactttggtcaattgaatacatgtatacaatacaaaagtacttgcttttttttaactatctgctataataactaacatcacaagtgaataatgcgtggatgaaacatatgggagaagacgatgcgtctaccgaaggagctaaactctcaggtgcctggaaatcaggcggaaccgtatgcggacacaactctggagagtcccttgaatgggcgccgaaggtgcacgaatatcgttgatgttcttatctctcaggccaatggacagagcaatagcagtagttccgctgccttttaggcaggggagtacttatatcgtttttttgcccaccggagttgtcgttattccggtgggcttttagtttttcatttcacataaggggaagagggagaattttatgttggagcttttgaatgagatcgacagttttgtgtggggaccgccgttattggtattattggttggtaccggtatctggttgaccctgcgtttgaatttattgcaggtgcttaaactgccaatggctttaaaattgattttttcggctaaaaatgatggtgacggcgacgtcaacagttttaaagcattgtgtacagctttggcagctactgtcggtacaggtaatatagtcggtgttgctactgctatcaaagcaggtggtcccggtgccttgttctggatgtggctggcggcattttttggtatggctaccaaatatgccgaaggtcttttggcggtaaaataccgtacagttgacgctaatggcaatattgccggcggacctatgtattatattgaaaacggtttaggtaaatcttataaaccgctggctgttttctttgccgtgtccggtgtgttgtgtgcttattttggtatcggtacttttgctcaggtcaacgctatagttgagatcacgcagttgtctgttggcattcctgttatttatactgcgattgcgctgacagtgctggttgctgtcgttactattggcggtcttaaatctatcgccagcgtagcaggtaaaatcgttccttttatggccttgttatatgttgttactaccgtaggtattttacttatatttgcagatcaggtgcctgcagctatttccacagtgcttactaatgcttttagtcctacggctgccgctggcggctttttgggcgcaactgttatgatggcaatgcgtaatggtattgcccgtggtgttttctctaacgaatccggtcttggcagtgccccgatcgttgctgctgctgctaaaacaaaatggcccgccgaacaggggctgatttctatgaccggtacttttattgatacgatcattatttgtacactgactgggttgacgctggttgttactaatgtctggactggtgatttgaatggtgcggcgttgactcaggctgcctttacgatgggcttcccggtgtggggcaaatatctattgatggttggcctggtactgtttgcctttactacgatcttaggctggaattactatggtgaacgctgcatcgaatatttgctgggtgttaaagcaattttaccgtaccgtattatttttatttgcctgattgcctgcggtgcattcttgaaactggaagcaatctgggttttagcagatatagttaacggtttgatggctattcctaatttgatcgcgcttctgggccttactggagttatcgtagccgaaacaaaacgttataccgcacatttggcgaagcaaaaagaaaaggctgatattagtgaagaagtggctgaagaagcttaagttttattaaattgttggactcaaaaaggcagtttttacagctgcctttttgattgcataaaaatttatctgaagaatctgtcaggtaaaatacgaaaagacttgactttaggatcaaaaatctatataatatcctttgtattcggggcgtggctcagcttggtagagcacctgccttgggagcagggggtcgcaggttcgaatcctgccgctccgaccaaatacatagagcattgcttagtaaattgcgggtgtagtttagtggtaaaacctcagccttccaagctgatgttgtgggttcgattcccatcgcccgctccaatttttttggtctggtagctcagtaggatagagcaacggccttctaagccgtgggtcgggggttcgaatccctcccagatcaccaacagcgaaattcagctgcagacttgttctgcagcttttttatttgtataaaagacgagtgggcgtatattaagatataaataacagcaagtgtttttgttggcatagacacttgctgttatagaaagtttactttgatttataatgccagtaataaacactgctgataaaaagaaaaaaccgttcgctggggatggtagcgaacggtttacataggaaagctgtttatgatgaatttgatgggaagggtttagtaagttcatcacttactatgtttttattatacagcagagatttgacagaaaaagggcaaagcttaaaaaagtttgtgaaatatatcaaaaaatagagtgcggtatgtaaaaatatcggatgggtttagtatagaggcatatttattgactaaaaatagtgcattatgctaaaatttactataaagtatttttagttatttgttttaaaagttaattggcaaaagatcgtaccatataaaaggggatgatgaaaaatgaggacaagaagtaacttgagcgcagtactgatagttagtactatcatggcaggtacagtattattgaactgcagcttaccagtatatgcacaaacttttgaaaatgataaaaccacggctgcagtacagctgccgccagtaagttcggcatctaaagtaaaaacttcaagtatgactgtagataaggctatttacagactcagtgataagtatggatttagtgaaacagagctggcggaatatgtgcagactgccgctgattataagaaaatgaaggagctttgtttgtatgccagattgtcaaaaaggccgttggcggaggttgtaagcttcagtgaggtttatcctaaggggcgtttaaggatggttttgggccttacacctcagaaactgtttgataaaactattgagctgcgtgccgacaggctttgggagaaaatgcagatcgaacgtaagctgactgttaaatatatgaagcagggctttgccgggcatcatgttatgatggcgcatgaacttgctaaaagatgcgataaaagtatggatgatatcataaggatgaaaactccgaaaaataaatggaaggatatcggagcgcagcttggaataagttcctcggagatgcaggaaataaaaacaaacagtaaaaaagcttttgaaggaccgtattatcgccgctgagccagatattactgcagcagtaaaaatatttatgtctgattgtttgtgcaggtatgcagaaatgtatacctgtttttatttcattgaaaatttggtgcgtgaaaggaaaatattatgtttagttcgattatgatttttattttggcaggtctggctgagatcggcggcggttatcttgtctggcagtggattaaagctggcggcagccttgcttatggaatcacaggtttcgtgctgctgagcctgtatggcattatccctacgctgcaggatgcgaactttggccgcgtttatgctgcttatggtggtatttttgttgtgatgagcgttttgtgggggtacggtatagatggtgttaaaccggatatttgggatctcagcggtgcgatgatcgtgctgggtggtgtgggtctgatgatgtgggcgccgcggtagtaaaaaaggctgaagcactattttcagtgcttttatttaagaaaataataatgttttgaaagaaaaagtgaaaaacagttgaggaattgattagtatatgctattttagtatatagtaaaatattttatccaagaaaagagtgacgctaatgaaaaacatactgggaagtttgcctgcccgacttttactgggtgttattgcaggtattctggtaggcttatatgccaatgaagctttgatgcaggtgatcttgactctcaaaaatttactcggttcactgattatcttctgtgtaccgctgattattatcgggttcatttctccgtctatcacgcgtttggggcagcatgcgtcgacaatgctgcgtgttgctattactttagcttatgtttcttcggttggagcagcattttttgcaatgttttcagggtatggtattattccccatctgaatattgtttcttctgtagatggtttaaaagaactgccaaagctgttgtttgatctaaagatcgacccgatcatgagtgtaatgagcgccttggtcttttctgttttgattggtgtggcagctgcctggactaaggctgctgtgattactaaatttttggaagaatttcaaaaaattgttctggctatcgttactaatattgttattcctctgctgccgatttttatcgcctgtactttttgcgcgttgtcgtacgaaggtacgattaccaaacagctgcctgtgttcctgattgtagtgctgatagtaatggtgggacattatatctggctggcattgttgtacggtttggcaggtctttatgccggcgctaatccaatggaagtgcttaagcattactggccggcttatattactgccgtaggtacaatgtcatcggcggctactttagcagtggcgttggaatgtgcacgtaaatcaaaagtgctgcgcaaagacttggtaaattttggtattccactgtttgccaatattcatttatgtggcagtgttttgactgaagtattttttgttatgactgtttcgcagattttatatggtgctttgccggaattaggtacgatgattttattctgtctgttgctgggtatttttgctattggtgctcccggtgttccaggtggtacagttatggcttctttaggccttatcatcagtgtactgggttttgatgctactggtacggctttgatgttgacgatttttgcactgcaggacagctttggtactgcctgcaatgtaactggtgacggtgctttgactttggccctgacaggctatgctgaaaaaaatgatattgaagaagtaaatgaagcttctattttataaatcaaatttataaatcaaaccgtttttataataaccccgttcccaaaaagggaacggggttattattttaagttgataaaagataaataaagtgataaaatatttaaaataaaacttaaaaatatatttatgaaaataatatttagttgctaaataaaaagaaataaagatattgaaatttattgataagtaattgttcaatgtaataccatagtgaaaaaaagtgatatttaatttttttatacttctaacgaagccggatgggatctgtcatgaattttgataaaattttacaaaaaccttttttgatatctgtttttgtatttaacatcattttatttggtgttattgtttttttgttgggatatgttcaaaatttacttgacagtgattccagaaataaccttgaagaaatagtttcgcaaaataagaacgttattaccagtaaactgcttttagatcttaatcgtctggatattatcagtaataaaatatctgacggactgaaaaataagaatatcaccaaagaagcggatatcaataaatttttagaggattattctaaaaacagcattgatgatagtttattcttagcgaataaaaatgggcttgcctatgtagatggcgacacgcatatagatatttcaggacgccgatattttaaattagctattgatggtatttctaatatttctgaacggactatttcaagaatcaacggcgaatatatttttgtcggcagcgtgccgttgtattacgataataatatcatcggtacgattcagaaaatctatacggataaacagatgaatgagctgtttgcggcttcgttattttcgtctaaagggtatatgtatgttatcaatagtgaaggttatattatcctgcataccaaatacattaattgtgctttaaaatcggataattattttcgtgatgtttacgaatacggaaacgttgaagctgttcgtaaaatgaaagatgacattaaagccaataaaagcggttttatggaaaatgcggtcaatggtgaaaaaaccttctctgcttatacgcctattgaacaggtacatgactggtatctggtaacgagcgttcctactgatgtcattgccgaaaacggaaatatagttatgaagattttttacatggttatggtttcgcttgtacttatctttttggtaagtatctgttattttgcctggaacaagcgtcgacagaaacgggttttggaaaaaattgcttttgtagataatgttacagggggcaatacctataacaaatttcttgttgatgtacaggagacgttaagcaacaaaataaacaagcaattttatatcctgagttttgatgtagataactttaaatatatcaacaatttttacggttttgcctgcggcgataagattttgcggcaaatatacagttcagtcagcgtctggatgcagccatgcgaaactgcggcacgtatttccggtgaccgttttgtatgtttcttactggatgcagatgaagaaagaatcgaagcgttattttcagcaatcagaaatatcacagaagaaaatcttatactgcatttttcggccggcgtttatgttatcaaagactacgatgaaaatattaatcttatggtcgacaaggccagcgttgcggcgcagacgattaaaggtgtgctgaatcagcacgtggtctattattccaagaaatttgatgatatgactgctcataatgaagaactgaaacgggatttaaaacttgcaattaaaaatgatgagtttgtagctttctaccagcctaaagttgacatcaacagtggtaagctggttggtgcagaagcattgatccgttggcggaccagagataataaactgattgcgccgggcgattttatacccttaagcgaaaaaacaggtttagttacagatttggatatgattgtttttgaaaaagtattagctttcttgcgaagttcattggatgccggtgttgaatgtgtgccgatttctgtaaatttctcacgtttgcatttttcaaatgaaaaatttttaccgacacttttacagaaaatggaaaaatatcaggtgccagcgcatttgattgaattggagctaacggaaagcgctatttttgataatttcagtattatttatgattttacagagaaagttcgtgaatatggcgtcgctgtggcaatggatgatttcggttccggttattcttctttgaatatgttgaaagacttgtcgatagatactttaaaagtagatagagcttttttagaggaagctgctgataacgaaaaacgtaatattatttttgtttcagttgtagaaatggctcgcaagctgaatatcagtctggtggtagaaggcgttgaaacaggggagaatgtcagtctgatgcgtgaatgcggatgtaatattgctcaaggctattattttgccagaccaatggaagaaagtaaatttgccgagcttttcagggagggtaagttatgctgaaaaaaatcgtatgtattatgggggctgtggcaatttttatactggctgtgggctgcagcagcgagcctcagaaacccaagctgggagtttcttttggtgttggtggtgctacaagatgggtgaaagaaaaacagtttatggaagatcgtgctaaagaactcggagcagatataactgttcgttttaatactactgatacacctaagacatggcgtgaagactgttttgaacttattgacagcggcatcaatgtattgattatgattcccagagatttacgtcaggttgatgatatagtagattatgcaaaaaagaaaaacgttaaggttgtctcatatagtagggctattttaaatcctcagacggatctttttattggttatgatacttataaaattgggcagaacctgggcaagcatttatcagagcgtgtttataagggtaattttattgttttgaagggtgataaaggtgattttaatactcactttttatacaatggggccaataaatacattgaaccaatggtcggaacgggcgtcaatgtaatattgaatgattatgtaccggggtggtctgctgatacggccaaggaaatggtaaaaaaagctgttatagcgaatgacatgaaattagatgcagttttgtgtccgaatgatggtttggctggcggtgccgctgctgcagtacaggagctgggattaaaaaatcatgttatcattgtcggtatggatgcagaactggcggcggttaaaagacttgttgcaggaacgcaggatgcaacagtgtatatggacttgaaaaatatggcgtcagctgcggttgatcaggctgttgcacttgctaaaggcgaaaaagtaactgctaattcagaaataactaatgataaaggcgagaaaatccaggtttatttgattacaggtgaaatggtaacaaaagaaaatatcgataaagttttaatcgaaagcggttactatacgaaagagcaaatttatggaaataattaaatctgcttttgatagaatgaatctggaattatgttgataaatgccaagcagcagtagttgataatactgctgcttttgtttaccagcttaagcagtaagtgattgtaaaggcaaatactttatctatcctgataataactattctaagcatatatttttaaaggtatgttttattgaattaataaatatcatcctgtttgtgtgatataataaatattaatcaatgtaattgaatatgagggctttgtttattactattgttaaactttctgtcggtatattcaaggttgtatatcaagaaaagcatcgttgttattcaaaaatcggtgtttaaatgacgctttgaaaagtatgatttaggcatcaagagacagcaatggtgtctggttttgtcttttatgtaatatattttgacagttctttttgtgctgaaattaactgaaagtactataatttacagtatattttatgttggagcgtggttttgtgtatttgttatttggtttatattttgtcatcggcatagttatcggcagttttttgaatgtctgtatttacaggctgccgctggggaaatctgttatcagccctccgtctgcctgcggcagctgcggacacaggttaggggctctggatatgatacctgttctaagttattttttgctgcgcggcaggtgccgctactgtaatgctgcttatagcgcccgttatatgctggtagagcttttgacaggtattttatttgccttgtgcggcttgtattatttgcctggcttaaaaataatactggttttcttttttgtagcttgcctgatcgtgcaggcttttattgatctggatcatcaaattctgctggatgaaattttgatgctgatgctgccgacaggtatcatttatgcctattatgctttaccggacatgtgggattctttatatggggctttatttgccggtgggctgatgctgctgatatttttgctgagtcgcggtggcatgggtgctggagatgttaagctcagttttgttttaggcgtttggcttgggtttaaggcgagtatcgtttgtctgatgctggcttttgtttttggggggataatcggggtgatgctgctggcttccggtatcaagcagcgtaaagatccgattccgtttggaccgtttttatgtatcggagcttatattgcgcttttgttttccccatatttaatttatttttactggaatttgtttgtatgagtttatgaatttatgatataatttataaaatatagtattaaaactgattttatttatacgaatcaaggaggtctgcgcaagtgaatgtgcaagccatcgtaaaaagaatgtttcacacaaagccgtcaaaaatagttggcgtcgatatcggcaccggaagtataaaaatggtgcagatagaaacaggcagtaagcctgtagttagttgttttgctgtagcagagctgccactggagcttatcaataacggatttgtccgtaacagtgatgcgatgataagctttattaaaggcttggtggcaaaatatgattttaatgccaggcatgcggtttttactgtaggcggccgtaatgcttttgtacgtgagatcgatatgccggaaatgcctgacgaagaaatgaaacagtctgtagcttgggattccagtcagtatgttccttatgaagctgatacttattatgtggattcggctaaatttggggcatatactaatgaaggtctgcagcctgtgcttttggttgcttcacctaaggatgttattgattcactgctggaaatcagtgatgcgctggcctggcatactattggtattgatatcgaagttttgtctgcttatagaaccttgcccaggcagttggaaaacttcgttttgcttgatatagggcgttcatattcgatgctgactatttttcagaacggtgctcctgttgcgcagcgcagtattccccagggagggcagatgtttaatgccgctattgctaatggtgctggcgttgacctgacggctgctgaaaagatcaaactggaagatgagctgcttttgagcagcctggaaacagataaaactaaatttgcagaatttttcaacgaggttgaaaatctgggacgtgaagtacgcagaacctgtgaatattatttgatcaataaaaaggatgcaagatttacgcatctggttttggcaggcggcggtgcaaatatggccggattgtccgaatttttgagcgaaggtatggaaatgaaggttgtcgttaacgatctgcgtcaagcagttacttttgcagataaacttgatcagagagaactgaaaaaatatctgggagcgctgactgttgcaataggcgctgctttgtacggaggggaagcagatgattagaatcaatcttttacctgagtacaggcgcaaaagtgagtttcctacatggaaactttatcgtattatagcttatgtatttttaggactgagcattttactgtggggttaccatttagcaatgttcaagtatactgaaagtaagctcagcgatgtgaatgaaggtatagtttcaatgaaagtctggcaggaacgttttgataaagctcagcagcagaatgcggaagtaaataaacgcaatactatcgtacgcaatctttctaaagaccgcatcgtatggagccgttcccttgctgaactgggcaatgttacaccctacggctgctggctgacaagtgttaaacagggcaataagccagatcagatgagcattgccggtaaagccatgaaaatggacgatattgttaaattcatcagtcttttacaggcacggcctgatattgccaatgtgcagttgatttctgccgatgaaagcaacaataataacagcagtactgctggcgttattgattttactttggaaattcagagaagtggggtgaagaagtgaaattagaaatgcctgacagcaatatgtcagaaaacagtaaatattcgttgttattgttaggttcggtactgctgcttgtttttgtagttctgtatatcatgcagccgctgcgtgaagacattcagaaaaatgagcaggaattgacacaggcgcagcagcgtttagccagttatcagacatttgctgaacagaataaggattataatgcttttgcagcgaagcaggaaggctaccttgctgaagctaagaagctgttgcctgatatagtaactgtgcctgaattagtacaggaatattctaacctttcaaaggaatgcggaattcagttcaaaagtgttaagcctccgagtggcaatttaaaacaggtaaatggagcttacgaagtaccgctcaatatttctatcagcggcaactattataaaatggtcgagtttttgcagaaggtagaaaacggtacgaggtttgcaaaattgaacaaagccagtgttaataccgttaaagaaaatgatgcttcgggaaatctggatatgacggctgaatttaccgtttattcgctgaaggacgccttagggaaaatgaatactggcgccgctggtgaaaagaccggcctgaatcgcgtaaaagaacgtgacgcagctaatatggcggcaatagacgaagcaaaaaaatagagtaaacgttatattattagacccttgttgtttttctgcagcaggggtctttttatgttgtatggcataaccgttgaaaagactgtgaaagcgctgcttcagcctgcaattttcttgctattctatatggaaaagttgtataattaaaatatctattattataaataaaaatacctttatttcgataaattgaggagtaaaaaaatgatttggcagaatacaaaagttcgtattgcaattatcgcatccctggttcttttagcaattattgcttatcgtatttatggtaatatccaggctaacaacgagcgtgcgaaccgtgtttcgcaagggcagaatattgcggtggccacatctttcccgcagcgtcagagtattactcctgttatgcgttttgcgggcagccttgatcctgtttggcaggccgacgtggcagctaaaatagatggcagggtagagaaggtttatgttaatgaaggtgacaaggtcacagctggcactgtgctggctcatttagagcagacagaacagacggctaatttgttatcggcgaagggttctttgatggatgcccaaacgactttggaaagagctgaacgcgagctgcagcgctatcaggcattatatgaaaagggcgctgtttcggagcagacagtagataattaccgttttgccagaaacaatgcgcagggcaagctttcggaagctcagggcgtgtgggacaatatgcaggataagctgagcggagccagtgtaactgcgccgcaggacggtattatttctaaacgttattatcaggaaggttattatgctaaagttggcacagcgctgtttaatattgccgatatttctgaattgactgctaaaataaatatcccggaaggtcagataagcaatattgctgttggcggattggctgatattactgtgcccgcatatcctgatgataaattcagcggtatgatcacacgtatctcgccggtagcagatatgccagcaaggacctttgctgctgaggtgacagtggacaacagtgccggtaaattacgcggcggtgtttatgccaatgttgtcattacagccgagccgaaagagaatgcattagttattcctatgagcgctattgtaatgcgtgaagatcagcgtacggtttttgttgttgatgatgatggtgtcgtcagccgcagagttttaacaataggttttgtcaatgataatatggtagaagttttagatggtttgagtgatggcgaccggatcgttaccggcggtcagaataaattgcgtgaaggcagtaagatcaaattagaaggacagggtgctaaataaaatgataggcacatttatacgcagacctgtttttacgacgatgtttgtactgcttttagtagtattcggcattaagtcgtatcctaatttgggtgtcgatttgtatcctgacgttgaactgcctctggtaagtgttactgttacctatacaggcgcttcacctgaggaaatggaaactctgataaccagacctattgaagatcgcgtcagccaggttgcaggtattaaaaccctgtcgtcaactgtacgcgaaggttattcgcagacgacgctggaatttgagctgggtgttgacccgcgcgagatggccagtgaggtgcgtgaaaaggttgcgtcggtacgccggcgtttgcctgacgacatcgatgagccggttgtacagcgttttgatatttcgtcacagtcgatagcggcatttacttttgcttctgattcgcgcagccgtgaagaaacccgtaagatagttgaagacgttgttaaagaagaactgcagcgtgtcgaaggcgtgtccgaagtatctgttgtcggcgccagcctgcgtgcgatcaaactgattgccgatcctgagaagctgaacagttataatatttcctttcagacgatcttagataaggtcaacagtgaaaatatcaatactcctggcggtaaggcccgttataacgatatggaaataacagtccgtacgttaggcaaatataaaaatatcgacgatattaaaaacatcgttattgccaatcaggatggtcgcccgatccagctttcagatgttgtgaaggttgttgacagctgggaagacgaagacacctattcccgttctaataaagtacccagcgttatggtcttggtaaggaaacagtctaagaccaatactgtagatgttgttgacggtgtcaacgcttctatggaacaaatgatggaaaatgatttgcctaaggatatcaaggtcgatgtcgtacgcgatcagtctgcttatatccgcgagaatgttgccgatgtctggaatgctatacttttcggcggctttctggcgcttttgataacttatatgttcctgcgcgattttcgggctacgatcatcggcggcctttctataccgacctccgttattgccacgttctttttgatgaagtcgatggactttacgctgaataatatgtcgctgatggctttgagcctggcagtcggcatccttatcgacgatgctatcgttttgattgaaaatatttttcggcatatggaaatgggtaagtcgccgattcaggctgctcaggacgctacagaagagttatctctggctattcttgctacttcgctttctttgatggcggtttttgtaccgatcggttctatgggtgaggtagttggtcagtattttaaacaattcggcttaactgtcgcttttgcgctggctttttcgacgatggctgcttacacgcttacaccaatgatatcggcttattggctgaaggattatcgcgaggaacatgccaaaccttataagcatccgcgtcccaaagttgtacagatttgtctggataaatttgaggccgggtttcaggtaatttgccggatgtatgatgaattaatggtatttgcgttccagcatccttggaaaatagttttgatttctgttgcttcacttatttttaatctttttctgttaccttttattggtacggaatatcagccgacatacgattccggtgaattttccgtcagtgttaaagctcctgccggtacaagtatcgagcgaatgaaggagctgacgctgccgttggaagaagaaatcctgcaaatgccggaggtcaggattgcagcgatgcgcttaggcggttcgcgcgtgcctattaacgaaggcaatatcgatgtcaagcttattccttcgtctgacagagatcgcagtatgatcgatattatggatgagctgcgccgtaaatttggtaatgtcgaagaattgaaagtcgcagtcgtcagtaaccagggcggcggacgcggtgacagcagaccggtgcaggtaggtctgcgcggcagtgatcttgagctgctgacaacttatgctcaggatctggcggaaaggatcagacaggttccaggttctactgatgttgatatttcttcatcggaagaagaaccggagatcatcgttaaggtcgatccgctgcgtgcgagcgcaatggggcttgattcaacttccgttggtaaagttgtggaaatggcctttttaggcaaaagtacaagcaatagttttactatcggtgataacgactatgatataattgtacagttggatgctgcgcatcgtcgtgatatcaatgacgttgccaatctgcgtgtttccaatacggaagggaagtttgtccggttgggcgatgtagctgacgtgtatttctcgtccggtcctacacgtattgaccgtgaggacagacagcgccagatcgttgtttatgctaatacagtcggtattactccgggcgatttgatccagaagatccagacggagatgatcccggatatgaatatgcaggtcggttaccgttataaaatgatcggtcaggctgatacaatggcaaaagcctttagtgagatcgcgaaggcggttattttagctattattatgatctatatggttctggcagcagagtttgaaagctttatgcagcctttggtaattatgatgtcactgccgtttgcgattatcggtgctgttttaggcttgatggtagcagggcagactgcaaatatgatgtcgctgatcggttttacgatgctgctgggtctggttacaaaaaatgcgatcctgctggtcgactatgccaatcaggcacgggctaagggtatgcctttgcgcgaggccttgcgtgaagcctgcgctttgcgtattcgcccgatatttatgacaacgctttcgactattttaggtatgctgccaattgctttgggtcttggtgccggtgctgagctgcgccaatctatgggcgtggttttagttggcggtctgacgacgtcgactttgctgactctggttgtagtgccgctgttatatttgctgagcgaggaatggaaagagaaacatttgcataaatcatagttaaggaagtattataatatgacttacgaagaaaatttgctggcgcttttggaaagttataaagcaggcactatcgacgctaaaacagctttggaaaagctgcattctgcggattatactgaccttggttttgcgaaactggatcataaccgcagtctgcgtcaggggtttcccgaggttgtttactgcgagggtaaaacagtagagcaggttgctgcgatcatggaaaagctggcacaagtacacaataatattttgggaacacgtgctgatgccgataaatttgcagcggtgcagaaggtgctgcccgatgcggtttatcataaaaattcgcgcttgatttttgtagagcgtaaacctcttccaaaagatgataagcgttatatcgccgttgtgacggctggtacaagcgatctgcctatttcagaggaggcggcattgactgctgagattatgggcaatcaggtagagagggtttacgacgtaggtgtggctggtattcatcgactgtttgataaacttgatttgatcagaaatgctaatgtagttattgtcgttgccggaatggaaggcgctttggcaagcgttgtcggcggcttggtcgaacgacctgtaatagcggtgcctaccagtgtcggttatggcgctaactttcaggggctatcggcacttttgggcatgctcaacagctgttcggccggtgtggctgtcgttaatatcgataacggttttggagcggggcgtatggcaagtattatcaatcatatgaggtgatgtaatgaaagcaatctatatagaagcatttgcgggtatcagcggcaatatgctgctgggagctttgatcgatgcaggtgtaccgttcgatcatctggcgtctgagatgaaaaagctgcacttgggagagtatgaactgatcaacgaacgtgttaataaatgtgggattgatgcgaactattttaatgtcttgctgccagatgaacatcaacatgatgtcacaattggacatcggcatgaacatccccacgctggtcaccatcatcacgaacatggcgatacaggtcataaccatgaacatcattccgattgcgctcagcattgccatcaggtgaaagtgtctgaagaacctgtgcatcaccaccatgaacatcgcaatctgcatgatatagcccatattattgcacattctgacttgcatgataaaatcaaaatgcggtctttacaggtgtttacagctttagcagaagctgaagctaaggttcacggaaaaactgttgatgaagtgcattttcacgaagtcggagcaatcgacacgattattgatattgcgggctgcgttttggctttggaatatttggggatcgaaaagatttttgtttccaatatccatacaggcagcggctttgtaaattgtgcacacggactgatgccagtgccggctcctgcgacggcagagctgttacaagggctgcagcacagccacggaaagatcgaaaaagagcttactacaccgactggtgctgcactgatgaaggttttagcagtcagtacaaatgatattccacagggctttagcggcagtaaaattgcttatggcgccgggacctgggatctggaaatacccaatgtcctgcgcatcagtatcggcgaatgggaagctgaagccggtggtgaattacttgttgccgaatgtaatattgacgatatgaatggcgaattgtacccttatgtgcaggaacgcttactgcaggcgggtgctttggattgctggctgactccgatcattatgaaaaaaggacggcctgctcaaactttatcggtgctgctcgatcctcagaacctggatcagctgactgatattttgctgactgaaacaacgtcgctgggagtacgttattatgcggtgcatcgtcatatcaattacaggaaggttactattgtgtcgttgcctgaaggtgaagtgagaattaaatatgcacagatggatgggaaaattgtgaatattgctcctgaatttgaggattgtaaagttttggctttaaaaagcggacacagcctgaaaactattatgcaggcagcagctgctgctgcggaggcacaacttgaacagtgattttgctgcttatctcgacaatttaaaaaagcagatcaaaagttttgacgccaatcttacaattactgaaaaaaagctgcagtatggtatacagttgacagtaacaaacagtgatagtaaagtagtattatcagtatataatggtaaaaaggggattaagtttgtttggggcggtacggcttcagaattgaggtcccagctggaagcagttttgacaggaaaagatactgccgataaaggggatatcgtacaggctattggaaatgactatacacttttacgaaattgtgccgattttaaaggtatttgggcaggcagtgacgaatcaggtaaaggagattttttcggacccttagtcgttgcagcagtattagtagatattactacggctgaaaaactagtccgtttgggagtcagagattgcaaactgatcaatgataaagaagttctgcggctggcagagctgattgtcgaagctgctccgatcaacacggttttagctttgaagccggaaatgtataattttcgttatcagcaaatgcgtgcagatggaaaaaatctcaaccatttgttaagcaatggtcacatagctgtactgcgaaatgttctgcggcaatgcccgcaatgtaattatgcgctggttgatcaatttacagcgtctaacgacatccgcgccagcttacagcaggaatttcctgatgttaatatagtacagcagcacagggccgaggcagatattgctgtggctgctgcttcagtattggcgcgggctaaatttttggaaataatgcaggagctggccgagcaggttgggcgaaatgaattgcctaaaggcggcagtgacgctgcgacaaactgtgcacgcgagctgctgaaagaattgggacgcggtgccctggaacggcttgtaaaagtccattttgcaaattataaaaaaatctagagcctttcaggaggctgaaatatatgaaaaaattaattgttaatgctgatgatttcggactgcatccggcaatcaatgctggtattataaaaggctgcagggacggttttattaccagtacgtctttaatgtgcagcggcgctgcttttgatgacgcagtacttcaggcgaaagcaacacctgctttaggagtaggtatccatcttactttagtaggaggtggtaaaacgcttttacaagcacggcagctacgaacacttgttgatgaagatgggcttttgcctgctgattatacagtttttgccaaacggtggtatgctggcagaataaaaaaagcagaagtcgtcagcgaactgcaagcacaactagaacgcggcttaagctgtggtctggaaataactcacgtcgacagccatcagcatctgcatgtgctgccgggaatcgccgacatcgtattggatttgtgcagtgcatttggtattaaaaaaattaggatgccgcaggaaggctggttttggcgcggtggatttaacagcactgctggccgcctgatcggccgtgaaggcttaagcttttgcagcgctttggcgaaaatgaaagccagacaggcccgttttgtctatccgcagcatttttttggaatgctggccggaggtaatttaaacgaattcttagtaggtgaaatcattaggaatctgcctgatggcgtaagtgagatcatgactcatccggggatggatgcagagtctttggaaaaaactttttcctggcagtatcattgggaagatgagcttcaggcttttctttctgaaaaaaataaatgtttattggagcagaagaaagtaactttgataaactttggtgggctttgatatgcacagaaaattgatccgcaggttgctatggatgtttgtttttgttattgctatttctgcggcagttatttattttacatttgatataagagcgttagaatatctgacgatgtttgaaccgtggtgtattgctgcggcctttggcattttgggattgggattggtttttgatggtttgcggctgatgactttggctgctgtgactgatgaaaagctaactaccagacaagtggtgaacgttgttctaagcaattattttttggcgcttgttacccccggagccagcggcggtgctgtagctcagatcatgttcatgcgcaaggcgggcgtgccggtagcaaaggccacggtcgttgtttttgtgcgtacgattatgtcgatcacttttttgattttgctggtgccatttgttctgcatagtgatcatgctttggttgactggatgccgaccagtgtcattactattgtatctgttttatttgtttcgctgccgattgcagcagtgctgcttatgaggaccagatatccggagttttggatcattgggttaacgaacaatttctcacgcgatttcaggaggaattgttttatttggtataaagaatttaaacaggcatcttttatcatgggcaaaaatcctttgaaagtaatgcgggcctttattgaatcggggctcagtctgttatgtatttatgctactgtaccaatgttttttctgggtatgaatatcaaatttgactggctgcaggttatggggcgaatggttttgctgaacctagtactgtatttttcaccaactcccggaggttcaggtgtcgcagaggcgggcttcgttgtattattttctgagctgctgcctggtggtcttgttggtattatggcagttttatggcgttttacagctgagtacctgccgtttttattaggggcagtagtttcaatacgcgcctttggctctaatgttttatctatgaaaaatctcaggaagggcgaaaatcaacaatgaagattttagttaccggcggtgctggatttatcggttcgcatttattagagctgttaaatagtgataaaaattatgaagtcgtagttttagataacctttcaagcgggttcagagaaaatgtacctcaaggaatgagacttgtcgtagcggatatacgttcgcaggaaatagaagcgttatttcaaaaagaaaattttgatgcagttgtgcatttggctgcccagacaatggtaccttattcaatcgaacatcctgatgaagattgcgaaatcaatttagcaggcttgatcaatgtgttggaaaattgccgcaagtataaggtgaaaacagttttatttgcctccagtgcggcagtatatggcaataatgaaaatgttcctttacatgaagaccttgcattgatgccaatgtcgttttatggtattacaaaaatgacatcagagcattatttacgtgtttaccacgagctttatggtatcaatacagttgttttccgttttgcgaatgtttatggcgaacgtcagggggaaggcggcgaaggtggtgtcgtcagtattttctgtaaacttttggcagtaggaaaagctgtgaccgtttatggtaatggggaacaaacgcgtgactttgtctatgcaggtgatgttgcagcagctattaaagcgggattggcagttaagggataccagactatcaatgtatctacagagcatgaaacttcggtaaataaacttttgggcgcctttgccgaagttgctgctgataaacttgaagttcgttatgcggaaacgcgacagggtgatatcttccgttctgcgctgtctaatgcacgtttaaaggaaatacttgctgtaactccgcagatgcagttaaaagaaggtatccaaaaaacttaccatgattatgtaaaacggggaaagtaggaaaataatgaataggatcgagaagggaagcttgctcgttttagcaattatagttgccttcaatatcttttttggattaggcagtataccgctgcttgatccggatgagccggtatatgctgaaactgcgcgtgagatgatccagtttaatgattatctttcaccgcgtatttataatgaatattggtttgacaaaccgccaatgtattactggcttgtagctggtgcaatgcatgtgtttggggatggagagtttgcagcgcgttttcctgcagcattaatggcctttttgactgtaataatgctttattgttccattaccaggctgtttaacgaaagagctggtttttggtcggcgctcgttttagcgacatctgtacagttcttttatcttggcaaggcggcggtaacagatacgacgctgttgtttttcctgaccgggtctttattgtgctacttgcataagcagtattggctgatgtatgtgtgtatggcactgggcacggtaacaaaagggccgatcgggatcgtttttccaggcgcgataatatttctgcatattctttgtaccgggcagtggcagaggctttttaaaatgcactgtttacgcggattactgctgtatttttttattgcggcaccgtggtattatttgatgtatcaagtgcatggaatggaatttattaatacatttttagggtttcataatcttacccgctttacaacgcctgagcatccgacccgggttttgtggtggtattattttcctgttataatcctgggtttgtttccctggacagggttgttactgcaatctattaaagcatcaattacagatagcagatctgatgatctggaaaaaatgcttttcgtgaatatctggtggcttttcgtactgatattttttactatctctcaaacgaagctcgtttcttatatcttacctatgtttccagcgctggcgattgtgattggctggaatattgccagaatgcaaaaagaaaattatggtatccgttggtcctggatttttggcagcggaataatgtttttattgcttacagccggatgggttattggtgggcagcaattgcctgaagttgctttcggaggaattgtgctgggcagcgtaacttttattttgggcgtaagtatagtttgggcgttgtggcgctatcgcgatattaatttttcagcttggctgcatgtggttaccggtgttttgacaatggtaattgcattttcctttttgttgccaatggttgccaatcggtttagtgttaaagaaatcgtcagagtttatcatacgaaatgtgatcagcagaaaccggtttatgttgataaatttttgaggcctggttttatgtattatactggtgcaccgggtgaggaagtaaaacctaaaagtggtgatttagccagagttttaaatgatcctggtcaaaaatatgttttggtacgaggattggaactgcgccgtttaaaagataaggataaactccaaaatctaaatgagatcaaagaaatcggtgacatttatttgctggaaaaatattaaaagaatatatggattagttagaaaaatgtagattaaaacaacgtcgctgaaagcgacgttgtttttttatgtcctgcgggtttttacaaacatgtatcgcgttagctaagcatcgcgatcgcgtagagagcgatgcaaaagtaatagcaagaccagaataagtttgattcatttatttgtaaatgtcttgcggggggggactcgtgtggtataattttagctgaattatttgaaacaaaaaagtattttaagtataaaatgtaaaaatgaaccaaatgaaatttaaaatacctaaatacgataaacatacaaattattttttttctgcagttctgttttaggtgaagataatggaatttgtttgatgaaaaaattatttctgattagaagtgtgaaagattgctatatactggtaagtttaatgtaagtgatatggggatgagaaaatttgcgatatttgttattgccacttttagttgtagttttagataccatctgtattataagtgctgcattttttagtatttatatacgctttgaagatactgcaatcgcccaaaaatatcttgaaatgcttatctcacaattacctatagcagtggctgtgcatttggtagtatattttgtttttaaactatatggtagagtatggcgttatgctggtagcatagaacttgttgccatcgttgctgcaaatattgttgcagctttgtcttggtatgggatttctatttatatagatttggcgttaccacgctctttatatatttttactgcttctattcttgttttatttgttggcggcagtagattgttctttagaatctacagttgttttattaataaatccaaacataaatttatatcaagtaaaaaagacaaagtattgatagttggcgcaggtgatgccggtgcactgcttctcagggaattaaatcagtaccatataggaaaaagacaagttattggttttattgatgacgataaaaccaaaataggaaaatatatggttggtacaaaagtattaggaagtagagacgatatagcagtgcttgccgataactatgaaattgatgaaattattattgccatgccttcagtaaaaggaaaaaatatcaaagaaattatcaacatttgtaaaaaaacaagctgcaaattaactattttacctggggtatatgaaattatagaaggcagtgtgagtgtaagtcaattacgccctgttgatgttgaagacttactaggcagagatccggtggaactggataacgtagctgttgcgaagtacttgtcagggaaaacagtgcttattactggtgctggtggcagcattggcagcgagattgtgcgtcaagttgctaaaatgtatcctaataaattgcttctcgttggtaaaggagaaaacagtatttatgaaataatgcaggatatgaatttagaatatccccaactaaaaaaagtgcccattatagcagatgttagagatgaagaacgaattaacgctataatggactattttaaacctcaagtagtgtttcacgccgcagcccacaaacatgtgcctttaatggaataccaaccatctgaagcagtgcgaaacaatattttaggaactaaagtaatagcagaaacagctgccaaacataaagttgaaacctttgtaatgatatctacagataaagcagtgaatccaactagtgttatgggttgtaccaaaagaattgctgaaatgtttgtgcaaagtatgaataaagaaagcagtacaagatttgtggcagtacgttttggtaatgtacttggcagcaggggcagtgtaataccactgtttaaaaaacaaatagccaaaggaggaccggtaactgttacagatgcagagatgaaacgttattttatgactattcctgaagcaagtcaattggtacttcaagccggagcaatggcgaaaggtggagaggtattcgtacttgatatgggaaaacctgtaagaatttatgatcttgccaaagatttgataaaattatcgggttttatacccgataaagatatagaaataaaaataaccggattaagacccggtgaaaagctgtttgaagaacttttgagcgccgaagatggtaccgaaaaaaccacgcacagtaaaatatttatagccaagataaaagacgttgataaagcagaattacaaaggcagatagtcgatattttacagatcaccgaaggtgatgcagttgtaagaaaattgcaggagatagtgcctacttatacgcctaacagagatgcgttaaaaaagtaagggcagattacaaacagattagaaggtgctttttgttgaaagaaaatgttctaaagaagttttctccgctgataaagaaagtatggctcagttcgcctaccatgcacggagaagaacttaaatatatgcaggaagcttatgaaaccaactggatgtctactgttggtgaaaatatcaacgcagtggaacagatgctatgcgaaaaaattggctgcaaatatgccgttgctcttgcctctggtactgcggctttgcatatggcagtcaaattggccggggtgcaaaacggtgataaggttttttgctccgatatgacttttgccgccacagttaaccctgtcgtgtatgaaggcggagtacctgtttttatagatgccgaatatgctacctggaatatagaccctgcagcattgtcaaaggcttttgaactttatccagaggtaaaggttgtcgttttggcccatctttacggtagtcccggaaagatggatgaactcaaagccgtttgtgataaacatggcgcagttatcatcgaagacgctgccgaatcactgggcgcgacttataaaggtgtgcagacgggaaattttggtaactataacgctatttcttttaacggcaacaaaattatcaccggttcgtctggtggaatgtttttaacagatgacgcagcagcagccgataaagtgcgcaagtggtcgactcaagcccgtgaaaatgtaccatggtaccagcatgaagaacttggttataactatcgcatgagcaacgttatcgcaggcgtcgtacggggtcagctgccttatttagaagaacatatttcccaaaaaaaggcaatctacatgcgttataaaaagggctttaaaaatttgcctgtcaaaatgaatccatttgatgctgtcaacagccagccaaactattggttaagctgtctgcttattgactccgaagccatgtgcaaacaagtatgtagtgaaaaggaaacattttatctaagcgaaaaaggaaaaacctgtcctacagaaattttggaagctttagcggcgatgaacgctgaagggcgtcctatctggaaaccgatgcacatgcaacccctatatcgaatgaatgcttttgttacccgggcaggcagcgatagggcaaaagctacgtactgtattaatggcgccgaagcagttccaaacggaaattctgccgatgtggccatggatatttttgagcggggcgtgtgcctgcccagtgatatcaaaatgacgacgcaggagcaggacaggattattgagatcataaaaagctgttttgaatgaagaggaagccatgtataaaaattttataaaaagaatattagatatcattttatcgtttctggctttggtcattttatcgccattgctgattttaacagcttttttgatacgcataaaactgggggcaccggtattttttaaacagctacggccgggaaaaaatgagaagatctttggtattttaaaattccgcaccatgacggatgcaaaagatgaaaatggaaatctattacctgacgagatcaggctgaccagattcggccaattcttacgttctacgtctattgacgagcttcctgaactgttgaatattttaaatggcgatatgtctatagtggggccaaggcccttattagtgcaatatctggagcggtataacgaggagcagaagcatcgccatgatgtaaaaccgggattaactggcctggcacaagtcaatggccgtaatggtatcacctgggaagaaaaatttcactacgacttggaatatgtaaaaaacatcaccttttatggtgactgcaagatcatcttccagacggtaatgaaagttttcggcagggaaggcatatcatcggcaacctcggtcactatggaagaatttaaggggaataagtaatgtttagaagatatttacagttattaaggttgttccttctgagggatgggggcaagcgtgcggcatattgtaaaaaaacaggttattttcatgctcagggcgaaggatgttattttcaaatctacaatttcggtgtagaaccgcatttgctctctttcggcagcaatgtaaaagtagcttccggcgtaagatttattacccacgatatttttggcgatgttatcttgtacaaaaataacatggatcagcatatcaggcgagtaggtaaaataactatcggcaacaatgtcttgattggcagtaacagcatgatcatgtacgatgtcactattggcgataatgttatcatcgctgctggtagctgtgttactaaagatgttcctgcaaattccattgtgggcggcgttcctgcaaaagtgataggttcttttgatgattatgagaaaaaatttatggaaaagaccaaagcttacccttggctgaggcaagggtactcgatttatgacaaaaaactggcgaagctgcaggaacaatatttctggtctgagcagaagccttgaatttgacctaaccagtttgcaggtatttaggtgatatcactcataggagaattttttattgtgcatatagtagacagtgctaaaagattagttaaatatagttggttattacaggtattagtcgagcgtgatctaaaaatcaggtatcggcgcagcttcttaggatatttatggagtgttttaaatccgcttctgatgatgattattttaacgatcgttttttccaatatgtttcgcttcgatataccccagtaccctgtatatctgttggcaggacagcttattttcggcttttattccgaagctaccagcatggcgatgggttctattttaggcggcgcggcccttataaaaaaagtgtatctgcctaaatacatctttcccctgtccagagtgatatcaagttttacaagcatgctgctttctatgattgccctttttatagtgatcattgctaccgatgtcaccttttcaataactataatactgctgccatttatattagtgcaggttttagtcttctgcataggcatggggcttttattatctgtattggtagtgttttttagagatgtccagtatttgtacagtatttttttaacggcttttaactatctgacgcctattttttacccggaaagtttattgcccgagtggctcagagaactgctggtctttaatccgctttataattatataaaatttttccgcaagataactgtttatggtcagtggccaaccatgacagagcacttgatctgtctggccttcactttctgtatgctcgtcataggcttatatgtgttcaagcgcaaacagaatgattttattttatatatataggtggtaaaagtgcaaaaaattattgttgcagataatgtttccatgtgtttcaatttggcgtctgaacgtgtggatagtttaaaagatttacttataaaaaaaataaagtttcaaagttgcagctttgatgaattttgggccttgaataacatcagcttttctgtggataaaggcgaatcctgtgctttgattggcgctaatggcagcggcaaaagcaccatgctcaaaatcatcagcggtattttgactccaaccaaaggcagcgttgaagtaaatggttctatcgcgccgttgatcgaattaggggcaggctttgattacgaattgacaggccgtgaaaatattttcttaaatggcgcgatccttggttacagcaaaaagctgatgctggaaaaatatgatgaaataatagacttcagtgaactacgtgattttatagatgtccccgtaaaaaactattccagcggcatgattgcccgtttgggtttttctatcgctaccatggtcaagcctgaaatattagtagttgacgagatattagccgtaggcgaccaggcttttcaggacaagtgccataagaggttggaagatatgatgaatagcggcactactgtgcttttggtatcgcattctgcggcggatatcaaaaggatctgccaaaaagcagtctggatagacaaaagcaatttgcgctttgtgggtaatgtagacgaggcattgcagctttacgataaaccaggataaatcaaatggggatattgtttaaatcttatttcggcaggtgagtaaatgaaaaacttgtatatcgtcggtgcaagtggctgcgggcgggaagtgctgaatattatcaaagacattcacgccatacgaggtgtccagtggaatatagtaggatttttagatgacgacttgcaggcactggatagcatcgattgtgactatcaggtcgttggtaccatcaaagattatcttccgcaggcaaatgatgttttggcgctggggatcgccagtccacaagtcaaagaaaaaatagttgcgatgctgaaagcaaaaggggcggtttttcaaagtatcattcatccctatgtggccttgggccgattcaataccatcggtgaaggagccgttatctattccggcttcggcatgacggtaaatattaagataggcgatttttgtactttacttgcctgtggactggggcacgatgttgaagtaggagacttttctactatctcttcctggtgcaacatcatgggtcatgtaaaaataggtaaccgtgtatttatgggcggaaattgttccgccgcaccaaacgcggttattgaagatgatgcctatgtcggtgtcggcagtgttgttttgcgcaaagtaaaggctggaaagcgggcttttggcaaccctgctcgagaaatggaattttgaagaagaaaattaggaggaaatgatgaatttttttgaatttaagggtataaaaattgctggtatggcaactgctgttcccgaccgtcaccagaaaatgtcggattatgattacctgtttgcagaaggagaagtagaaaaattttgcgcagcaacaggcatttacgaaaagtataatgcctatggcgtaggaactactacttcggacctgtgcgtcgtagcggccaataagctttttgaaaaattaaatattaataaagatacaatagacggtctgatcatgattactcagacgccagattattttgtgccaccaacttcctgtatcgtgcagcatcgtttgggactggataactgcggcctggtttatgattccaatatcggttgtacggccttccccttcggactgcaaatggcatgtgctaatattatggctggatgtaaaagaatattgcttttagtgggagatgccaatcctaatagaggtgaaacaagtaataaggatgggctgctttttggcgatgcaggtgtggccataatagtggagaaaacagacgaagatatttcacctattaatattgctattgaaactataggttccggatataagtcgttgattactccttatgggatggaaagacacccattacccgttgttgcacaaacaagaggttttgaatttgctgcttattataataatgcaacatatatgtcaggtactgatgtatttacttttagtattaaggatgctcctcggacgacaaaaacatttttagcaaatttgggtaatgatataagtgattttgatttggtttctattcatcaggcgaataaaatgattatagataatgttgccaagagaataaaagcacctcaggaaaaggttataaattctattgaaagatttgggaacacaagaggggcaagtacggcagtaaatatatgtgattatgctgagaataataatatatatgagggggataagaaaatattagcgctggcatttggtattgggcttaatgtgacagtagcttcttttactattgatatgtctgtatgtttaccaattattaaaacaagtgaagtttatgatgacggtatcgacagcgagacatattttaaataggaggcagaagttagatgacatattttaatttgcaaaacgcaaaaatcaaagcagtagctgccagtgtcccggatgatgttgagtataccactgattataacgacctttttggggaagaacatgtcaggaaatttatcatctctaccggtgttcagcggcgcttcacatcacacagattgggcgttactgcgtcagatttgtgttgtgccactgctgaaaaaatattaacggaattaaactatgacagaaataaggttgatgcgttgatttttgcatcatccagccgtgattatttggaacctgtcaccgcaacaattctgcaggatagattagggttatctgatgattgcatgtgttatgatattccgcttgggtgttcggcctatgtgtatggtttatatttggctgctatgcacatcaattcaggctgccgcagcgtattattattgtcagggtctacaggcgaacagttgccagatggctatgtaccttcggaaatccccatgctttttggcaatggtgggtctgctactttattggaatatgatgaaaatgcagaaccaacatacggattattacgatccattggtcgtgattttaagatgctggtttcaccttttagtggtcaaagacatgctttttggcctatggtgcaaaagtttggctatgaaaaggcgtgtgcctacagagatttatttcatatggaaggcatggacgtaatgcgtttttctttaaaagaagtagttaccatgatcaatgattttaaagagcgttttgtctgtgattatgatgaatatgaaatattggcctgtcatcaggctaataaacttattatcagcaacttggccagaaaaattaaatttccgctttctaaaataccactatctatagttgattatggtaatactggttgtgcttctatacctttggctatatgcgagcattattctaataaaaatactagtcaagatagcgggaaaattttaacttgtggatttggcattggtttatctttaggtattgttggtattacagttgagccgcagaattgtttccctgtgtttagagtaaaagaaagatacgacgacggcctgagttttgaagactataagtgaggatagcaatggataaatttgattttaatggtaaaaaagttttagttacgggtgcctcctccggcgtaggccgagaagtggccatcctactcagcgccatgggtgctaaagtagttattgttgccagaagggaatccgaattgcagaaaacgctctccttaatggaaggcagtggtcatagttatcgagtgctggacttgacagattttgacggaatcgttgagaccgtcaaagatataatcgctaaagacggcgaaaaattagactatattgctcattgcgcaggcttagccgtaccgataccattaagaagtatgtcactagctaatatctcgcagatcttcagtagcaatacttattctttcatggctttattaaaatgcgtggcgcagaaaaggctgttcaatgatggcggcgctgtcgttggcatatcctcctgcgtaggcgtttatgggcaggcggcaaacgctgtctatggcgcgtctaaaggagctatggacgcttttatgaaaagcgctgccaaagagctgcggccgaggaaaatcagggtcaatactatttgcccttgcggtataaaaacagaaatgctggctaatcaggccataaaagccatagaaggcgatgctattaacgagctgcccgattatttgatgctgccggataagatagcttctattgtagtggccctgctcagcgattccatgcaatatatttcaggtgtagcgatcgacgtagatgaggccaaaacctgggaggactaaaatggagtatttaaactttaatgggaaaaagtatctgatttttggtgcttcttctggtattggcaaacaggtagcgcttcagttaagccagcttggagcaagattggtattagttggcaggaatgaagaaaaacttcaggaaactctggagatgcttgacggtgatgggcataatatattaatttgtgatgtttccgatttttcagcagcacaaaatgcagttaaaactgcggtcagcatggataatatcaagctggatgggtgtgtattttctgctggtatttatgctatgctgcctttgggcgcggtcacagaagaaaaaataaataaaatatttgccactaatatagtgtcgatgatggcgatagcaaaagctttttcatcgaagcgcatcagtaataatggggcttcttttgtaagcgtttcatcaagagctgcgcttttacctgataaatcgcagggcgtttatggggcttccaaagcagcaataaattcgtatactgttgcagcagcaaaggaaatgtctaacaggttaatcaggtttaatgcagtttgccctgaagccgtcgatacggaaatgggcgccgggtttaaagacaatactactcaagaagccatgcagaagatctatcctcttggtatgttagaggcagaagatgtagctgatactatcatatttttattaagcgatatgagcaaaaaaattacaggccaatctatatggctatcagccggtaatgatggtggaagtatagatggtcacatattatagataataaggagaaaagaaaatgaacttacaagaaaaactggcattgattgaagaagtactggatgtagagacaggcagtttaacaccggaaacattgctggcagaagtaggtgaatgggattctatagcagcgttatcgttggtagttatgctggatgaaaaatttgaaaaaacggtaagcggagtgcagatcaaagcactggcaagcgtaaatgatattttagattacatggattaataatataaaattaaaaatataaaaaagatgaggcgaaaagaaaatgaatttacaagaaaaattaacactgattgaagaagtattggatgtagcagaaggcagtttaacaccggaaacattgctggcagaagtagatgaatgggattctatagcagcgttatcgttggtagttatgctggatgaaaaatttgaaaaaacagtaagcggagcgcagatcaaagcgctggaaagtgtaaatgatattttagcttatatgaattagggagaagttaacaatggaaaaactatatacacttttagaagaaattagaccagatgtggattttcgtaatattacgactttagttactgatggttttattgattcatttgatattgtaagtattattgcaagtatagaagatgagttcgctgtagaaattccggtagacagtatggttgcggaaaattttgaaagtgctgctgcgattatgaatcttgtaaatggagttaaaaagtaacattatgtttagttttattcataaaataaaacaatggtataaacatcagaagctgataaaacaaagtgttttaatacccattacatcttatgatcaatatgcggctctggtcaaagaagcaaaggataattctaaaaataaggtttttagtaattgctatatgctgcctgcagaaatcaaaagattgattcacctcaaaaagttttataaggtcaaaacagaacaaggattagcttttgctgatgatgaaggtgattattattatctatttttatatgtaaatatgtcggtatctttcacatttccttccttagaaaaagatattttgatagaaaatgtatattatgaaggccgtaaaaataaaaaacaggaaatctttgaaagttttttattggattcagggtgcgaatttttgaatacatatcgttctatagaagataggccctctctttcgccggacaaattttttaagaaattagaagtgttagaaaaaactcttgctttagaaggtaagaaaatagcgataccttcctataagcagcttgatgagtttgaaaaggtttatagaagtattatagataagtttgttcaaaaaaaatatacacgaaaagaacgcaaagcacaggcagacgctggctatctttattgtataactgatgaaagcgcttcgatctatgctattgcaataaaggcttgtgtccatggtggtgcttatggttctagaagtgattgccaaaataatatttatgcacctatattagtattatatttatttaaggatttttatgataatatgccaaataatcctgtgaaagaaaaagagtatatgcaaagtaagggtattggtggctggattgcagttgataatataccatcttggagagtatataaaatggtcggtattaaagctgctgcaaaatctatgaatcaatttattattagaacaaccatgtaatttttataagtaaacttaaagcaaccgggggagaaaatgattacagttttagattgtttggaaagcacagctgcaaaatttgcggctaatatcatctgctcagatgcgaaaaaacaaataacctataccgattttgtaaaaaatgcccgggctatcggcagtttcttgtgtaaatacgaaaaaatgcgccaacctgtggctgtctttatggataactctgtagaagcttgggaagccatgatgggggtagtgtatagcggcaatttttacgtggttattgatgcgctgatgcccatcgaacgcataaaaaatatctttactaccctgaggcccgtagccgttatagttgatgaaaagtgtcaaaagcagacggcaaagctggggatgggtcaagacgtttatgattatgaacaaatcgttcaaacaagcccggatgcagataaattgcaggctgtgcgcgaaaaaatgatcgatgctgatcccgtatacgcgttgttcacgtccggctctaccggcgtgcccaagggaacggtacttacccatttaagcgttatgaaatatacacagtggtatgcagaaacttttcatatcgatgaaaatactgttttcggcagccagacgccgttttactttagcatgtctgtatccactatgttttcaacgatttatacgggagctaaacttgtagtgattcccaaacagcttttttctttccctgtcaaactgatagagtttatgaatgaagccaggatcaataccatctactgggtaccttcggctatgaatatgatcgccaattttaaagctttggatgagcaccgtctgccgttcttgaaaaccgtcctttttgccggagaagcaatgcctaccaaacagcttaattactggcgtcggcatctgtctgctgatactttgtatgccaatttatttggccctactgaaactaccgatatagcggcttattacatcatcgacagggactttagagatgatgaacctatccccattggccatgcatgcagaaattgcgacgtgtttgttctaaaagaggacgataccttagccggcgctgatgaagaaggcgaactgtgcgtgcgggggtcttttttggcatccggttactacgataatcccgaaaaaaccggcgaagtctttgtacagaatccgctaaatacccattatcgggatatgatctataaaaccggcgacctggtcaaatacaacgacagaggcgaactggtatatatcaccagaaaagattttcaaatcaaacatcagggctacaggatagaattgggcgagatcgaaacagcggtaagcgcagtttcgagagtgcatgaatgtgcctgcatctacgatttagaaaggaagctgatcatcatttattgctcgggtcaaaatcttacgtccaaagatatccttttaggagttagggataggttgcccaaatatatgctgcccaataaaatgtttttcctggaaaatatgccgcataatgctaacggtaagatagataaaaaaatgttgcaaaaaatttatgagaacgagatgcaaaaatgaaaataataacctgtactacccctcttttagaacaaaatatgtatatcgtagaagagggaaagcattgtatagtgattgatccatattatgatgaaaaaacagcagtattattagaaggcaagatcgttgatctgttgcttgttacccatgaacattacgaccacatcagcggcgtaaacaaatttaaagagctgtatggctgcaaactgttgtcaaactcaaaatgtgataataatctgcaaaggcctgccaaaaatttctccaaatattttgaggcctattatgaatttcaggccgacctgcaaaagccggattttgcttttgacagcaattattcatgcagcgcagatgagctttttaatgacagcattacctttagatggcagcataatactgtgtttatcaagatggttcccgggcacagcgaaggcggtaatttcatcttcttaaacgaaaacatacttttttcaggcgatatacttttagatgaaagtgtgcctgcggctaaatttcctggtggcagtcccaaagaatttacagatgtcgcgcttccatatatcaatactctgccgccggagctagtggtgtatccaggtcatggcgagtctttttctttacatgaatattacggctatatcaataagaaggaaaaataagtgctgaaaacgatcaaatctttatcggaatacgaacaactttataatgagtatgtaacggaaggacatgtgaggggatatctcaattacttcattagtaaaaagaatatatctgcttatattaatgaagaaaaaataaaatatgctgttgttgatggaactttattcttgtttgctgatcagggcaattattataaaatgtatttttggaggcttaccgccaaaacaaaaagtctgcccgacgccgataaagaaatttgctgtgatatatatgaacaacaaaataataatttcactgtaaatgttttgcaccagttgtttatcgaaaataattatgaatgtaaacaaaagtatgagcaagtgcgattatcttacggaaatttgcatactatatcttttaaatatttagaagagaataagtggaaactttacgaaaataatatgcgtattggtacagtaagtttaaatgacaaaagtgaagtggaacaattgatagttgactacatgggtaaatacaacaaattatctatagaagacgaggactggcaggaacaaatcaggaataataatgttgtaggcatttatgttgccgataatctaattgctgtatattactttactgaaaaagcaagcaggatagttgtcgggaaaaattatcgcggtcaaaatttgagcgtttacttacgtatgtattttgcatcgcaaatccggtgggcaatttcttcaaaaaatcagtatgattgggcggaagcaaataacatttctacaaaaataacttttgcaaagttgtttgctatttataccggaaaaatcaagtatcgatatgttaaaacaatctaaataggttattacaaacattcaagataaaactttaggtaacttgagttttaaaggaagtaaaatacgatgtatatcaaacgtcatttagaaacgacaatagaaaagctgaacagttgttttaaggtgctgcttgttacggggccgcgacaggtgggtaaaactactttattgcgcaggcttgctgcggtcgatcgtacctatgtgacgatggacgatatcagtgtacgcagcctggcaatgactgagccggcgttatttctgcagcgttacaaaccgccgcttttgattgatgagattcagctggctcctaagctgttgccgtatcttaaaatgtatgtggacgaacaggggcaaaacggtgatttctggctgaccgggtcacaggcttttgagttgatgcacggtgtcagtgagagtttggcaggaaggatcggtatcgttaatttattgggtttgagtcatggtgaattgatcgatcgtcctgccgggccttttgtgccggaaaatgaatttttgctgcgccgtgtggaggagtcgcctttgttaccgatgagtgatctatttgatcagatttggcaaggcagtatgccagcgttgaatagtgcttctgaacaggattggaactgctattattcatcttatgtacagacttttctacagcgtgatgtaaaagaattggcacaggtgaatgatgaattgcaattttacaggttcttatgtgctgccgccagctataccggcagtatgcttaattacgcagctttggctaaagaggtagagataactccaccgacagctaaacagtggctaaaggttttggttgcagcgggactggtatattttttggaaccgtttgcgcatcctaacttaaaatatgcagtcaaagcaccaaagctttattttactgatactggacttgctgcatatttgctgcgttggagcagtgcagcaacgttggaagccggggcaatggcgtctaatttttttgaaacatgggttgttaatgagatttataaaagctttattaactgcggtcagatcccgcctcttagttattttcgtgatttcaataccaaagaagtcgaacttttgattgagacagatggatgtgtatatcctttagcaattcgtaaaagtgcacagccagtaaaagaaattaagaagtttgaaattttgaaaccgattgcagaaggtgaaaaagccttgagaattggctccggcggtgttgtttgcctggcaaacgatttattgcctgttgatgctaagaactggtatatacctgtgggcttattataaaaaaacagactgccatttaacggcagtctgtttttttataataaatgtttattttgtatattttcggataaatctgtcaagacgtgttaatgcttcccgcagattatcttcgctgtaagcataagaacagcggataaagccttcaccgctggatccgaagctgctgccggggataaccagcacttcttcttctgtaagcagtttttcaacaaattccatactcgtgagccctgtttgtttaatacaggggaatacataaaaggcaccttctggttcataaaggggcagcccgattttcttaaagccgtcgatcatgatctgacggcgcttttcatattcggcaaccattgccagcatgtcgttttcacaatattttaaagcagctatagcaccgtattgagctgtgatattagcacagagtactacattttgatggagcaggtttgccgcctggacgaatgctgcaggagcggtaaaataacctaaccgcaggccggtcatggcataagcttttgaaaagccgtttaaaactactgtgcggtctttgaactcagggaaagctgtgaacatagtatgttttttgccgccataagtcaggtgagcataaagttcatcagaaatgatcataatatcatgtttaacagcccagtcgccaatagccttgatttgctctttgctcataatagcacctgtaggattgttgggataaccaaggaggatagcgcgagttttatcagtcactgctttttccagatctgtgaccgtgggaacaaagccgttttccagtttggtttctaccggtaccggctttccgcctgctaaaatgatgcaggctttattagcaacataacagggctcgggaataatgatttcgccatcagggaccataatggtgcggataacgacgtctaatgcttcgctgacacctacagtaaccataatttcagttttggggtcgtattgcacgccatagtttttgtaagtatcagcagctattgcttcgcgcagttccagcattcccagtgtagaggtatagttgcttttccctgcattcagactgtcgatacaggctgcacgtacttttgctggaatatcaaaatcaggttcacctacgctgagtggtacaatgttaggattgttggctgttatttctaaaaattttgccaatccggagggcggaagggctttaataaagggagagatcattttatcgatgttgaagctcatggaagtcattccacctttcataataaatatagaaacaataaacaaatcaaatctaacacatctgtatatagctggcaagtttaattattaaaatattttgtatacatgttaagtgtaaagtattaaacaaattttgctgatcattatgaataaaagcttgtgtagaggccgtaactatggtataatatcacacggtgtaaaaatacacacgcagaatgatcacccgctgtccgcttgcggtaagggttagagacgatttctgcggaggaaaaaacaggaggcaaataaaaatggctattatttccatgaaacaattacttgaagctggtgttcatttcggtcaccaaacccgtcgctggaaccctaagatggctccgtacatcttcactgaaagaaacggcatctacatcatcgacctgcagaaaaccgttaaaaaagttgaagaatgttacaacttcctgcgcgatgttgctgcccgcggcgaaaatattttgttcgttggtactaaaaaacaagctcaagaagctatgcgcgaagaagctttacgctgcaacatgttctatgtaaacgaacgttggttgggcggtatgctgactaacttcaaaactatccaaacccgtatcaaccgtttacgtaagctggaagctatggaagctgacggaacttttgacgtactgccgaaaaaagaagttatcggtcttcgtcttgagatggaaaaacttactaaatatcttggcggtatcaaagatatgaaaaaattgccgggtgctctcttcattgttgatccccgcaaagaaaatattgctgtgcttgaagcacgcaaactgaatattcctattgttgctactgttgacactaactgcgatcctgacgttatcgatcatgtgattcccgctaacgacgacgctattcgtgcagtaaaacttttaactgcaaaaatggctgacgctgttttggaaggtcgtcaaggtatgcaaatggaagaagctgctgaagctgaagaagttgcagctgaagacgctgaataataatcaaatactggaggacgaataaatggctgaaattactgctgcattagtaaaagaactgcgtgaacgtactggcgcaggtatgatggactgcaaaaaagctttgagcgcaaccgatggcgatcttgaaaaagcaatcgacttcctgcgtgaaaaaggtttggctgctgctgctaaaaaagctggccgtgtagctgctgaaggtttagttgaagcttatatccatggcggcggacgtatcggcgttttggtagaagttaactgcgagactgactttgttgctaaaactgatgctttcaaagaattagtaaaagacattgctatgcatattgctgcaacgaatccgtcttacctcaaacgcgaagaagttcctactgctgaacttgagcatgaacaagctgttttggctgaacaggctcgcaacgaaggcaaacctgaaaaaatcattgaaaaaatggttgcaggacgtatcgagaaatactataaagaagtatgcttgatggaacaacctttcgttaaagatcccgacaaaactatttctgatttgattaccgaatcaattgctaaaatcggtgagaatatttctattcgccgtttcacccgttatcaactgggcgaaggcattgagaaaaaagaagaaaactttgcagaagaagttatgtctttcgtaaaataatgagaaaccgcataagagaacacttcggtgttctcttattttttgcccgaatggctgtagttcacaaaaaactcaaggtaaaaaagaggaaatattggtaaaatgtagaatatgaaataggatatagagttgcagaaaataggaggtcgtggaagtggcggagaaatcgaagtataagcgtgtcattttaaaattgagcggtgaagctttagctggtgataaagggttcggtattgacccggaaacggttgagtccatagcttcacaaatcaaagatgttacggaatgtggtttagaagtcgctattgtcaacggcggtggcaacatctggcgtggtttatcgggaagttcgaaaggtatggaccgcgctactgcagattatatgggaatgcttgccacagttatcaattctctggcgctgcaggatgctttggagactttgggagtcccaacacgtgtgcaaacagcgatcgaaatgcgtcagattgcagaaacgtatattcgcagacgtgccatacgtcatatggaaaaagagcgtgtagttatttttgccgctggtactggtaatccttacttttcaacagataccactgctgctttaagggcggccgaggtagaagccgatgcgattttgatggctaaaaagggtgttgacggtgtttatgattgcgatccggctaaaaataaagatgcggtaatgtttgaaaaacttgattatatcgaagttattcaaagaaaattgagtgtaatggattctacggcaatcagtctttgcatggataataaaattcctatcgtagtatttaatattgataaaccgggtaacattttgcgtgctgccttaggcgaagagatcggtaccctggtgggaggaaaataatcatggcaacagtaaaagaaatcattgaattagcagaaagtaaaatgcacaaaactactgacgtactgcgcgtagatcttgcttctgttcgtgcaggacgtgctactccggctctgctggaaaaggttatggtagattattacggcacaccgacacctgttaaccaggtagcaagcgttactgtacctgaaccgagaatgatcattatccagccttgggagaagaatcttctgaaggatattgaaagagctattatgaaatctgatttgggattaaaccctaacagtgatggtgctgtaattcggttgaatctgccgcagctgacagaagaacgccgtaaagagattgtaaaaactgttcataaaaaatctgaagatgcacgtgtgattgtgcgtaatctgcgccgtgacgccaacgatgctgttaagaaagcagagaaggctaaagaaatcactgaagatgaagctaaaaagggtactgatgatattcagaaaatgactgataaaattatcaaggaaatcgataatatcatggctaataaagaaaaggaagttatggagatctgatgctgatacctgatgtgttggcactgcctttggcagaagctattgccagactggaagctgccgagatcggatatacggttgctgatacgcagccgccgcgccggcaaaacgaagttgtggcggagaagatagctgttgaatatgtggttaggcagagtttgctgtctgacaataaagtagctcttgtaacagtaaaaaaatatagaaaggaggtgctggagaatggcattagtaatcaataaagacgaatgtatcggttgcggttcctgcgcttctacctgccccgtaggtgctattaaagaagctgacggtaaatatgaaatcggtgatgaatgtgttgaatgcggcgcttgcgctggtgtttgccctgtaggtgctattaaacaaccttgattttaagtttttaggactgcaaggccccctcttagagggggtctgtcagttttatttattccagggaagggttggtgtgcttgtgtttaacagcttgttcaaaatcaagaagaatacaaaccccgacgtaaatatcgatatcgatggtattaatttggctaatgtgccgcagcatatagcaattattatggacggtaatggccgttgggctaaagcgcagggaaaagtgcgaacatttgggcatcaggccggagctgaaactttaaaaactattgttaaaattgctgataaaattggtgttaaagttatcagcgcgtatgctttttcaacagaaaattggaaacggcctgttactgaggtcagttttattatggagcttttaagccgttatctgaccagtgagattgaagaatttaatcgaaataatgttcaggttcgttttatgggttcacgtgaaggtttgccggaagttgtaaaacagaaaatggaccacgctgtggaagcaactaaaaacaataccggtattattttaaacttggcaataaactacggtgggcaggccgaaattttacaggcaatacagcgtattgcggcagataccgaaaaaggcttgctgaaagtagaagatatacaggcagaaacttttgaaaattatctttatacggctggcttgcctgcgcctgatcttttgatcagaccaggaggagataatcgtatcagtaattttatgctgtggcaaatcgcatatgcggaaatttggactacagatgcatattggcctgcttttacccctgaaatgttcttgcaggcaatcaaagaatatcagggacgcgaacgacgctttggcgggttagtgacaaaataaattaagcaggtgtaaaagatatgttgactcgtattttgacaggtttggtaggcgttccgatagtagtatggctgcttcatagcggcggtatgctttttaatgctgcaatatttgtactggcagctatcggctggctggaattttataatatggccaaaaataaaggctataatgttttttatttttcgtccggtattatgaccttggtgctggtaggaagtttgatgtatttggatgattctatttatacattatattcactgccgctttttctggtcgtaactattattgctattttactggaaggcctgcataagcactgtaaaggtcatttggttgagaatgttggtttgtcggttatggcggttttatatatcggcattctgttttttcactttggtcttttaaggcagttaccatttgaaccggtggttattggttcatttgttttagaaggcggcgaatgttttttctggctgattatgcttggaacatgggccagtgatacttttgcttattttgtcggttgtgcgatcggtaaacgcaagttgtgtccaaatgtcagtcctaataaatctgtagaaggagctgcagccggatttatcggctgtctggctgtaatggtttatttgggagtaaaggtgttagatatggagatagtacaggcagctgcattaggtttatgcgtagctgtttttgcgccgctgggagatttggtagagtcgattttgaaacgttcctttggcgttaaagactctggtaagatttttccaggccatggtggagttttagatcgttgtgacagcttgttgtttgccataccgcttggctattatgttttagtgttttcggttttgttgactaaaacacactgattatattattcggaggcttcaaaatgaaaaatgtttccgtgcttggcagtaccgggtccattggtaaacagacattagaggttgctgcagctaatcctgataagataaaaatcagagcgttggcggcacatacaagtgacgttttattggaagaacagattaatatttttcagcctgatattgcggcgctttctgatgaggccgctgcagagcggttgaaaaaacgttataccggcaagacgaaaatccttgcaggagaagcgggtcttttggaagtggctgcgttcagcgaagttgacacagttttagcttcaatggtcggttatgccggtctgagacctactttggctgcgattgagcatggtaaagacatcgctttggctaataaagaaacgctggttgctgcaggaagtattgttatgagtgcggtagcagagcacaatgttactttattgccggtcgacagtgaacacagtgccatttttcaagctttggcaggtggcaaacatcaggaagttaagcggttgctgataactgcttctggcggtccttttcgtggtaaaagtaaagctgagcttgaaaatgtgactttagaacagtgtttgaagcatccaaattggagtatgggcagaaaaataactgttgattcttctactttggctaataaagggttggaagttattgaggcgcattggctttttgacatgccttatgaaaaaatcgatgtagttgtacatccgcagagcgtaattcattctttggttgaatatcaggatggttctgttttggctcagttgggactgcccgatatgcgtttgccgatacagtacgctttttcatatccagagcgatttgataatgctttcggacagctggatttagtaaaagcaggtcaattgacgtttgaagctcctgatttggaagcatttccggcactgaaacttgctgtcgaatgtggtaaagcaggaggtaccttaccttgtgcatttaatgcggctaatgaagaatctgtttacgcatttttggacaataagattaaataccttgatattccgatgactatagaaaagattattgtcagacatcagaatatattgcagcctgttattgaggatatagagcagacagatgctgaaactcgcaggctgaccagagaaattttaaaaaacttgtaatgagagggggaactcggacatgacaactattttagcggctatttttgtttttggtgttttgatcaccgtacatgaattcggccactttattacggcaaaaatgacaggcatgcgcgtggacgagtttgccattggtttcggacccaacatttttcagaaaaaagttggtgagaccctatatagcttaagaattattcctttaggcgggtataataaaatagccggtatggatccggaagagcctgacagcaatgattcttttaagtcaaaatctattcctgccagaatgttggttattttagcaggttcgttaatgaactttctgctgccgataattttgtttttcagtatttttatgatcaatggtattcaaaagccagtcgatcagcctattttgggcacgattatggaagataaggcggccgcgcaggcaggcttgcaggtaggcgatcgtatccttgccattaatggtgaaaagattgccacatggaatgatttggtagttaccttgcagaagtatactgataaggagattactgttacggcagagcatcagggcgcagtaaaaaattatcaaatgacgccagcctatgatgcgcagtacggcaggcccttgataggtatttctcctacatatgaacaatatcagccaggcgttgttgaagcggctaccatgggcgctggctatactaagtatattatatttgcgatgattgacggtctgcagaaaataattaccggggcggcgccggcagatgtttcaggtcctatcggcgtagctaaaatggcaggggagatggcaaatcagggcatgcttccgctactgaactttattgcttttctcagtattaatttaggcgttatcaatttattgccattgccggctttggacggcgggcattttgttctgttagttttggaagctgtacgtggcaagcctttaggagcgcgtgcgaccaatgctattcaaatggttggcgtagcaatcattctaagtattactgttttggcggtgtttaacgacatcagccgataaaataaagaggtgtctttatgaagcgcagaataaccagacaattacagttgggatctgtatttattggcggtgatgctcctgtttcagtacagtcgatgactaatacgaggaccgacgatgctgcagcgactttgaaacaaattaaggaactggcggcagttggctgcgatgtcattcgttgtgctgtacctgatatgcctgcagcgcaggccttacgggaaatagttgcgcagagccagattcctgtaatagctgatattcattttgattacaagcttgctttggcggctatagatgccggtgtcaacggacttcggttaaatcctggtaatattggcggacgtgaaaaggtagaagcggtagttgcagcggccagaataaaaaatatacctattcgtatcggtgttaatgccggttcactgccgaaggatttattggaaaaatatgggcatccgacagcagaagcattagtagaagctgcttggcgtcatattcatattttagaagaacttgattatcgcaatatcaaaatttctttgaaagcacatgacgtaccattaacgattgcggcttacaggcttttagctgctcaatgtgattatccgctgcatgtggggattactgaagctggtaccgttaattccgggattataaaatcggcagttggtataggtacgttattggcggaaggtattggcgatacgattcgtgtttcgcttaccggggatccggttaatgaagtaaaggttgcttataatattttgaaagctttggggcttagagaatatgggccgactttgatttcctgtccaacctgcggcaggaccagaatcaatctggaaaagcttgctttagaggtcgaacgccgtttagacgaaatagcagaaccaattacggttgcagttatgggctgcgtagttaatggacctggtgaagccagggaggccgatataggcattgccggcggtattggcgagggcctgctgttccgcaaaggcgagatcataaaaaaagtcagcgaagataaaatagttgacgagctgtttgatgaaattaagaaaattttggttgagaggaagatgaaataatgcgagtttccaaactgtatgctcctactttgcgtgaggtacctgcagaggcggaggttgttagtcaccaattaatgctgcgtgccggatttatgcgtaaagctgccggtggtatttatacttatctgccgcttgcctggcgtgtattgaaaaaaatagaaagaatagtacgtgaggaaatggatgccaaaggttcacaggagcttttgatgcctattgtacagccggctgagatttggcaggaaagcggacgttgggatgtatatggtgcggaaatgttcaggttgcaggatcgtcataatcgctgtttctgccttgggcctacacatgaagaaatggtaacgactttgatccgcggtgatgttcgttcttatcgccagctgccgcttagtgtttatcaaatccaaaataaatatcgtgatgaacgtcgcccgcgtttcggtttgatgcgcggccgtgaattcattatgaaagatgcgtattcctttgatcgtgacgaagctggtcttgataaatcttatcaggatatgtacgatgcttacaccaatatctttacgcgctgcggcctgaacttccgccctgttgaagctgattccggggctatcggcggcagtggttcccatgaatttatggtaattgccgacagtggtgaagcagagattgttttctgcaccagctgcgattatgcggccaatgttgaaaaagcagagctatttcctttggaagctcaagaagaagcaatgctgactaaagaagaggtagtaacaccagactgtaaaactattgctgatgtgtgcgcttatttaaaacttcctgttgaccattctgttaaagctgttgcttataacagtgaaaaaggtttgattctttgttttgtacgtggcgatcacgaagtcaatgaaatcaaagttatcaatacctgcggcgttattgacctggaaatggcgacagaggaacaattagctgctgctggtactgtcggcggttatatgggccctgttggcatcgataataaaaaagtcatagtagttgttgacgctactgttatgaaaatgcataatgtttgctgcggcgctaataaagaagggtaccatttcatcaatgttaacccgggccgtgattttacaccaacatatgtagcagatatccgtcttattcaggaaggggatccgtgcccgcattgcggcggcgaagtgagcaaagcccgcggcatcgaggtagggcaggtctttaagctgtttactaaatacagctctgctttaaaagctacctatcttgatgaaaacggtaaagagcagcctatggtaatggggtgctatggtgtcggtgtcagcagaacgatggcggctgctattgagcagaattatgatgacaatggtatcatctggccaatcgaaatagcaccctatcatgtgctggttgtgcctgttaatacaaaagatgaagcatctgcagcgaaagctgaagaaatttatatgcagttgaaaaaagtaggtctggaaacagttatcgatgatcgcaacgaacgccctggtgttaaatttaaagatgctgatctgatcggctatccgctgcgtgttgtagttgggccgaaaacattgactgaaggtaaccttgaagttaaaattcgtaaaacaggcgagatcagatatttgcctttagatggcgattacgtacaagatatcaaaaatattatcgcagaacttgctttttcaaaataaaagattaaactgacagtaaggaggtgccgataatgagttctcatgattgggagatgcttattcgtctattattggccgcttttttaggcggaatagtcggcatcgaacgcggcagcggcgatagaccggctggctttagaacacatattttagtttgtgccggtgcggcgttatttatgctggtttctatgtacggttatgatgattaccctatgcatggggaagaattcccgcgcaatcgtgattcttcccgtattgctgcacaggtagtcagcggtattggttttcttggtgccggtacgataatgcatgagggagttaccgtacgtggtttaacaacagctgccagcttgtggatgatttcggccattgggttggctgccggtgctgggatgtatgttttaagtattggttctacggcggtaatgatggttactttggtaacttttcacagctgggaaaaacgttttgccggcagcagtagaaatgcccgccgctttattcggattgttgccgaaaatgaacccggtattataacgaatattactgcgtatttgactgaaaatggcgtgaaggtacgcactttaaacgtaaaaaacaactccagaaaaaatgaggtagttttagagctgtatctcaaaataagtaaagatagagatgatattgatattattcgcggtttacaaagcattgaaggcatcattactttagagaacgttggttgattggtaagaaaggacgcaagcatgaaggcgaaatattgtattgttcctgataaaaataaattttttgcttttttagccgagcagtccttaacggaagcagaattattgcgtgctcgtttaatccagccggagaaaatctttatggatatcgaggctgccgtgtggcagatagagtataaagcagttgctcccgtgacagaaactttacttgcagcggtggcaaataagcttaccgctgcttttaatttaaaaaaagtggagctgcagcagacaaatctgctggaaacttccgttgtggctgaatcggttaaaacagaaaataagcttgaaacagaaaataagtctgtgcaggtagagccggagcgtgaagaaattcctttgccgccggaagaacctgaagcagttgaaataggagaagctgccgcatttgaagcagtaccttcgtgtgaggcagagcgtaaagacgatgcttatgaaaaggcttataaccttctctatggagggaataaaaaagcagacggccttatttttggtaaagcatttaaaggtaagcccaggccgatgatcgacgttatcgaagaagaaaatcgagtcgtagtagaaggtgcttttgtaaaaagcattgataaggacggtaagctgactgcttttattgagcgagtcctgcgtaccggcaatgtgatgctcacttttaatttgagtgatgaaaccagtggactttatgttagaatgcgttttgaaaatctggaagaatgtctgcagtttaaaaagaagatcaaaccggggatgcagctgcgtattatgggtaatgttgctcctgacagatttttgtttgatgaaatggtcatcagtcctcagggtattatagctgttcctaaaaaagaacgtatggataacgctgaagttaaacgtgtcgagctgcattgtcatacaaaaatgagtaagatggatggcgtaacaccaatggaagatttggtggagacagcgataaaatgggggcataaagctcttgccatcacagatcatggcgttgtacaggcttttccgttctgctttgatgtagctgaaaaagcggatatcaagctgattttcggtatggaaggttatttgatgaacgacgacggccatgatatcgatctggagccgacggatacgatcaagaaaagccgtatcaagaaggtcaaaaataaccacattatcattttagcgaagaacgaaacaggtctgcgtaatctgtataaactggtaacaatcagtcatttgcgttatctgcataaacggccgatgctgccgcgtgaggttatcgaagaatatcgcgagggtttgatcctgggttctgcctgtgaagctggtgaactgtacagggctattttggcaggtcgtcccgatgaagaattagagaaaatagcttctttttatgattatctggaaattcagccaaccggaaataatatgtttttagtcagacaggagcgctgcacagtcaaacagctgcaagagcataataggaaaatttatgaacttggtaaaaagctgggtaagttgactgtcgctacctgtgacgtgcattttttgcatccggaggacgcgcagctgcgggctatcctgcaggctgggcaaaattattctgatgctgatcagcaagcacctctttatttcaggacaacagaagaaatgctcaaggaatttgagtattttggtaaagaaattgcttatgagttgtgtgtaaccaatccgaataagattgcggagatggtagaaaaaatcaaacctgttcctgatcgtgatcagctgtattcaccatttatacctggggcagaaaaagctatcaaggaaatgtcttatcagcgtgcgcacgaatggtatggtgaaaatctgcctcaggtagtcagcgacagactgaaaatggagctcgattccattatcaatcatgggttctcagttctgtattatattgcacataagctcgtaagaaaatctttggacgatggttatctggttgggtcccgtggttctgtcggttcttcttttgtagcgactatgatcgatattacagaggtcaatccgctgaaaccgcattaccgctgtccacaatgtaaacacagcgagttcttcatgaaagaagaagttgcgtcaggttttgacttgcctgctaaagcatgtcctgagtgcggtacagagatgatccgtgatgggcacgatattccgtttgccgtgtttatgggtttccatggtgataaagtacctgatattgatttgaacttttccggagattatcagccgacagcacataaatatacagaagaacttttcggacgcgataatgtttgccgcgctggtacgatttcaacgattgctatcaaaacggcttttggttatgtcaaaaaatattatgagtcgaaaaatctgcatgtgcattcggcacatgttgcaggtcttgtagaaggctttgccggtattaaacgaactactggccagcatccaggcggtatcatggttgtaccacgcaatatggatattcattatatttcgccgatgaacagaccggccgatgaaaaagattcggaaacagtaactactcactttgattatcactcgatcaacgaccgtctggttaagcttgatatacttggtcacgacgatccgacggttatcaaaatgctggaggaattgacaaatattccaccgcagcagatacccgtcggcgatgaaaaaactatgtctattttccgttcgactgaggctttcggcgtaacacctgagcagatcggcagtgccgttggcacttatggtattcctgaatgtggtacacagtttgtacggcagatgattcaggatgttcagcctaaaaatttcagtcaggttgtcagggtatcaggctattcgcatggtactgatgtatggctgaacaatgcgcaggatctgattcgcgagggtaaacccagtgaggaaacgatttcgacgcgtgatgatattatgactaatctgatcgcgaaaggcgtagatcccagtatgtcctttaaaattatggaatatgttcgtaaaggcaaggcagctaaaggcggtctggaagcacccatgcttgaagcgatgcgtgccgcaaaggtgccggaatggtatattgaatcctgtaataaggtccagtatctttttccgaaggcgcatgcagtggcatatgttatgatggcttatcgtatagcatactgtaaagtgcattatccacgtgaattctatgcggcatactttactgtgcgtgcaccggactttgatatggatcatgttgtcaaaggcgttgattatatgaaacgttatattaaagatgtttatgcacagggctataaagcaagtaacagagataaagatacggtgacgtatctggagttggtgattgaaatgctggctcgtggttttgaaatggaacgtatcgatttgtataaatcccatccgacgcgttttaccgtcactgaaaagggattgaggccgccgcttgctgctttgggaggaattggtgttactgccgctcaaagtatcagcgaagccagagaaatcggtcatccttttatttcccaggaagatctgcgggtaagagccaaggttggtaaagctgtagttgaaaaattggcagaacacggagccttaggggatttgcctgaaacagatcagatagatttattctgacattaggaggcgattagtatgttagaagcaggagtaaaagcaccggaattttcgttgcaggacaaagatggtaatattgtgagcctgaaggattttttagggaaaaaagtagttgtctatttttatcctaaggattctacaccggggtgtacacgtcaggcctgttcttttcgtaataattacggtgagtataaaaaaatgggcattgaggttatcggcatcagtaaagacagcgtaaaatctcatgctaattttgccgcgaaacaggagctgccttttattcttttagctgatcctgaacgtcaggccatcgaagcttatgatgtatggcaggaaaagaaattgtatggcaaggtatcaatgggagtagtgagaacgacttatatcgttgatgaaaaaggtatgatcgaaaaagcatatcccaatgctaatcctgatactaatgctgaagaaattttagcctatttgaaaggttaagaatcaaaagcgcgttcttgtataaggaacgcgctttttgataaatacttgcaggaggatacgatgcagataattatttccccagcaaaaaaaatgcgtattgataatgatgaccttgtttctgcggcagaaccgcgctttttaaaagatacagaaattttactggcagagctgagaaagatgcagtatgatgatctaaaaaagttgtggcaatgtaacgatgagattgcggcattaaactataagcgtttacagactatgcgtctgcgtgctaatcttaccccggcagtattggcttatgacggtatccagtatcaatatatggcaccgcgtgtttttgaaaatgcacagcttgattatgtggcagaacatttaaatattttatcagggttttatggtattttaaaagcaatggacggtgttgttccttatcgtttggagatgcaggcaaggctgccggctgccgggtgtaaaaatctgtatgacttttggggaagcaggctttattttgagctgacgcaaaacgataaaagcattcttaacctggcatcaaaagaatacagtaaagttatagaaaaatatttgacgccggaagtggaatatgtcagctgtatttttggtatttggcaggacggtaaagtaaaggttaaagctactgaagcgaagatggcccgtggtgaaatggtacgctggtgtgccgagcataatatttcatacattgaagacacaaaaaaatttgactgtttaggatataaatatcagaaggagcaatccaccgcaaaggaatttgtttttctgaaaaactgaaatttgtgactgggcttgataaaagtttgaattttgccatatatattgtagggaagttaacaaaaaacttgtaattaatcttacagggtggtataatataagcagaaaatttatgacttcttttgagagagtgggtgctatacccgctctttccgcttatttaagataaattacagaccggaggtgagtattgtgcagaaggaagctctggaagctttgattgctgatttggtaacgccgctcttagatggtaccgatctgactttggtagatgtagaatatgtgcgtgaaaaagattggtatctgcgtatctacattgataaaccgggtggagttgaaatcgacgattgccaattagtaagtgaaaaactgactacagttttagatgaaaaagacccgattaaagagaaatattacctggaagtttcatcaccaggcattgaccgcccgttgaaaaaagataaagattttacagcagcttatggaagtaaagttgatatttccttttttgctccgtgggaaggcttaaaagacctggttggaattttaataagtcacagcgatgagacaatagaaataaaaacgattatcaagggaaaagaagccaaaaatccggtcagcattgaccgaaaacttatcgcaatgatcagaccgcatattgatttttaaagattataaagtataggaggattaagaaacgtgaacgcagattttattctggcaataggggaattgggaaaagagaaggggattgatccggaactcctgttccaggcggtcgaagaagctcttgtaacagcttataaaaagaattttggttctaaccagaatgtccgtgttgatatgaacaaagtaacaggtgaacttcacatatatgcacagcgtcatattgtggcagaggtaggcgacgatcctaatgagatttctctggaggaagcccgtaaaatagatcctcgctatgaagtcgatgatattgtagaaactgaggtgactccacgtaactttggtcgtattgcagcacaaaatgccaaacaggttgttgtacagcgtatccgtgaagcagaacgcggcatggttttcgagaaattttccagcagagagaatgatatcgtaaccggtatcattcaacgtatggaaaataaaaatgtttatattgatttaggtaaggccgaggctattttgactcctaacgagcagatacccggagaaatttatcaatatcatgataggatgaaaacctatatcgtggaagtaaaaaagaccagcaaaggcccacagattatggtttcccgaacacatccgggattgctgaaaagactgttcgagctggaagtccctgaaattcacgacggattggtcgagatcaagtcagtagctcgtgaacctggtatgcgttctaagatatccgtttatactaaggatgagaatattgatccggtcggtgcctgtgttggacataaaggtatgcgtgttcagactattgttaatgagctgcgcggtgaaaaaatcgatatcgtcaaatacagttccgagcctgaccaatatgtggctaatgccttatcgccagctaaggttgtcagtactgaagttctggaagaagaaaaaatctgccgcgttatagtgcctgactatcagttgtctctggcaattggtaaagaaggacaaaacgcacgtctggcagcgaagctgacaggctggaagatagatatcaaaagtgaatctcaggctgccgaagaagcagaacagggagcacaagaagttggtgtagcctatgaagcagacgaagattaaaaagatccctcaacgtaaatgtgtgggctgtaatgaaatgaaagagaaaaaagctctgctgagaatagtacgttctccggaaggtgagataagccttgatttgactgggaaaaaggcaggtcgtggagcttatgtttgccaatctaaagaatgcatcacaaaagcagtgaaggaaaaacgtttggaacgggccttggaaaagccggtcagcgaagaagtttatgccaaattgctggaggatttgcctgatggcgaataatggtgtgacttttgccttaggattggcacagaaagcaggtaaactggcatcaggcgactatgctgtaagatctgctctgaaaaacggtaaagctaagctattgcttgtggccgcagatgctgctgaaaattctaaaaaagatatgtattttatggcagagatgtctgatacacccgtggttgaatgcctgaccagagatgaactgggctgggcgattggcaaggctaaaagaaccgcagtagttgttttggataacagctttgcgaatatgataaataaaaatatatgacataaatacgcttggaggtggatgaatgggtaagcatagagtatatgagatagcaaaagaacttggtaaaacaaaccaggaagtaatcgatattttagctaaaaataacattcaggtaaaaagtacgttaagcactgtagacgatacggttagagatttggtagtgaaaaactcggccaggaagcctgtacaggagaagaaggctgctcctgcaccgcaacatatagtgaaaaaagagccggttaagcaggctgaagctgctccgaagcaggtgcaaactcaacagaattccgctgcgaatacacagcgtccgcagcaacaacagggtcagcgtcccaacaatcaggggcaacgtcctattaatcagggtccgcgtcctgctgccgttaatcatcagcaggggcagaacgcaggtcaaaaccgtcctaatcagggcatcagccagcagaatcgtcctaacaaccaacaaggtcagcgcccacagcaacagcaggggcaacgtcctaatacccaaaatcaaggtcagaggtttaatcaaaaccgtcctaaccagggcgttaatacgcaaaatcgtcccaataatcaacagggacaacgcccgcagcagggaaacagaccgcagcagcgtcctcaggggggcatttatataggcccgcgcgggcagcagcctggtcagcataatgctaacgcagcgcgcccgcagcagcagggtaatgcgcgcccgcaacagggaaatatgaataacaataataatgcacgtccgcagcaaggcggtaccggtgcacagcgtccgcaggccaatactgctcgtcctgctggtgccaataataaaccttttaataaaaatgcccgtaaagataaaccgcagatcaaaggttcttatgcaactaaagacagccgtcctaaccgcagtaataatcatatgggacgcagtaataaacgccagggcggcaataataatgttccgcgcgtgcagcagcctgtagtagaggttcagaaacctacttatgtagagatcggcgaaactatcaatgtcaaagattttgccaacctgctgaaacgtgaagtcagcgaagttatcaaatctttgttcatgttgggcgtgatcgttactatcaatcaggatatcgactttgatacggcattgttggtcggcagtgaatttgatgtcgaagttgccgcgttaccgcctgaagaggatccgactgaaattccggaagtggaagatgatccggctaaacgtttgccgaggccgccggtaatcactgttatgggtcacgttgaccatggtaaaacttctctgcttgacgctattcgcaaggctaatgttacagcaagagaagctggcggtattacgcagcatatcggtgcttatcaggttaattatcagggcaaaaagattgttttccttgatactcccggtcacgaagcttttacagctatgcgtgcgcgtggagcacaggtaacagatgttgctattttggtagttgctgcagatgacggtgttatgccgcagacgctcgaagctattaaccatgcaaaagcagcaaaggtacctattatcgttgccattaataaaatggatcgtcccggagctaatccggatcatgtaaaacagcagcttgctgagcatgagctgatcccggaagactggggcggcgatactatcatggttccggtttccgcacatcagaaaacaggtatttccgaactgttggaaatgattctgctggttgcagaaatgcaggatctgaaagctaatccaagtctgcctgctcatggtacgattattgaagcgcagcttgataaaggccgcggccctgtcgctactgttttagttcagcgcggcactttgcagatcggtgatactattattgccggtactgcttatggcaaggtgcgtgcaatggtcaatgaccgtggtgaaaaagtcaaaaaagcactgccttctacgcctgtagaggttttaggcttgaacgatgtgccgctggccggtgatattcttgattctactgatgaaaagattgcccgcagtgttgctgaaaagcgtgttgcgaaaaaacgtattgaagaaattcagcagaattccaaagtttcgctggatgatttgttccaacgtattcaagagggcgagattaaagacctgaatatcgtcgttaaagccgacgttcaaggtactatcgaagctttgcgttcttctttgcagaatataaaaaatgacgaagttaaagtcgttgttgtacatgctggtgtaggtgctattaccgagtccgatgttatgctggcctcagccgccaatgccctcattatcggctttaatgttcgtcctgatgctaacgcccgtaaagcagcggaagcagagaaggtagatgttcggacttaccgcgttatttatgacgctttgaatgacgttgaagctgctattaaaggtatgctggcaccaaaattccaggagactatccagggccgtgtagaggttcgtcagatgatcactatttcgaaaatgctgattgctggctgctatgtgctggaaggtaagatcaccaatacttctaaagtgcgcgtagttagagacggtatcgtcatcaacgaagacgaaatcgacactttacgacgtttcaaagacgatgtgaaggaagtcgctgcaggctatgaatgcggtgttactttggaaaaattccgcgatttgaaagaaggcgacgtgttcgaagtcttcactatggaagaagtcgccgtcgaataggtgaactatggctagattaagagtagaaaaagtacaggaagcaatcaaacaggagcttagtaaaatgctgctgatggatatcaaagatccacggatccagtttgttaccattaccggagttgagcttactgacgatatgagcattgctaaagtatatgtcagtctttatggtccggaaaaggatcatgaatccgcctggcagggattgaataaagcacttggttttatgcgtacggaaatagcaaagcggattcgcctccgctttgctcctaatttgattttagtaaaagatgcttcgatggagtatagtgcacatatcgagggattgctgaagaaaatcaaagaagaggaaggttcctcgcatgagtaagcattgttccctgcaggaaacagccggtttactgcaggctgccaataaaatagtattatgttctcatgtgagcccagacggtgatacgctgggctctgctttgagtttgatgaaagctttgcagaagcttgggaaagatgtcattgtgactgttgatgatgaaatctcaaaggtctataaatttttacccggtatcgaaagctttgtccgttttcaaaatgatgagcggatagctgcggatctgttagtcgtgatcgacgccagttctttagatagagccggtaacgtgtcacagtgtgtcagtgctcctaaaacactcaatatcgaccatcatatttctaataccgaatatgccgattatttgtatcttgatacagctgcggctgctaccggtgaaattatgtatgagttgattgatacattaggagttgaagtggatctggagatggcaacgtgtatctatacggcgctgtatacggactgcggttctttcaaatattctaatacgatgccgaaaacgatgcggatagctgcagctttattggaaataggggtaaaacccaatgaaatttctgacagtatggagattaagccgcgctctaatatcgagatgctgacaaaggttctggaaacattgacctttgatgctgatggtaaaattgcatatatttctattaataacgaaatgtatgacaaagatgttgatacagataccttcatttcttatccaaggtatattgaaggcgtcgaagttgctattatgtttaaagctgtggaaaaagttgttacccgtgtcagtatgcggtctcgtaaccttgatgtttctgaaatcgctattaccttcggcggcggcggtcatctgcgcgcggcaggctgtactatcgaagcctctttacctgaagcgcagcagcagcttttgaaagccttaaaggaaaaattagtatgacatcaggcattttgaatgtactcaagccctgtggaatgacgtctcacgatgtggtcggctttctgcgcaggactttgcaaactaagaaaatcggacacggcggcacacttgatcctgatgccgcgggagtactgcctgtttttatcggtacggcaacaaggctgttggaatatgcagtcgaaggccgtaaaaattaccgggctgaactgaaattcggtatcaagacagacacaggagacgacagtggtacgatcattgccagttcagaggttcgtgttgttactgaagccgaaattcaagaaactctgcaaaaatttatcggtgaacaaaaacagattccgcccatgtactctgctataaaaaaagatggtcagaagctttatcagctggcacggcaggggattgaagttgaacgggaagcacggagcattactattgatgctttagagctgcttcataaaactggtacttctttaacacttgatattgtatgttcaaaaggaacttatgtaaggactttgctggaagatattgcggcagaacttggtatgtgcggcacaatgagctttttattacgcaaacaggtaggagatttttacctgtcagaggccaaaactctggaagaaattgccgctgcaccgtatgcttatctgcttcctgccgaagcagcagtgcaggatttacaggaactggttttgacagataagcaggcgctgcggattactcagggggtaaagaccactgtgcgaggcatttcaaacggtacataccgcttgaaaacgattacaggtgattttcttggcattggcagtgcagagtccgagctcgttaaagctgaaaaaatattgaaacaatttcaagcagatgcggaaatgatttagattgaggcagatatggaaatcattacttcattagaagctgtgaaaactgaatatagtcccagtgttattgctttgggaacttttgatgggctgcatttaggtcatcaggatattataaaaacagcacgtgattatgcccaaaagcatggtttgaagctgattgtttttacattcagcaatcatcccttatccctgatcaagcctgatttagtgccagtgcgaattattacgcagcagcaaaaaataaaatacctggaaaaattaggcgttgatattttggtgaacgtaccttttgatcatgatttagccggattatcgccggatgagtttttgaaaaaactggctgtatttaattatcgatgcttagtagtaggtgaaaatttcagctatggttttttaggcagcggtaaaacagatactttgcagcgtaccggattgcacgatcactttaccgtgattatcaggcaactggtcaaatgcggtaaaaacgttatcagcagtactggcattagaagtctgatccaggcagggcatgtggagcatgctaatcagatgctggggcgtgcttatgcgctcaccggtatagttacgcatggggcgcagcgcggcaggacaattggttttccaactgcgaatatcgaactgcagcgcagtgaaactgctgtgccggcaactggtggttatgcggtcaaggtcaaggtaggcgataaactgtatttcggtatggccaatatcggcaataaccctacttttggcgatgtggagcatgcacgtctggaggtaaatctgtttgattttaaaggcgacctgtatggcagggagatcactgtttacttttataaatatatacgtggtgaagaaaagtttgccagtatcgatgagctgaaagcacgtattactgaagaccgcgaaaatataaaaaactatttccaatgttacaaaaaatagttgtctttaaaagtcaagtgtggtatactacataagtacttcaaccaaggcttggatgctcgcttctccaacgacctctatgctttggggattataaaaaaatggaggaattacaatgttaacagctgaaagaaaacaacaactcattcttgaaaatgcacgtcatgaaggcgacaccggatctccggaagtacaaatcgctgttttgagcgaacgcatcaaatatttgaccgagcatctgaaagaacacaagaaagatcatcattcccgtcgcggcctgttgaaaatggttggtcaacgtcgtggtctgctgaactatctgatggctaaagatatcgaacgttatcgcgctatcattgctaaacttggtatccgtaaataattttgagtatcagagcctgccttttcggcaggcttttttattttcctgttaaggtgacagagttttgtaaaatattgttttgttttagtaataatgctgttagtaacaatgattttgctatataatagggaatagataatatgctaataaaactacgccgggaggttaaatgatgagtaattattccttgccgttgtttatgcaggtcaaagaaaacgcagttcaggacctcaataaaaatctaagtttatatatgcctaaacttattcataccaaaactttgattttaacgacagacggacttttacagactttagagaaaaaagtcgttgttctattgaaacagttactggattttgaaatcattaccgttcaggagagttcctttgattttgctgttgatgttgctaaaaaggtagcaatgaacaatatcagcctgatcattggtttgggcggtggtacagcactggatacggccaagtatgctgcttttgttgccaacgtagcttatatagcgataccgactacacttagcaatgacggcgttgcttctcctgtttccgtattgtttgcagaaaacggccgcaaacattcttttacttctaaaattcctgacggattattgatcgatactgatattgtttttgacgcgccgaggcttttgatgaaagccggtgtcggtgatacgatcagtaattatacggcactgtatgattggaagctgggttgtgaagaaaacagcgatcgtcctaacgattttgcctatatgctttctgaaacggcgtttacttcgcttttatattctgaggctaaatcactgacgacagttcccgggattcaaatgctggcccagtcactggtcttgagcgggctggcgatgcagatagctggtaattcacgtccttgcagcgggtcggaacatttattctgtcacgctatggatgagttgtttgagcataatatcccacatggtattttggtagctcttggcagtgtcgtagcctgccgtcttcagggacgtgaccatcatattctgctggattttctggaagcttacgatatttccgttagcccaaaaactttgaatattactgaagaagaatttatcaaagcctggatgtttgccaaagaagtccgtaagcgttatacgattttaaataagatcaatttacagccggagattttcagacagatgtatgagatgctggtaaaggaatgtaagtaatatgctgtatgtacataagtttatttcgggctggctgctgccgcccggcggtattattgtaatgctgtttttactgtgcggttattgttttaagaaacgcagcagacttcgttatcctttaacagcagtaacggtcactttatatctgttttcgattcttcctgttgccggaatgctgatgcagggactggaaaagcagtatgttcctccggcgttggaaaaaataatcggtaaaactgatgctgtagttgttcttggtggcggagcggtcagggatgtgcctgatatcagtggtagagaggccttgtcggcggtctctatgaatagactgatcaccggggtgcgtttgcagaaacgattagatatcccgatcattatcagcggtgggcaggtttttgccgacagtggtacagaagctacagtggcagaaaaagtgctgctagagctgagtgtaccgccacaacagatttttactgataccgaagcaagaaatacaactgaaaatgctgctaatgttgctgcgttgtgccgtgaacagcagtggcagaaaatcgtattggtgacctctgcttttcatatgccgcgcagtgtactgaattttgcggataaaggtttggacatagtgccttttccctgtgattatcagctgagcggaaaaatgcagctaagtatttttagctttatgccgcaggggtttgcgctggagctttctgcaatggcgttaaaggaatatttagggctgctggctttaaagatattgtaaaaataatcatggtaaaataaaaacacctggtcggtaaaccaggtgtttttattatttgcttaaaagtttttgagcctctgcttcatcaggcgtagcatagtaggttgtttgatcggtatagatcacaaacccaggtttagcgccattgggtttcttgacaaaacgccgctcggtacagtctacaggtaccttgctgccgctgcggcttttgctgaaatacgcggccagtagaactgctgctgcaatatcacttgccgttgcctggggcagcgttgtttttaagatgacatgtgatccgggaatgtttttagtatggaaccacagatccttaccgcgtgctaatgtaaaagtcacgtagtcgttttgtttattatttttaccgatatataaggtcgtttctttggaaagctttatgagcagcggctccgattttggttcctgacctttatgttttttgccctgattctgcagcagtcctgcggtgataagctcctgttttatttcagcaatttcgttcttggttgttgccgtagtcagtgaagcgtcaatggaagccaggtaattgagcatctccctggtcgtttcaatttggttttggacttcgctttgtgcacgtttatatttattgtaccgtttataataagcctgtgcgttttcagtaggtgaaagtaagggggataattggatttcaagcggctcgttgtcataaatattaagcagttggcaggaactttgtcccttgctgatctgataaatattagccatgatggtatcggcgatcatccgctgtgcttcagctttatcagcggtaagcagatctttttccaaaaccggcagcttcttttccagacgctgactttcgccgatgactaatttttgcagtgtttcctgttcaggtagttgaattggcgtcagggtgactgcataattaagcgcactgttgatatctggcagttgtttagtattacagcctggttccaaaatcgtgggcgcaaaaggcagaatagtcttgacctgattagtgcggctgatgacagcatataccggcgctgatgtttgctgattagctgattgctgtaatgaatagattgcattggcgagacgttgttcttcctctgcagtcaaagcagttgtgttgctatctataccagccgcagctaaaagctcggatgcagttattttgccaatgcctgtagtggcagcgatcaaagcagctaagctgtttttagttttaaattcgtgcattgcctcaatgattgcattagctggagctgttaaaatagaaaggccggtctgctgaggcggcgcaagataaggcagattaggcatgatctgccggaaagaactcattgctttattaacatgcttcaagctgtcgaaaatcagaccgttttcggcaaaaatgatattgctgtttttgccggtcagttcaaaaatcagttgtttagtaactatttgtctagcggtaccgattgtatcaatatctatggtaatgatacgatccagaccgctttgctcgattctggttatacggccttcttccagatgcttgcgcagcagcatacaaaaagccggaggactttcgggacgttcgggtaaattattcggcaggtacagcatcggggaaccgcagctgaaatcagcaagcaatgccgcagtatcgcgttcgcgttttacaagcagcagcagcgactcgtatgagggcataaaaaccttgtagatcttgccgcctaaaagctcttcttttagtttatttgttaaaatatgcaaggtcaaaccttctaaattcattgatttgctcctttttacttcgttttttagtgattttgatttgcacgtgaaagcagaataagatataataatagttcaagaataagtatacaacagatttcgcgattagcaaataatcggaaggggatacgattatgaaaaatctgcttttggtgctgtgcctggttgtcttttgcctgcaggcagaagcggcgcttccagctactgatcagaatttagaagcggctattgcctatggtaaaagctatcagggtgaaaaaaatgacgcagttatgctgcagccgtgggtaattgctgaaagttttgaaaccaatccttatcgtgatgaggaaaggatcatagtttatactccttatctgctgacggctctggataccgcaggaaaaacgcaggaggctgccggtatcagtgtggagaatgctaaagaactggtagcgcgttacgatggcgtgctagttatacgtgcggtgatcaacgcaccgataattctgaatgaaaaagatttggaagtgcagcttgtgcaaaatgggaattttgtcacaccataccacagcgactatttagacggcagatatcttgacaaggcggtcaataagcctatcgttgatgtggaggtacagaaaaagctggatcggatggaaacgatccaggaaaaagcggcagcactgcaaaaacagctggatgccttgaaggaaaataaaatcaagcctgcagacatcgatttggagcagaaaacgaaatcggatgtcaaatctgagtctgtggaagtaaagcagaagatctgccagctgcagtataatttttattttgatcaggcagaattcaatgttgacaaaccttatttactggtcattaaggacgcttattgcggcggacgagaatttgccgtggatcctgcgttattaaaataaaatgaatcatcataaaatttaggaggttttagcttgctgaaaagtatgactggcttcggccggggtgaatatgaagacgagcagttttcagtaacgattgaaatgaaaacggtcaatcaccgttataacgaggtagctattcgcttaccgcgttttttgaatccggtagaagacagaatccgtaagactattttaaaatctgttaatcgtggacgcatcgatgtttttatcaatgcttcttataccaatacagaaaacgtttcgattaaagtagataaagctttggtactggcgtatcataacgctttgcgtgatgttggttccgctatcggctgtgaagactataagcttaacgagcagtcggaaattttatatttgtcacgctgcccggatgtgatcaatgcacaagaaggtttttttgacgttgagagtgtttggccgaagctggaacaggctttgcgtcaggctatcagtaatcttgtcgctatgcgtgagaccgagggcagtaatatctatggtgatttcattaaacgtgccgatctgattgccgaaaaactggcagtaatcgaagaacgttcgccgcaggtagttgaagaataccagattcgcctgagcgacaggatcaacgaactgcttgcgaaacataaccaggtcattgaaccggaacgattgctgcaggaagtcgctatttttgctgaccgtaccagtattactgaggagatcgtcagactgaaaagccatattaaacaattcaagctgatcattgatgcagatcagcctgtcggtcgcaagctcgattttcttatccaggaattcaaccgcgaggcaaataccattgcttccaaagccaacgattatactttggcgcaagttgttgtggagattaaagctgagatagaaaaaatcagggaacagatccagaatatcgagtaatggggaaagggtgaaagtatggatatcaaattgatcaatattggctttggcaatattgtagctgccaacaggatcatttctatcatcagtcctgaatctgctcctatcaaaaggattattcaggaagcgcgcgacagaggtatgctgattgatgccacttatggccgcagaaccagagcggttatcgtgactgacagcggtcatattattttatcggctgtgcagccggaaacagtcgccaaccgtttagtgcagactgacgacgaagacgaagaataaataaaacggaaggtgggctaatcgtgaagccgcaggggttattattagttttgtccgggccttcaggagccggcaagggaacgatttgtcagatgcttagggaaaagcttcccgacttggcttattccgtttcagttactaccagacaggcgcgtaacggcgaagttgacggcgtgaattacttttttaaatctgtggaagaagtaaagcagatgatcgcagagggagaactgctggaatatgccgaggtttatggaaattattacggtacgccccgttcttatgttatggaactgctgaatcagggtaaggatgttattttggagattgatatccagggcgcgatgcagatcaaaaaacgctttcctgatggagtatttgtgtttatcgtaccaccgtcacttgatgaattatgctcgcgcatttataaacgcggcacggacagcgaagacgttattaaacgccgtttagcttcggcaacaggtgaactggcttatgccaacgaatatgattatatagtcgttaatgatgtggcgcagaaagctaccagcaaagttttgacgatcatggaagcagaacgttaccgtgctgccagaacttattttattatcaatgaaatttgccatgcggcacataaggagagagaaatatgagtatggttgacccttctatcgattatttagcagagaaagttgacagtaaatacaccctggtgattttagctgccaaacgtgcccgtgaactgacggtaggcaatcagaatatgcctcagaaagaagtaagcaccgctttacgcgagatcgctgacgacgttattacttacgagcgtaaagtacgctgagataagggggcttagtgccttgttgctaaaaggaaagaaaatcgttttaggcgttactggcggtatcgccgtttataaagctgtcgatctggtaagccgtctgcgcaagcagggggccgaggtgcgtgtcgttatgacagagcatgcccggcagtttgttacgccgctgacatttaaggaaatcagcggcaacgctgttgcgacttctatgtggaacagcaaccaggaatttaatgttgagcatatcgctctggcaaactgggctgatgtttttgtagtagctccggctactgccaatatcattgcgaaaatggcgcacggtcttgccgacgatctgctttctacaactttactggccgctcaggcaccgatcatcgtctgtccggcgatgaatacaggtatgtatgaaaatgctttgacgcaggaaaatattacctgcctgaaaaagcatggcgtaactgtgatggccccggcgacaggctttttggcctgtggtacttctggtgcgggacgtctgcctgagccttgtgagatcgtggaatttgtcaaagctttctttgccagaagttgtggcgatatgaaaaatctgcgtgttttggtaactgctgccggtacccgcgagccgatcgacccggtacggtatgtcggcaaccgctccagcggtaagatgggttatgctatcgcgcaggccgctgctgaccgcggtgccgaggtgacgctggtttcggggccgtcggtgctgaatccgcctgctaatgtcaaaacggtgcaggttgaaactacgcagcagatgatggacgcctgtctggcagcttacaacgacatggatatagtgatcaaagctgctgctgtggctgattacagaccccatgatgttgccgaacagaaaatcaaaaagaaaactgacgacgctttaactgtcgtaatggataaaaaccctgatattctaaaagctctgggcgaacgtaaagaaaaacagtttttggtaggatttgccgccgaaactcaaaatctgattgctaatgcaaaagaaaaaatctgcaaaaagaatttggatatgatcgttgctaacgatgtcactttgcagggggcaggatttaactctgataccaatatcgttaaattcctgtttccggacggcgaagtgcgcgagctggagcaaatgaccaaagcagaagttgcagaagagcttttgaatactgttctgcgtttgcgcaaatcgtaaatagtataactcgttcaaaaggcgtagaaataagcttttgtaggcctcgggatgtaaaaatgaaagatttttgtaaaatctgttgcaatttgaaagttgttccgctataataagcattgtaattgaatattactcatcaagagctggtggagggaatggccctgtgaaaccgcagcaaccattgtaaggtgaaagtcttgcaaaacggtgctaagtcctgcgataattcgtgagatgagaatgctgaacaataatacgcagcgctctcattatgagagcgcttttttagtaagcaggcagattgatgatgtgtactttatctaaaggaggctaattatgagaaaattatttacttctgagtctgtaacagaaggacatccggataagatcgccgatcagatttctgatgcggttttagacgctatcttagaacaggacccgatgggacgtgttgcgtgtgaaactttggtggcaaccggtcagatccatgttgtcggtgagatttccacaaactgttatgtggatattccgaaaatcgcccgtgaaactgtagtcaatattggctatgaccgtgctaaatatggttttgacggtaatacctgcggcgtgctgatctctatcgacgagcagtctgccgatatcgctttaggtgttgataaagcgctggaagctaaagaaggcaaagcagaggaaactgaggttggcgccggcgaccagggtatgatgtttggttacgctactaacgaaaccgaagaatatatgccgctgcctatctgtctggctcataagctggcccgtcggttgtcggaagttcgtaaaaacggtaccttaccgtatctgcgtcctgatggcaaaactcaggttacagttgaatacgacgacggtaagcccgtacgtatcgacgctatagtcgtttcttctcagcatgcgcctgaaattccgatggagcagatccgcgctgatattatggagcatgttattaaaccgatcgtacctgcagaaatgctggacgatgataccaaatactatatcaatcctaccggccgttttgttatcggcggcccgcagggtgactccggtctgaccggacgtaagatcattgtcgatacctacggcggtatggcacgtcatggcggcggagctttctcgggtaaagaccccacaaaggtagaccgcagcgctgcttacgccgcacgttacgttgctaaaaatatcgttgccgccggactggctgataaatgtgagattcagctggcttatgctatcggcgtggcacagcctgtatctgttttggtagatacctttggtaccggtaagatcgacgatgataagatcgctgacctggtgcgcaaaaacttctcgctgagtccggctgcgatcatcaaagctttggacctgcgccgtccgatctataaacaaacggctgcttacggccatatgggacgtactgatattgatctaccgtgggagcgtacggataaagccgcttccttgaaagaacaggcaggcttgtaatttaaaatgttggtaaagtcacagcttctgcgggagctgtgactttctttatcttagtataaaaactgttgtccgtaggaaaaataaaggaattttcatttaaatagtagaagtataataagttaaagtttacagtaatggagcattacatgaaatatataaatgtggcaatcaacctgcctgtaaaaaacttgttcaaacaatttacctatgccgtaccgccacagctggaccacgttgatgtgggctggcgtgttgtggtgccgtttgggtatcagacagtggaggggtttgtgacatcgttggccgcggctgctccggcagaatacgaatgtaaagaaattttggcgacactggatacgcgcccctggtttgatgcggaaatgctggcaacggcaaattggctgtccgaatattatctgtgttcgccggctgaggcgatgcggctgtttattccaggtaaaaccagcatcaagcggcaggctgtttataacgatgaaggtaagctgatcgcttatgattacgaaaataaactgaaaatcaagacccgtatctgctttgttgtgactaaggcaggacgtgaggctctggtagcatataataaacgtctgcgtgcacagatgcatgccttggaagtgctggcagaagccgaacgccctctaagcggggaggaactggcgtcagtgcaggtgagtgctgcgacactgcgtatcttatgtgagaaaggctggagcgaacggagtgagcaacgtgttttgcgcaacagctatgccaacaggacggagctgaaggaaagtctgcatttgacagatgagcagcgtcaggctgttgaggctatcggtagtgctattacagagccgcatcaggaaacttttttgctgcagggcataaccggcagcggtaagacagaggtttatctgcgggcggcagctcaggcaatggaagcaggcaagcaggttctgctgctggtaccagagatagcattgacggcacagatcgttaaacgttttcaggcctggttcggcgatgaagttgcggttgcccacagcaaactgtcacagaatgaacgtgccgatgtgtggtataaaatgcgtactaacagtgccaagctgctgatcggtgtacgctcagctgtttttgctcccttcagcgatctgggcctgataattattgatgaagaacatgagagcagttacaagcaggacgagcggcccaattatcatgcgcggacagtagccctgaaaagggcgcagctgagcggtattccggtagttttgggaagtgcgacacctgatttggaaagtttttataaagcgcgccaaggaacatatacacatctgcgtttgctgcagcgtgccaacggcagtatgctgccgcatgttgaaattgccgatatgaggctggaattgcagcgggggaataaatctgtgctctcggcggcgctgaacgatgcattgctgcagacggcggtacagggagagcaggctatagtactgctgaacaggcgtggtttttcaacctttgtgatgtgtcgtgactgcggtgaaagtattgtatgcccgcattgtgctgttgcgctggtttatcatagtgccggtgaagcaatgcgctgccattactgcgggaataccgccccgatcccggacgaatgtcctaactgtcatagtcgcagaatcagattttttggtactggcacccagaaagcagaagcagaaattgccgaactgccggaaatcaggattttgcggatggatcaggattcgactgtcaaaaaattcgcgcatgaggatattcttaaatctttcagcagcggtgaatataatgtgcttttaggtacgcagatggtagcaaaaggacatgatatacctaacgtaacactggtgggtatcctttcggcagattcgacgctgaatctgcccgatttcagagcttcggaacgaacctttgctctgctgacacaggctgcaggcagagccgggcgcggtgacagggccggccatgtggtcctgcagacttatgacccggataatccagttatcaagctggcggcgacgcaggattacgacgcttttgccgccagcgaactggaaatcaggcaggagctgggatatccgccttataccgaaattttgaaaattacggtattggataaggaagaagtgcgtggcagcagtctggcccagcggatcgttaattttctgcagacgctgcagctggaacatcctgaacaggaactgttggtattggggccgttccctgctattgttgccaaggtacgtgacctgtaccgcatgaacattcttgtaaaatgtccgcagatggagctggtcaagcgtgctttgtggaattctgaatttaaagaatgccgcaatgtcttttttgacgtcgaccctgtcagcgtagtttagaaattgcctgcagtttgaattttatggtataatataaggtacgaaaaattaaggaggtccgaccgtggctaaattagatatcattgttgccggtaacccagtgctgcggttaaaggcaaaagaagtagaacgtatagataaaaaaacagtccgtttgctgaacgatatggcggaaaccatgtacgcggcagacggcgtaggcctggcagcgcctcaggtaggtgtttccagacgaatagtagttatcgacgttggcgaaggcctgatcgagcttatcaatccggttatcaccaaaagggaaggttccgttgtcggcggcgaaggctgtctgtcggtgcctaattttgaaggcgaagtagaacgcgccgaatatatcgaatgtgagttttttgaccgtaaaggcaaacgtatgaagcttgccagcgacggcattctggcgatcgctgtacagcacgagctggatcatttggacggtatcctgtttattgataaagctaccgtactgacacctaaagaaacagtgcctgtcggcatagaataggcggcaagctaaaggagatcaaaatgagaattgtatttatgggtacaccagattttgccgtaggaactttacaggctttggtggaatcaggtaagcacgaaattgctgccgttgttacgcagcccgaccgtcctaaagggcgcgggcagaaaatgctgatgacgcctgttaaagaatacgctttatcgcagggtttacctgtgtatcagccggcgaaggtcaaaacacctgaggttattgcccagctgcgtgagttgcggccagagatcatcgtcgttgccgcttttgggcagctgctcaatcaggagcttttggcactgccgcctttaggatgcgtcaatgtacacgcttcgctgctgccgaaatatcgcggtgcggcaccgatccattatgcgattttgcagggtgaaaaagaatccggcgtaacgattatgcagatggatatcggcatggacactggcgatatgctcagtaaagttatcgttcctataggcagtgaaatgacgatgggagagctgcatgacgaattgaaggtcaaaggggctgagcttctggtgcgaacgttagacgagcttgcctcaggtgcggcaaagcctgaaaaacaaaatgagactgaagcaacctatgccaagctgctggaccgggcaatggaaaaaatcgactggaataatccggccgctaaaatacacgatttggtgcggggctttaatccggctcccggcgcatttaccagattgccggacggcaaaaacctgaaaatatggaaaacagttccggcagaggggcagacggcaccagcagggacagttacggctgtaacgaaaaaaggttttatagttgcctgcggcagcggtgccttggaagtgctggaagtgcagccggaatcgaaaaaacgtatggaagccaaagttttctgcaatggccgcggtgtagagcccggcactgtattaggtaatatcgaggggtaagtaatgattgaacttgaaaatgtttttaagcctaaaaagagggtctttgtttcactgactctggccagcgccgttattggcgcgatggtcatttatatggcctggcgcgtagctctgcctggtttggaacaaatcaacgccaagctgcctgtggtgttcggcggcatcggtatcgctattgctttagcattgctggccggtgttgccggtatcgtactggctatcttaggtgtgcccatcatgaagatcttttacttctgggcctggaaggctgtgaatatcttattccccttcgccgttgttttaggcagaatttttgatatcccgcgcagtaagatagagcagtcttttatcgaagtcagtaatcatttggtcaagcagcatcgcgtcaaagttcctgccgaccgcattatgatcctgaccccgcactgtatccagttggatacctgcgtacataagatcacccgtaatatcgaaaactgccgtcaatgcggtggctgcagcgttggcgatatgctggggctggcccataaatacggtatccacatggcagtagccacaggcggaactttggcccggcaaatggtcaaacagatcagaccgaaagctattgtggctgtggcctgtgaacgtgatctgaccagcggtatccaggacgtgtttccgctgccggtagtcggcgtgctcaatgaacgccccttcgggccctgcttcaatacccgcgtcgatatcaaacgtgtggaggccgcagtattagactttttagaagttgaggaaaagcatggcgaacattaaagaacaagccgctgccgtgaacatgctgccaaatgcccgcttaacagcggctcaggtgatcaacagcgttttcaaagatggggcttacgccaatatagcgctcggcaaggcgctgagcaaacaaaatcatagcgaacaggacagaaggttcgttaccgagctggtttacggcacggtgaaggccaaaggcactatagactggctgttgcagcagctggtatcacgtcctcttggcaaaatcgaaccgatgattttaaatatattacggctgggtgttttccaaatttattttttggaacgcataccggcctctgctgcttgtaacgagtccgttaatctggcgaagaagttcgggcatgaaggcatcgtaaaatttgtgaacggcgtgctgcgcggagcggtgcgcagtaaggaaagtatcgtttatccggatgcagaaaaagatcccaggcagtatttagcacttaaagaatttcatccggactggctggtaaaacgttggctcaaacaattcggttttgaaggggcgcaggctttgtgccgctttgataacgagccaccgcctctgacactgcgtgtaaacactttggtgagtgaccgcaaaacacttctggcgagtctgcaggaggatggctttgaggccgaaccttccaaatggtgcgaagatggtatcgtctgtaccaagatcccggcgctcagtgttttgttcagtaaatacaacgatatgttttatgtgcaggacgaaagctcgatgctggtagcgccggttttagcacctcagcccgggcagacagttatcgacgtttgcagtgcgccgggcggtaaaacgacccatttagcgcagctgatgcaaaacaaaggcgttatctacgctactgatatccacgagcataaaatcaagctgatcgaagaaaacagcaggcggctgggcattacgatcattgagccgtcgctgcaggatgcggcagagtttaagcctgagtgggcgtcaatggcagactgcgtgctggtagacgctccctgttcggggctgggcgtactgcgccgtcgtgccgaagcacgctggaagaaaaataagattgatctgaaaactttccctccgctgcagcgcgatattctgcgcaatgctgcccgttatgtcaaacctggcggcaggctggtctatagtacctgcactttagagcaggccgaaaatcattacattcccgctgaatttttagaaaataatcccaactggcagtatgccggttttcagcacccgctgacaggtgaaacagtggacgaattgcagctgctgccgcagcgtgatggtaccgatggtttctatatctgcgctttggtgcgtaaggagtaggctgtgaaaaaagagctttttggcttatctttaattgaattacaggaacttttggtggctgccggattgaagaaattccgcgcggctcaggtttatcaatggttataccaaaaatccgtaactgcttttgatcagatgcgcaatctttccaaagcggatatcgcgatcttagaagcaaactttacgctcctgccgcagcagcttaaaatcctgcgcgagcaggtatcgcaggacgatctgacccgcaaggtgctgctcgaatttccggacggcaattcggtcgagaccgtactgatgcgccatgattatggttacagcgtctgcgtatccagccaggtcggctgcgatatggggtgtgctttctgtgccagcggcctcagcggctgcattcgtaatctgaccgccgctgaaattttagcacaggtttatatttttaacagtatgctggtcggagaaggtaagcaggtcagtcgtattgtcgttatgggcagcggcgaaccgatgcttaattttgacgccgttatcggcgcactgcagttcctgcatcgggaaaatacgctgtatatgagttaccggaacatgacgatttctacctgcggtattatcccaggtatcgaaaagctgacgcagctgggactgccgatcaatctggcaatttcgttgcacgcagccgagcctgagctcagaaccgagctgatgccggtcaacaaaggttttccttttcaggacgtcatccaggctgccgaagcttatgtcggttataccggcaggcaagtgacttatgaatatattctgattgccggcaaaaatgacagccctgtagcagccgagctgctggctaatcatttgcggttcaaacatgccagcgtcaatttgattccggccaatccagtgccagaaaaaggctttgaacgcccatcaaaaaaagtggttgaagcatttttaaaggtactgcagaaacataaaatcaatgccaccgtccgcagggaaatgggcaaagacatcgatgccgcctgtggacagctgcgcgccaggtttgcccaagagcagcaggactgaaagcagcgcgttatcagtgacaaaaacagacataagctataaagttaggaggttcgtcaatgttcgttatcagtaaaacccatgtgggcatggtaagaactgtcaacgaagatgctttgttgacaacaggacctgagctttttgcgctggctgacggtatgggcggctatgcagccggagaaaccgccagcagggaagccttacaggttttgcagcaggaagcggaaaaatttaaggagcttactggcaccgagttatgcaccgccatgcgtgaaacagtgcagcaggctaataagcatatcaggcagatggctcaaaatgaaatacagtatcatgatatgggcacgacgctcgtggcagtatatctggcggcagacggtaaagcttatgcggtcaacgtaggtgacagcagactttatacatggagtgccggcactttacagcaggtcacccgcgatcattcttacgtcgcagagttattggccaacggcgaaatcactgcacaggaggcttttaagcatccgcagaaaaatatcattctgcgcgctgttggagccgaagacgagctggaagtagattgctttactctggagctgacagcagataccaagctgcttttatgcagtgacggtttaagtgatatggtggatgacagacagatcagcgagattctgcaggcacatcagacggccgaagctgccgaagtgctgctggaagctgccttagacaacggcggcagagataatatttcgctgatcctgatagacttgaccccgaccgaggaggataacagatcatgacagatatggtaggaaaaattttacataaccgttataagatcctgcgtcctgtcggcgtcggtggtatggcggaggtttacctggcacaggatatgctgctggaccgggaagtcgccgtaaaaatactgcgcgctcagttcaataacgataaaagcctgctcgaacagttccgccgcgaggctcagtccgccgcaaggctgatccacccttcaattgtcaatatttttgacgtttgcgaagaaaacagtttgtattttatcgttatggaatacgtagatggtagaacattgaaaagtattttagaggagcagggcccactcaaacctttctgggccgtgcatattgcctgtgagctggctgccgctttgcagcatgcccataaccgcaatattattcactgcgacatcaaaccgcataatgtccttatcaataaaagcatgacgcctaaaatcgccgatttcggtatcgcgcgtatggtcaccagtcagacgatggtctatacatcgtctgtgataggttcggtgcattatctgtcgccagaacaggctggcggctgtcccgtaacggctcagtccgacatctattcactgggcatcgttttgtatgaaatgctgacgggacacgtgccttttgacggcaaaactgccgttgctgtggcgatgatgcacctcgaaaaaacgccgccgccgctgaaaagctatgatccagacctgcctgattcgctgcaggaagtaattgacaaagcgcttgccaaagacccggccgaccgctatgcgaccgccgaagaaatgtggcaagacctttataatatcaaaactaaaatgctgcaggaaagcgttgaagaagattatgccgaaatgctgggtattacggcgatctcgaaaaacgagctggccgagcctaccggaaaaatttacgactgggccaacgataacgaggaaggcgctcctgaagaaaccattatcatgaaaccggccttcaacaaaagtactgacgagatagtgcaggaagctgccgctatcaacaggcgggaacgacggaacaaatacatcaagctgtttgcactggtcgctatcttgtccgctgtctttttaatggtcggtaacgtgttcagccgcaaaacagttgatgtgcctaacgtagttggtaaatcggtagtggaagcgcagaaaaccttggaaaaatcgggctttactgtaaaactggacgaagaatacgacgagaaggtgactccgggctacgttatcaaacaagaaccggaaggcatcagtaagcgtaaggaaggcagcgagatcactttggtggtaagcaaaggcctggaaatgctggaaatgcctgatttgattggaagaaagctggacaatgccaaaaagtttttaagtgacctgggttacgaaactggtgttgtaacttataaatttgtggcaggcaaaccggccgattctgttttggaacaggccccaaaggctaaaaacaagacaccgaagggatcgaaggtagatctggttgtatgccgcgatcccaaagacctgtcgatgccggacgtaatgggcagcagcttgaatgatgctaaaaaagccctgaccgagttaggtatcatggatattaccgtacgttatattgaaagcggcagcagtgagggcagcatagtaggtatggaaccgcctgcaggctctaagtttgccgccgacggtaaagttgtattgcaggtatcatccggcagtcatccgcaaagcgtcaataaatatgccgaattcgtcgtgccccagggcagcggtacccaggatgtgcagatcatcctgatcgatgccaacggacagagaactgtttatcagggcgcgcagaaagccggcgtacgtatacgccaaaaagtggaagttaccggcagcggcaaagtgcagttcttctgtaacaataaaatggtcgaggagaaaaatctgtgagtatcggccagggaagaatcatcaaaacctataacggttattactatgtcgacagcggtaccgacgagcttgtcacctgcaaggtcaaaggcaagcttaagcagatcaggttttcactctgcactggcgacatagttgaatttgaaaccaatcataacggcgaaagtatgattaccaggattctgccgcggcgcaattttatgctgcggccgactatcgccaacgtcgatttgatcatcgtcgcatttgcctgtatcaaccccgatttcagctacctgctggccgataagctgctggtactggcagagcaggctggtatcccggccgttatctgccttaataaaatcgacttggcaccggcggggctggtggccgagatcgaaactgtttataaacgggctggctacgaggtctatgcgatctctgcgcagcagggaatcaatgttggcaagctgaaagatcggctgtacggtaaaataactgtatttgccggaccttccggcgtgggcaagtcatcgactctcaacgctatcgaacccggtatgcagctggtgacaggcagtgtcagcgaaaaaatagggcggggcaaacacaccacgcgctttgcacacctgctgccttttgccggcggttatctggcagacactcccggttttggcaatttgaatttagaagaactggacgataaaaaactggcggcatgtttccgcgaatttgcaggctttgaagatggatgtaaatttacgccctgcacacatacgcacgaaccgatatgcggcgtcaaagatgcgctggcagccggagagatagcgcagtcgcgttacgaatcgtacctgactattttagaagaaataaaatccaaaaaggaaaaggacggaagaaaatgatcaaagtagcgccttcaatcttatctgccgattttgcttatctggcagacgaaatcaaaaaaatcgaaactgccggggccgactgggtgcatatcgacgtgatggacggtgcctttgtaccgaatctgacctttggcgcgccggtcgttaaaaagatccgtaaggtcaccgatctcttttttgactgtcacctgatggtcaacaatcccgagcaatatatcgatgattttgccgatgccggcgcggatatggtagtagtacacgccgaagctaccaaacatctgcaccgctgtgtgcaatacatcaaaaacaaaggtatgcaggccggcgtcgctttgaatccggcttcgccactatgcctggtggaagagattctgccggatgtggatatggtgcttttgatgagcgtcaaccccggttttggcggtcaaagcttcattgaaaccacagtaccaaagatcgcccggctgcggaagatgatcaacgatgcaggcctgaacatagagatacaggtagacggcggcatcaacgataaaaactccaaactggtacgtgaagcaggtgcgactgtactggttgcaggttcgtatgtttatggcgctgctgataccaaagcggcgattgccagtttaaaagcataattaaaaagctaaaaacaaaaacactgcaaattttgcagtgtttttgtttttagtaaagtttttcctcctttaaagcaggaaaaactgtttctgtaaaataaaatacccctaaagcagcttagaaaccttactttaggggtattagctgctgcctataacatattttaaggacggtaaaccttacagggagccatacccatgtacttattgcaggcttggcgtatgaatacgaatttggaggcgaagcaaaaacaacggtcaaaggtctgagcacgccggcactcagtatcaaaggcagtagcggtatgttggagctgggttatatcattcaaaataaagatgtgaacgtgcctgctgtctacattggcttgcagggcagtcacgggtaaaaagcaggcgtctgccagcaagtgcaaggcggcgtgaacagccggtcgctgccattcctaaactgaatgacagcgatagttttttggaaattccgaaaacgcatatccttgcgaactaactgaattgctattaggagcagtcagttctagtatatagacaaggggtaaaccttaccaagtgaaacgatgacaaaggaggtcaaaaacatggcaaaagtttacaaagatttgagagagtttttaaaaacattagaagaagaggggcagctgatccgcgttaaagatgaggtcgatccggaacctgatattggcgctgccggacgtgcctgcgctaatatggataaaaaaccggctgttttgtttgagaaggtgaaaggttataaatattctgttgtaaccaacgttcacggttcctgggctaatcatgctttgatgatgggaatgcctaaagacactcctgtaaaggaacaattccatgaattgaaccgccgctgggacaaattcccggtaccgccagtaattcttccacgtgaaaaagcaatgtgtaaggaaaataccatcagcgaaaatatcaatttatttgatgttttgcctctttacagaatcaatgatcaggacggtggtttcttcctgtctaaagcagccgttgttaccggcgatccggctgaacctgataatctggataagcagaatgtcggtatttaccgtatccaggtcaaagatatcgaccgtatcggcatccaggctttgccttttcatgatatcgccatccagcttgctaaggcagaagaagtcaacgagcctttaccggtagctatcgctctgggcaatactccgcttgtaagctttatggcaagcactcctgttaattacgaccagaatgaatatgaattcgtcggcgccttgcaggatggtgttcctactgaaattactaaagctgatactgctgagcatttgtatgttcctgctcatgctgaagttattctggaaggctacattatgccgcgcgttcgtacctgcgaaggtccgtttggcgagttccctggctcttattccggcgccaggaatcagtgcgagatcaagataactcatatcacacatcgtaccaatccgatatttgaaaacctgtatcttggtatgccctggactgagatcgattacctgatggctcttaataccagcgttcctctgtacaaacagctgaaagctactatgcctgaagtgcaggcagtcaatgctatgtatactcatggtatcggcgttatcatttctacgaaggtccgttacggcggcttcggtaagggtgttgctttccgtctgctgtctactccgcatggtatgccttattccaaggtcattatcgttgtcgacgagtttgtcgatccgtttaacctggagcaggttatgtgggcgcttactacccgcgtcaaacccagtaaggatgttgcgatcatcccgaattgtgcaggtatgccgcttgatccgtcttcggtaccggcaggtatgcatgacaagctgatcatcgatgcaactactccggtcgctccggaaccgaatccgcgttctgttgaattgttgaaaccgtctccggctaccccgaaatgggaagctattttcagagactttatggctgcacaaaaaaatcaatgataatttgaggtataaaggaggcagatttttatgaaatgtccgcgttgtgatgctgatacagtaagagttatgactaaatccccggttggcgatgtttgggaagtttatgtctgcgatacctgcagttattcctggcgttctaccgaagaaatccatgtacatgatgtatttaaactaaaaccggaagatattcctaatttacagcaaattccgccggttccacctttaaagaaataaatggctgcttggggcttggacaagtccttggttggcgggggagttagctcccccgctttttttatataattgcggggtgaaaaattatggcagagctgaaaacacagcttgatctgcagcagataccaaaaatagtaggcgaggatgggacgcagcttttggcacgctgctacgcggtgcttgagcataccaggtggccgctttatatcgtgggaccttcgggcagcggcaaaagtattatcgcgatgaacctggccaggcagtatgcgctggctaaaaatgtgccagcctattatgtgcagctgagtccagaacagacgaaaacaagcctgattttgggactgaggctggaaaacggcagtctggcagttaagaacggagttgtggcagattgtatggagcgtggcggcattatcatcgtcgatgaggcgacacattcggtacaggagattttgctgatgttcaacagtatactggaccggacttcggtaacggcgatcggcgataagatgatttatgcacacgaggattttcggatcgtgttctgctcgaatgacagcagatattccggcaacgttaagctgccgcagagctttgctcagcgtctggtttcattttatttcgattatccgacggcggaagatgagtttttgatagttgaacagatagtagcggaggagtgccgtgccaacgatgttgtaccggtaagcctaaagcgttatattattgagttgatgcgcgaggtacgcagcaatacttatccactgtcggtacgcaatggagctattgccgtagttctgtgcaatttggagcttttgcggcgcccagagtggcggcagacgatgatagattcttatttttatgataatcggaatgttgaaagcatcaagaggtatctggcaaaaagggtgttgggctgtgaggcggaaagcgttactgatttgacagacaggcggatcatggagctggagcaggccttgagcgcgattggaatcttaacttttaaagagatcattttgcagagctttatgtattatctggatgtagacctgggtttttatgatttacagatggtgaaggagaagcttgagtcttcaattatttaaggtggctgttatggaaaattttgcggtattatgcccggaactggcttttaaaatagaatattatgctgatgcggctgcatatcaaggctctgttggcacagaatgcggacagctgtgctgctgtactggaagtcgtgaggacgggtatgtgctggctgtcaactgcgaatggttgctggaggcatggcagcattcagctttgcatgggctactgtcgtcagagagttttactgatgcatttgttgtaagtgaactgagtgttttgcggtatgaaaagacggcgttgtttacggggacggaggggtacaggcacttggagcgacttaagaaggatattttataccgatgcatctatagaagtctgtttaggacgttctgtgagtataagctggcgcgtgagctgcctgagtttggcaagctgctgacactgctgaatatgacgacacaggatgtggagttggagcagcttgtgaaatatttgccgcagcgtggtcagctggaagctttacaggtgtttttgaagtacggtatcatcgagccgcagggggacagtagtttttatgattttatggtacctctggccttgactgcggtacggacggagctgcagaatttgatcgtggtgacagatttgctgacagaatggctgcagggattgcggatgacgtcagaaatcacacctgtgtgggagcagaaagctgctgcggcaggaactgccggctctatgtcgatgctgaaggtgttcagcgaagaagaattatgcgagattgtacggaaagagcatatccgtgaactgaaagcaaaaatgcagaatgccgcatcacagacaggtaagctggcaggcgtagggcgtatggtaagcaggtcgggcgacacttcacagttctttttggatacagtacggaaatacaggcgcgagatcggcgagctggaatatatttttaagcagagctttacgtcgatgaagatcattggtgcttatgacggcgatgttaacctgaaaaagcagcaggaagcgtatctggcctctaaaacagcggaggaaagcagggtttatcagtattacttgcggcgtaaggtatcggtagatattatgatcatacgcgatgtttcgggcagtacgtaccgatttgaacgtgaatatgcagaagcgctgatcgagattttagcggcagttaataattttgacggtatcagaacactggtaatagattttgagggcggggccaaagtacgtaaaagttttattgataaagccgagcagacttcgatcgtaccgttgtctggaggggggactaatctgctgccggcggtgcggttgctgcaggaacaggtgctgaaggggaagcggagattgttgtttctattatcggatggagagatcaacgaccgtgagcaggccgaaagggagttgaacgattattgccgcaggaatcagattgagatggtgaagataacttttgacgaagaggataaatatggctatgagcatacgacaatcataaatctgcacaggtttcttgcccgcaggattatcgaaaagggggcgacatactgatatggaaggtttgttgaagtgcccgcatggcctggttacaggctgcgaggagcggcaggggttgaaaatctatcgacatctgcaggacggtgaggcgtgtggattgctgaatgggttgcagctgacgccggaggaaattttgctggaaatgggtcagacttttgtgagcagcggcaatttcacagctttagcaccatatgtgcgtggtggtgaacttgctgagggatatgtaccgccgcaggccggcacagcgctgaacgaatttcttttgttttttcacgccagtgcagcggtacggagtttgatttatgaaacagtactgacggctgccgtaagcggcgacgatattacttttaaggagctgctggagctggcgctgtttgctttgtgttatgctcgctttcaggaggagactaggacgtataaacggaaagtaaaagagttgctgccatattttggcgccggtttgttggacgttttagcagcgttaaaaatagactattcgcggcaatcggctgtcagctgtttttatgaggagtatttcttccagttgaagtatgaattttgggacagggaagtaagtccggagagacacaaacagtggcaggcagtgaaactgctggcattaggtatacaaaagaaaaatacctgaagcatttattcttcaggtatttttcttttactattattttttgaataattcaggaacccatttggctggatcgacttctttaaatttgctgcgctggaagtgctctttaagcccgaaaggtacggtgcagtcaaaaatagttttgcaggatatacctacatcgcggatcgaaggtgaaaattcgggggattgggaaggatcgagcggatggcagcgaacgcctgggatagtgataacgtcgacatcgccctggaaacgggtattcaaagcccacagtacgtcgtcggtatcaaacagatcaacatcgtcgtcgaccaggataacgtgtttcagttccgagaaagcagagaaggctagcagagcagcctgtctttgacggccttcatcaggcggagcttttttgacgaattggataacggccatatatttgccgccgccggagcagtgggcatatacgtttttgacattgcctggcagtgctttttccgtcatgccgaggatagatgcttcagtcggtatacctgccatattgacgtgttcttcggaaggaccgatgcaggattgcatgatcgggtcgcggcggtgggtaactgctttgactttgatcagcgggattgctggtttcatagcgccggtatagcccggaaattccggcattgctttaccggtattgctgttttggtcttcgcggacgcggacatcaggcagcagttcgccttcgataacatattctgcacgggcgatagccttttcgttgataattttgcactgtaccatttgcacgccttcgccccgtatactgccggctatgctcaattcattgaagccgagtggagttgtaggtggttcgaagcaggcggcgatctcgatggccgggtcaacgccgatactgatggagatcggcatcggtttaccggctttttcgtatttctgacggaatacgtctaagtgacggcctggaacgaaatacatggatatttcgtctttgccctgcaggcagaggcggtggatagtaatatcggtatcgccggtttcaggatcggtgccgtagcaaagccccatggttacatatgggccggcgtcttcttcagtattggtaggggctgggatcagcttgcggatatcaaagccctcttctgttgccagatgcactacttcctgacagggtgcctggtcagcacttacaactaccggagcgatcggggtggatacggagtcttttaaaagaaagcccagcttttcgggttcacatcccagcaggtgcccggcacgggcacggcttgaaagtacgccgatagcgactttagcgccgggatggcctttaacattattgaagatcatggcaggtcctaagcgagtcgggcgtttaacggtgcctttggcaccaacatagcggtaaataccggagatctcggcacgtggatcggcctcgacgttggtttccaccaactgtccggggatggtacgcagatagtcgagtgcggaacgtaaatcattgattttagtagtcataataaagcctccttaaatatactgtactgtgaatgggaagctgctgcctgcaagaaagtagaatcatttttgcggagactgttttttgcaatatctaacagttttcagctgaccggtttcagagctgcaccaactgacaccggtgttcaagcagcatttcctcttaggaacatcataatacgagtgggagtttgaaggctattctaaatagcaaagctgttttgacatattggaaagatataaccaatagtttgcattaataaacttttaattctataaaggcaagacgttatgctctattggaatacgaaaaagcctgcttttaccgtataatcgtagtagataagcagcttcaggctgggcagagtgaaagcaggtgagagaaatgaattttaatcagttgagatattttgtcgctattgtcaagcatggcagtttttggtcggcagcactggaagaatacatttctcagtcttcgctgtccaagcagatcaaagctttggaaaccgagcttggggtagtgttgtttaacaggactggtaataagattactctgacggaagcaggccagtgtttttatgattatgcgctgcaactgctggagacaaaaaacgaaatgcaccaggagctgatggcttttgaagatacgccgatcgaagaagtgaaattcgcttcgattccaatcgtcagttcctataagatatcaacgctgctttctgagtttcagaaagtcaataaaaatcgcaggcaggtcgttaattataatattctggaagaagaacagaaagacgtactgatgcttttaaaaaacgataaggtggattttgcttttgtgcgcgacggttttgaccagctgcccgaatatgagcatcggctgtttatgacagacgagatcggcctgatttgttcgcaggaaagtgagctggcacaactgcaggaatttgatttttcgatgctgcgggatgaaaaaatcattctgatttctcctaaatcggaaatttaccggattttaatggaaaagctgcgtaaagtgaacaaggaatgtaatgtggcggcaacgatgacacggcataggaatgtgttttcgatggtggccaataatgttggtattactttttttacaaaacggatgctggaggaaggacacagcattgaagggctgaaatatgtccctctggcgatgccgatctacagtaatgtttacatcgttaaacgtaaggaaaaaactttgaatgcgacgacagaaaaattttggaagttcctttgcggtaaatatcaggaatatcagcaataaaaaaccactgctcagcagtggttttttatttattgcatttgaaaatatttttgccaatagatccaaaaatccttggtaattttattgaggcggcgttttttgagttttatcagcgccacatcgcttgtgagttcttcaactagaggaacggtacagagatgagggaaaagtgtcaggtcaacgagactgagcggcagtagcgaaatatttggcgccgtctgcaggatctccataaggatcttgtgccttgttgtcagacattttgtttttttctcgatgccgtggcgttcaaatgctttcataacgatcgtataaatgaccgatgaggtatctaaaagtgaaagtgggtattttatcaggtcattcagggaaacagcttcttttgtacttaaaggatgattttgattgcagaccagaacaaaaatatctttcttatatggaatacagtcaaagacatctacttcatcaagataatcagtacgtatcagcgcaatgtcgatggctccgtcaaacagctctttcataacttcctgctggttggtctcgtgcatatcgataacgacgttaacatcgggtttatagttggttgtaaattgggctatctgagcgctgataccataggaggatactacaggtattgacccaaaacgaatagtattggacttcttggtagcaaattcatctaaataaagcagcatatcgttgtgttgtttgatggtcatttcagcatatttggcaaattccgcacctatttcagtcagatagaccttggaatgttcgcgtttgaagagatcgacacccagttctgtttccagggcttttatctgtttggacattgacgattgggagatatacatatcatcggcagcatttgaaaagctacctgttttgacaatggccagaaagtatttcaattgattaagattcataaattcaatccgcccttctgtgcaaattaaaacacgatagcaaatagtaaaaaaatgagatttgttttaaaatctttaccttcttcatttaaattatattcgattttgctatatacacatattcgagaatggaatacaagctttcacctttggaaattcctaacaagaatgacgtgtttatttaactgaattgccttttagacgggctggttctatgatgaaaagcaagaaagagaattgctggagacgaaagggaaggaggggaaaaagatttttaggagctgtcaaaaagctcttgctcattagcataaggatactccataacttaataaattacaataattaaatttgctgcacataaatttaattattaaaatagatattttattggttgtggatgttcaaaagttgtaagagataggaggttttatttgtgggaatgaataaagcgagaatagggtttattttaggcattatcgtagcactgttgatcggcacggccgatatcccaggacttgcaagaaatggtcagatatgtatggcgctttcttttatgaccgtaattttctggggctttcaaatcactcagccgggttatacttccggtctttatctattactcctcgcagtttttggggttgaaaaacctgctctcattttttcgacctggactggtccaatgatgtttttgattgtaggcgcttatttgattgccggtgcagttaaagaatctggacttggcgaacgtatcgcttataaatttatcatttcttatgtaacttcatttaagagtattatcgtggcgatttttattctgacttttatcctcagtcttttgattccgcatccctggccgcgtgctttcctgattatgtcagttatggcggtcgttattaaaagtgcgaatattcctcgtgtggatgcagttaaaataggctttactgtttttgccgcttctgttccggtttctctgatctttttgactggcgatgctactatcagtccgttggcagtacaatcatccggtgtttctctaggttggcttggctggtttaaattgatgggaccacccagtattatcgtaagtattattacctgctttatgattttgttcctatttaagccaactcaggaagtacaggtcaacaaagaggaaatgcgtgctaaattagcagctatgggtccaatgagtgggaaagagcttcggactgccttttgggtaactttagcgatcattctttggatgactgatactctgcatggcgtcgatatcggttgggtaaccttgtttatcgcaatggcaatgagcctgcctttggttggcgaaattctgacgccggcaagctggagcggtgttcctctgcatgtactgatttttttgactgctgctgttgctatcggacgtgttggtggcgctaccggtatgaatgcatggatagcccagacagtattgcctggtacagttccgtctgatccatatatcctggcagcgtttatcgcaactatttcaattattatacatatgcttttgggcagcgttatcgcagttatgggtatcattatcccagctatgatcacctttaccagccagatgggtattacgccacttgttccggcgctgctcgcttattcggcagttgcttctcactatgtgctgcctttccagcatttgaacatgctggtcggtttgggtgaagataacggtatgtattcacagaaggaaacgatccgtttgggtattccgttcattatcgttatctatgttatgactgtactgattgaagttccgtactggtcgatgttaggcttgtttgataaataatctgctgaaggagggctggagatgcgtctgatcgttggtatttccggagccagcggggtcattttgggctatgagatgttgaaagctttaaaattgctcccagattgtgaagttcacttagttgtaactgaaggtgcagttaaaaattttgagtgcgaaacggatcttaccgtacaggatgtatgcactctggccgatgttgtgcacagcaataaaaatatggctgccagtatttccagcggctcgtttaaaactgatggaatgatcgtaataccctgcagtatgaaaacagtcgccgggatagcagccggctatacagataatctgctgctgcgttccgctgacgtttgtctaaaggagggcaggaaggtagttatcttaccgcgcgaaatgcctttgagcaggctgcatctgcgtaatatcaaggaagctgctgattacggctgcgtcgttgtgccgccgatgctgactttttacaatgggtcaaattcggtggaaaagcaaatgcagcatatcatcggtaaggtcctgatgcagtttggtattgattataagcattttgtggcctggaaaggggaggactaaaatgcaggcaaagtctttttccttgggagcgcaggaatatttgctggaagctgtggcagtacgctgtggtgatgatctgacggtcgttatcggcggcggtgaaaagcagcatatcggtgctgtcgccgtaggcgtaccgcgccccagcttaaaagataaaaatatagtttcttcttcggcatcggtactgtgcctgacagggcataaggaagacctgctggcacgcaaagccgccttagaactggccaggatgcttggacatactgttacagtgaccgtaggcctgcatatcgatgatgcgtcggctgaggcgatagcgatgctggaagctaattttcaagagctgttacggcagatttgcctttgggctgctgcctgacaataagacgagtttacactcattcctccatctttggaagcgggcgggaagagcaagtccgcctgcttccaaaaaaatagttggtgccagaaggcatactgtttgttcacaggaagttcgcttttaagaaattgacgctttgaatattttgtgctatatttagaaagtaattaaatacggtagcctttggggcagggtgtgattccctaccggcggttatagtccgcgagcttctttgtgagcatgatccggtgtgattccggtaccgacagtatagtctggatgagaaaaggcggctatgagtttgtttactgagccatagacaaaaccccaaaaggttttgcctgtggtttttctaatttcagggcatatcgtaagcttacttgaagaaggtgacttgatggacgatgaattatatatgcggcaggcgctggctttagcctgtctggctgaaggtgataccagccccaatcctatggtaggtgcagttatcgtcagtgctgatggagaagttgtaggcgaaggctatcatcataaggcagggcagcctcatgccgagatcaatgcgttgaaggaagcaaaaaagctggcccgtggcggaacgatatatgtaacactggagccctgttcgcattttggacgtaccggaccctgttgcgaggcgattattgctgccggactgaaacgtgtggttgcggcggtcgaagacccgaaccccaaggttgccggcaacggttttaagcgtttacgtgatgcggggatcgaggttactgtgggcgtgtgcgcagaagaggcacgtctgcttaacgagaagtttttccactggatcgtaaccggcagaccctttgtttcgatgaaatatgcaatgactttagacggtaagatagctacaaggaccggcgattcgaaatggatcaccggcgaggacgccagagcttatgggcactatttgcgcaaggctcacgattgtatcctggtcggtaagaatacggtgctggcagatgatccggagcttactaccaggttggtagaggggcgaaacccgctgcggatagtgttggacagtaactgtgaaatacccatgactgcgaagatttttgacggcgaggctgaaacattgctggtcacaggcacttgtttaccgggcgccaagcaggccaaagcagaagcgctgcaggcgctgccgaaggtagaagtgcttcagctgcctgcggtcaatggcaagctgcctgtagcgttgctgctgcaggagctggctgggcgtaatctgaccagtattttggttgaaggaggcagtacagtgcacggtgactttttagaagccggcttggtggatcgtatttatgcgtttatcgcaccgaaactgatcggcggcaaagaggcgttgactccggtcggcggcaaaggctttgcgctgatggaggattgttatgttttgaaggagacagaaacactgcctttaggagcagatattttgctgactggcagagtggaaaggaataaatgctgatatgtttactggattagttgcagagcttggcactgtgcgcgggttgaagagagtgcagaacagttatcatctgactgtagccgctagaaaagtgctggataatttaaaaataggcgacagcgttgcagtgaacggcgtttgcctgacagtagttgttttgggcagcggtgagtttacggctgacgtgatgccggaaaccatgcgtttgagcaatctgcgtgatctgcgcagcggcgaccgggtcaatctggaaaggacgctgcggttgatggatggcctggacggacatatcgtcagcggtcatgtggaggggatcggtgtgatcgcgaaatgccggcaggacggcatagctaatgtggtaacggtaaaaacgccgccggagttgatgcgttacattctgcataagggttctattgctatcgatggtatcagtctgacggtaacgggtgtcaccgaggatactttttcagtatcgctgatcccgcatacctcgaaggaaactactttaggctttaagaccgttggcgacgaggtcaatctggagacagacattatcggtaaatatgttgaacagatgctgaagtttggcaataaggcagagaaaaaggatgaaaccagcgttttgagtaaagctactttattcgaaaacggttttatgtaaataaggaggctatgaaaatggaagagttcaaatttaatacagttgaagaagcgatagcagcgatcaaagccggtaaaatggttttggtaactgatgacgaggatagggaaaacgaaggtgatctgattatggctgccgagctgtgtacgcctgaggcagtaaactttatggcaaaatacgcacgcggtctgatctgtatgccggcagctccggagatcatggataagttgcaatttggcgcgatggtagctaaaaatactgataatcacgaaactgcgttctccgtatctatcgatcacgtcgatactactacgggtatttcggcgcacgaacgcgcatatacgatgaaaaaatgtgctgatgataacgcgcagcctgatgatttccgtcgtccgggacatgtttttccgctgcgtgcacgtgaaggcggcgtactgcgccgcacagggcacaccgaggcgactgtagatctgtgtaagctggctggattgaagccagtcggtatctgctgcgagatcatgagcgaagacggcaatatggctcgtactcctgaattgaaagaatttgctaaagaacacgggttggtttttattaccgttgctgctttggtcgcttaccgcaaggcgcacgaaaaaatggtgcatcgtgcggctgaagccgcgctgccgagtaaatacggcaatttccgcgctgtagcttacgaaaatgatctggatgatctttgccatgttgccatcgttaaaggtgaggtgtccggtaaaaaagatgtcttggtacgcgtacattcagaatgtctgaccggcgacgctttcggttccctgcgctgtgattgcggcgatcagctggcaacagcgctgcgaatgatagaaaaagaagggtgcggtgtagtactgtatatgcgtcaggaaggacgtggtatcggtctggcgaataaaatcagggcttatgcgctgcaggatcagggttatgataccgttgaagccaatgttaagctgggctttgctccggatctgcgtgattatggtatcggagctcagatcctttccgacatgggcttgaccagcattcgtctgatcactaataatcctgccaaacgtgtgggtctttccggctatggcatcaccgtaagcgaaagagtgcctatcgttatcgacgctaacccttttaacgagttctatctggaagtcaaagaggaaaaaatggggcatgagctgcacgaaggtcatgagcataaacactgcaactgctgcagctgatataaaaatcaaattaacttaaaatggaggcaatgaatatgaaaactttagaaggtcaattaacagcacaaggtatgaaagtggctattgttgtagctcgttttaatgaatttatcaccagcaagcttttgagcggcgctatcgactgcctggaacgtcatgggatggacaatgaagatattactgcagtttgggtcccaggagcattcgagatccctttggcagcgcagaagcttgcagtgagtggcaaatatgatgctgttatctgtttgggtgcggttatccgcggttctactcctcattttgactatgtttgtgccgaagcttctaaaggcgtggcgcatgttggtctggaaacaggtgttccggtagctttcggcgttctgactaccgaaaatattgagcaggctgttgaacgtgccggtactaaagctggcaacaaaggtgttgatgctgcaatgactgctatcgaaatggtcaatctgttgaaaaacatctgatttttaaacgtacgttaatcgtagattctaagaggtatatataatgaaagatattctgactaaaggcacggctgaaggtgtgcgaatttatgcgctgtgtactactaatctggtacaggaggctgctaccaggcatcatacttcccatttggctagtgccgctttgggcagggcgatgaacggagccctgcttttagcagctactatgaaagataatgaacgcattgccctgcgtttaaagggtgacgggccgatcggcgaagtcgttgccgatgcagaaggcacgcatgtgcgtggttatgtaggtgacccggatgtatttttgccgctgaaaaacggcaagctggatgttggcggcgctattggagccggcaatattattgtgacccgttatctgcagaacgctgaaccttttaccggctatgccgaactggttgacggcgagatcgccagtgaccttactaattatctatacacgtctgaacagacaccgtcttctgtggcgttaggcgtattggtcaataaagaggggcaggtcatagcttcaggcgggtactttattcaggcaatgccaggctgcgcagaggaaacgctggcgcagctggaggaaaacatcagtttaactccttatgttacgcagctgctggagctgggttatactccagaaaagatgatcgaaactattgcccgcggtctagatgtaacgattcaggagagcatagagctgagttataaatgccgctgcagtagagaaaagatattgggagcattggcgactttagggcaggaagatatctcggccatgagtcaggatgaggaaacagaggtgcattgccagttctgcaacgaaacctataaattcagcggggaagaaattgcccggttgctgaaaaaataaataaatcttgacacctcgaacagttgtttgtatactatttgtagatagtaattgacagcaacgaaacaggaggcttgatcaaatgagtacggaaaaactgaacgctgaaaaaacaaaagcgttggaaaatgcaatgcgccaaatcgaaaaagatttcggtaaaggttcgatcatgaaattgggcgaagccagcgctaaaatgaacatagaggttattcctacaggcgctttgtctttagatatagctttgggagtaggcggcattccacgcggcagggtcatcgagatctatggcccggaatcttccggtaaaactacagttgccctgcatatgatcgctgaaacacagaaaatcggtggttatgcggcgtttatcgacgctgagcatgctttggaccctgaatacgcacgtaagctgggcgtcgatgtcgacaatctgctgatttcgcagcctgataacggcgaacaggcattggagatcgctgatgctttagtacgcagcggcgctatcgatatcatcgttatcgactccgtagcggctttggtaccgcgtgcagagatcgaaggcgagatgggtgattctcacgttggcctgcaggccaggttgatgagtcaggctctgcgtaagctgactggtatcatttccaagtctaaatgtgctactgttttcatcaatcagatccgcgaaaaagtcggagttatgttcggaaatccagaaacaactaccggcggcagagcgttgaaattttattccactgtccgcatggatgtacggcggattgaaactctgaaaaacggcaacgatatgataggcaaccgtacccgcgtgaaaatcgttaaaaataaaatcgctccgcctttcaaacaggcagaatttgatattatgtacggtgaaggcatttcccatgaaggctgcatcgtagatctgggtgcagagtttgacatcatcaataaaagcggtgcctggtattcctacggcgaggttcgtttgggacagggcaaagaaaaggtcaaagattttctcaaagaaaatccggaaatggctgctgagatcgaagccaagatccgcgagcatactattgccaaattagtaagcgcagaaagcggtgtaagcgatgctgaaccggtcgtccaagaacttaacgactgagcaggaagcgtatgattatgctttagatattctgagttatcgtgattacagccgtaaggatatggaactgaagctgaaacgtaaaggcgcagatactggcatcatcaagagtactatccaaaaactgctggaatatggtttcttagatgaaaaacgttatggacagagggtttttgaagcctggctttctaaaaaatactatggcagatgtcacctgcggctggagctgcagaaaaaaaatgtggcagaacgttatataaacgatattttagcgcagctttctgaagctgaggaacaggaacgggcggagaaggctctgcagtcttgtttaaaacgtaatcctaaaaaatatgatcctgctacgcaggaaggacgggccgctattggcagatacctgtatgcgcgtggctttgcaagtaaatatattcaaaaaagcattaataatatacatggttctgtgatattaatggatgactgctaacttgacttttatataaaatccatttaaaattatagtatccaatcgtgttaataattaatgaatgaatgttatccacgaggcgacaatagtttgttgcctcattttttttaaaaattaataaggaggtgaaaatcattttagaacttatcggtattactatcggtgctggtgccgttggtggtgcgatcggttatttagtacgtaaaaatgttgctgaaaacaaaattgctactgctgaagaaaccgctattcgtatcattcaggaggcggaacagaccggtgaagctaaacgcaaagaagcgttagtagaagctaaagaagaaatccaccgcatgcgcagtgagatggaacgagaaaataaagagcgtcgcagtgatatccaacgtcaggaaagacgtcttttgcaaaaagaagaaaatcttgaccgtaagatagagtcttttgagaaaaaagaggaacacttagctgttagagagactttcctcagtgacagtcaggctaaagtcgatgcattatatcaaaaacaattgggtgaactggaacgtttgtccggtttatctaccgaagatgctaaaaaagaacttcttcaatctgttgaagaagaagtgaaacacgaaaccgcaatgctcattaaagatttggagcagcaggcgaaagaggaagcagacaagaaggccagagagatcatttctctggcgattcagcgttgtgcggccgaccacgtagcagaaactactgtttctgtagtagccctgcctaatgatgaaatgaaaggccgtatcattggccgtgagggcagaaatatccggacactggaaactttgaccggtattgacctgatcattgacgatacgccggaggcggtaattatttccggttttgaccccgtacgccgtgaggttgcccgcgttgctctggaaaaactgatcaacgacggtcgtatccatccgtcccgtatcgaggaaatggttgaaaaagcacaaaaagaggtcgaacaaaagatcaaagaagcaggcgagcaggctacttttgcggtaggtgtgcatggtttgcatcctgaactgataaaattactgggccgcttgaaatatcgtaccagctatggtcaaaatgtcctgaatcattctgttgaggttgctcatctagcaggcttgatggcctcagaattgggcgttgacgtagttttagccaaacgtgctggtttactgcatgatattggtaaagctatcgatcacgagatggaaggttcccacgttgagatcggcatggaaattgctaagaaatatcgtgaatctgaattggtactcaatgctatcatggcccatcatggcgatgtagagcctaagagtgttgaagcagttctggtagctgcagctgatgctgtttctgccgcaagacctggcgcgagacgcgaaacattggaaagctatttgaaacggttaactcgattggaagagatttctgaatcttttgaaggcgttgaaaaatgctttgctgtccaagcaggacgcgaaattcgcataatggtaaaacctgaccagatcgatgatgctacatctattttgttagcgcgcgatattgctaaaaagattgaagccgagatggaatatcccggtcagatcaaagtcgtcatcattcgtgaaacacgcgctgttgactacgcaaaataataaggttgaaaataaatccccaagccgtcaggtttggggattttttacataattgttacgatttattcgtttaaagcactgcgattggcgtttattttatgttataatatgagtattaatttattatctaaaattttctggaggtcagctaatgagaattgatggtgccggcggttgttttgataaccgtatttacgaaataaacaataaaagcgcttggaatctgttattgcttacagtcaatgaaatgggtgtgacggttgattcccgtgatgatgaaaatggcattcttgaatgccataatgataaaaaggttatgcgtttttcggcacaggcgatggacgaagaaactactcaggtttttgctgatgttcatggtaagaggattcaggtttataactggaagccacaggataaagaagtcaatcttttttacgacttatttgaaaacaagctgcgtgaataccgggcctttatcctttgtcccagctgtaaggccaaaatcagttcgcttgtaaaattttgtccggaatgcggtgtaccggtaaaataaaaataaaccaaataccgttaggtatttggtttatttttaataatcataaattagatagcgcgggtaactttaccggaacgcaagcaacgagtgcaaacattaacgcgttttacagattcgttaacaatagcccttacttgttgaatgttcggtttccaagcacgtttagtatgtctattggaatggctgacgttattgccagcgagagtacctttgccgcagacttcgcaaatggatgccatgagtcccacctccttaacgtattacgagcattagttacaaatttaacaaaagtatcataccatagactgtaggtaaaagcaagtaaattttatagattggcagtgattttatgtggtggcgtgagcctgttaccagtttaaaaggtatagggataaaaaaagctttagaatttcagaaattgaatatagaaacggtcggtgatctactcaaccggttcccgagaatggacagttatcttgattattctaaagtgaaacgtatcggagagctgactactgataacgaaaaacagctttttacaggggaagtgtttcgagttgcagataaatattcaggcagagggaaacgctatactgtgatcacagttcaggacgatggcagttacgccgatatttttctgtttgcagcgcagcggtatcaggcccgtaaatacaaatcaggtatgcgtctgattgttattggtaaagtacgccgcggtacaacggcaaaatttgtttccgaagcgtttattcaaattgccgaccgtaatgaaagtatcaatgctttaggaattttacctgtttatagtctgacaggttctttgacacaggtagcggtacgtacagcagtcaaacaggcactggcaaaggcagaacaatatttgccggaaacattgccggcaagtattataacagaaaggcagctgccggatcgttatactgcattgaagaatattcattttcctggcagttttgctaaactggcagaagctaaaaaaagatttatttttgaagaactgtttctactgcaatgcgggctgctctattatcgcgaccgcattaaagaggtgaggcagggcatcaagcacggcgtggacggcaaacttgttacagcggtgaaaaactcactgccgtttgaacttactgaagcgcagcagaaggcctggcaggaaatatcacttgatatgcaggataacaagccgatgcacaggttgctgcagggcgatgtaggatctggcaagactgttgtttcggctctggcgctggctaaaacggttgaaaacggatatcagggctgtattatggtgccgacagaaattttggcacagcagcattttgaaaccctgacagaatatttgggcaaacaggggttaagagtcgagcttttgacaagcagtgtcaaaaaagctaaacgtcgggaaattttagaaaatctggagctgggagagattgatgtactggttggcacgcatgccctgatccaggacgatgttgtttttgccagattagcgctggtggttactgatgaacagcatcgttttggtgtagatcagagggcgaaattatccaataaatcacagtttgccccagatattttagttatgactgctactccgatcccgcgaaccttagctttaactatttatggtgatcttgatacttccatgatgcagggaaaacctgttggacgtaaaccgattgagactttgtgctacaccggtgagaagcgtaattccgtatatggtggactggtgcgtcaggtacaggccggacatcaggcttatgttgtctgcgctctgatcgatgaatctgaaggtgtagaagcgcgctcggcaacagaagtttatacggaactgcaggcaacgtatttaaaaaatattccctgcgctctgctgcacggacgtttgaaaaaccaggaaaaagaagaaattatgagcctctttgccgcaggagaaatcaaagtgctgattacgacgacagttattgaagttggtgtcaatgttcccaatgcaacgctgatgatcatcgaaaatgctgacagattcgggttggcccagatgcatcagctgcgcggcagggtagggcgcggcaaggatcagtcgtactgtgtgctgcttacggataatgacaataaggaaacactggaacgactgcaggtattgcgcgacagtgataacgggttctttctggcagaaaaagatctggagctgcgcggtgccgggcaattattcggtttgcgtcagcacggcttgcctgatttatatattgctgatatactgcaagatatagacgttttgatagaagcacgtgaattagcgaaaaaagcgttcaagaacccgcagatgctgcgagagatcgaagatgctcttagcagtcaatttgacgaacggttccagcgtattttttattcgtaatattaaaggagttttaatggagaataaaactaaatggtatcgtgaccctgatgtcataactaaaatcattgcggtggcttttttggtgctgctgggatgctgtatacatttttttgctcaggatttttttgataaaactcttaaactggctatcagcggtaacgtcaatgctttggctgaatatctgcggtcttttgggccctgggcaattgtaatcagttttttactggatgtgttcatcaatgcggccagtatttttccttcaatttttctttcgacggctaatggtttgattttcggtctgccactgggaatactgatttcctggctggcggaaactgtcggtgttgtgatcagctttctgctgatgcgttatttattcagaggtactgctgaaaagatcattgctacaagtaacagcctgaaaaatatcgacgaagccagcggtaagaacggtttgcagtggatggcatttgccagagcgctgccttattttccttcgggaattttaactgccatcggggctttgagcaaaatcagcgtcggagattatattattgccaacctgatcggtaaatttccttcgacggcattagaagttgttattgggcatgatattgtaaattttaagcaaaacagtatgcgtttgacagtgttggttattgttacgggcatcgtgttttttgcttataaacgttataaaaaatagcagtgtgctttatttactcatatctaatgcggcagtggcgatgagttttatacttttgaataaatttatatggacagataaaataactgcgttacggcagttattttttatctgcaattaggataataattttcttttagtatctattgcaagaataattgagagcagttataataaaggcagtgataaaagaggagggtcttttatatgagtaaacatcaatttacagatatccgtgttgctattgaaccggataatcctgctgtacaaaggttggaattcaaatgcataaaatgcggttcctgtaaagcagtctgcaccgattatatcggtgtctgcggtacctacgatctcaaggcgaccggagatgtgcctatctgtataaactgcgggcagtgcgctaatgtgtgcccggcagacagtattactgaaaaggttgaggcttatgaagtagcagcagcaatgcgcgatcctgaaaagatcgttattttcagcacttctccttctgtgcgcattgctttaggtgaagaatttgctatggcagacggtagctttgttgaaggaaaaatggtagcgctgctgaaaaaactgggggcagattatgtgttggatactaattttgctgctgaccttactatcatggaagaagccagtgagttggtggaacgtatcacaaaaggcgaaaaaccgctgccacagtttaccagttgctgtccggcctgggtcaaatttgctgaaacctattatccggaaatgcttccgcatatttccagtgctaaaagcccgataggaatgcaggggccaacaatcaaaacttattttgcaaaaaaaatgggacttgatccccgaaaaatagttaatgtggctgttactccctgtacagctaaaaaatatgaaatccgccgtgatgaaatgaatgctgctgcaaggcatttaggtattaacggtatgcgtgatatggattatgttattactacgcgtgaactggctatgctggccaaagatgaaaatattgatttcacagcattggaagacaaggcatatgatgactttatgggactggggtcaggtgccggcgtgattttcggtaataccggtggcgttatggaagctgcagtacgcagtgcttacacttttgtaacgaaaaaaactgctccggcagcactatatgatttgaagcccgtacgcggtttggaaggtatcaaagaagcttccgtagacattgacggcttgaaagtaaaggttgctatcgtctatggtactgctaatgtccgtaaattgatcgaaaaaatcaaaagcggcgaaaaaagctatcattttgtcgaagtaatgacttgtccgggcggatgcatcggtgggggcggtcagcctaaagacagggaatataaaggtgatgcgctgcgtgccaagcgtatcgaaggcctttataaacgtgacgattcgatgcagctgcggttaagccacgaaaatcctgaaatcattaaattatacgaagaattttacggtgaacccttaagtgagttggcagaacagatgctgcatacggtgtattttgacagaagtgctgatttgggaggagtttatatcgctccgacagaaattcagtctgtagcaggtttaaaacaatttcgctgcaaggtttgcggctatatttatgaaggtgcaatcctgcccgaagattatacctgtcctacctgcggtgtgggtgcagaaatgtttgaagaagtgcgctaaagtttaaataaaaagctgaaaccaaaaggtttcagctttttattatttatccagcaatttataaatctgtggaaagggttcaacggtgcgttttaaaataccgttgatataggcgattgtgataccgtaattggtgaaaggtatgttttggtccgcagcacatttgatgcggtactgcatttcacgttcgttcagcatacaggcgccgcagtggatgatcattttatacggcgataagtttagggggaattccgtgccgctggtaaaaataaattctggatttttaccggtatattctttgatccagcgtggcagcttgacggtgccgatatcatcgcattggcggtgatgtgtgcagccttcgcctatgaggattttatctccgtcttcaaggctgtcgagtgctgtaacgccttgaacggcagtctgcagattacctttatagcgtgcaaacaggatcgaaaaagaggtcagaagaatatctgccggcgtttcagcagcaacttttttaaagacctgactgtcggtgataaccagtttgggtcgtttacctaaattttgcagtgtgttggtcagttcgttttctttaactacaatagcggcagcgtctgcttccagaatatcgcggatcgtttgctgctgcggcaggatcagccttcctttaggggcggcagaatcgatgggcactactaagacaacgaagtccgaaggcgacagcagatcagcaactatctgtgctttattttcatctgcaggtacggtttgggcgattgcttctttaagctcaaaaatattgagcttctgttcagcactgacaaataaaagtttcccgtttgacagcagagcttgataagcagtttttttatcttcatttatggtttcacatttgttgataacgatgagcagggggattttttttgtattgatccgttttatcaaacgcagatcttcagcagaagggccaactgcagcgtcaataattacaagcgcgatatcggttttgttgagtacctgatatgctttttgaatacgcaggctgcccaaaacgccttcatcgtcgatacccggagtatcaatgatcattactggtcccagcggcagcagttccatagctttataaacaggatctgtggttgtacctttggcttcagaaacgattgctaaattttgcccggtgatcgcgttgataaggcttgatttgccggcgttacgtttaccgaagataccgatgtgaacgcgttcagaagatggggtagcatttaaactcataaaatcacttccttttatataaattatatactaaaatagtgcgattatagtacagataagttttctgaaaaatatacaatatcacacttgtatacaaaagtgttaaatttatgtaacagttattgacgatgttgttagttttaaagtatattatatatgcgtgtggaataattcacaaccaaaccaaaataaaggaggcgtatgaatgagtactaataatgattcaacgcagcatgttcaaatcgcagtagccgaccctacacccttgggactatttggtctggccgtcgtaacaatggtggcttctgcacaaaaattaggtatcgttgaaggagtatcctgggttttgccgtgggctcttttctgcggatccttcgcccagctgttggctggttattttgactattgccatcgcaatatttttggcgcaacaattttcagtgctttcggctttttctggtctgcagtaggtatgagctggatgattaaagcaggaacctttggtcctggtcttgctgccggtgtggatcctaaagctattggttttgcatttttggcctattttatatttgcctgcattggtaccattgctgcgtcctctgcaagtctgttcttattcgtagatatggttttcattgatatcttacttttaggtttagctttagacggacttggtatcggcggtcatttcccgcacaccatggctgcttatgctgaaatggcagtagcgcttatttccttatatggcgccggagccgggttccttaataatttctatggtcgtcagttctggcctgtaggagctccgcttggtatctggaaaaaataatcttgtttgataaaaaagcactgtgagaatctcacagtgcttttacttttttcaaaattacttaacaagttccagccgtgggttgggaagatgtactcgtcctgctttagcgcattctttgccgtctaccataacgatatccgctgtaaagttgatattaccgtcaaaaaggctggatcctactgcataagtatctacaggaacctttaatgcttcaaactctttgatacgttcggcgtcaaatccgccggaaacgataatttttacataatcgaaaccttctgcatcaagtgctgtgcgtacattatgtactagttccttgcagacgcctgtcggtttgaacatacccatttggctgagcaggcttttatctaccatagtgccggaggtatccaagcggactcctgctaatttgcggccaagtttgcgtgctacctgtaaagtcgtaccaacacagtcattatcaaagtcgaccagggcaatacgcgcgatatcaggcgctacatatttatcaaaggcgctggttgctgccagcgtgtcgccgttgtatgctgcgatcagggcgtggggaatagttcccagacctttgccattgctggctaaggcgttggcatcagtagagaaacctttgataccgccaatcatagcagcatagccgtcagattcctgggtttgataggtatcataccgggcagggaaaaagaggaccggtttgccgtttgctgctttgacaacacggcgtacattagtagctatacggctttgccgcgccagaaaaccaagatagatagtttccagatgggcaaagtctgccagatcaccttcgatcgtcattagtgtttcccagggggcaacctcatctccgtcatgtaaagcatagatcgtaatattttcaggattatgtgcgcaggttttgatcagggcgatagtttcatcgatgccgcaaacaactaccggttcacgggtaaaaagctgcatcattactctaggatggtgattatcgccattcagtatctcctcggtacgcagaaaataagcgtcggtgtaataaccggctttgattttttctaccggaaaatgaaaatgttcaactggtaaacgatttttcatgataacctccatcattatatagaataaattagctcttgatattgtgctaattacattttatgatacaataatagcgctacaggttcaagttttttgataaatttttcttaaatggagtttataaatggcatcttgtgaaaaaaaatatacaatattattattgtcggctccgataggttcagggcataagctggccgctcaggctctggaacagtcttttgcactggcagacaatgtgcaggtagtgcacggaagtatttttgacttttttccgggcagtatcggcaatgcttttttacgtttttatttatgggtactctcatattgtccctggctgtatgagctggcttataaatggggaaaccgtcagagcgggtcgctatggctgcgtaactttattaatggtaccttagcaagtttggcacaggattttatcgtcaggaccaaccccgatgctgtaattgccacacatgctacaccggcaggtatcatggctatctataagaaaaaattcaagccggatttgctgttgggagcggtggttactgattatactgtacataaatggtggctttgcgaaggcgttgatgtgtattttgcagcatcagaaaatctgcgtgcacagtttgatgggactgatgctgaggttttaccgacgggaataccggttcggcggcaattttaccaagcatatgatcgtcaggagctgcgtcgtaaatttaattggtctgagcaggatatagtatgtctgttgatgggcggcggcgaaggcttgttaccgatggagagcatagttaaagctttccacggttatttgccacagcgtttgaaaataattgcggtcgcaggacataatgaaattttgcagcaccgcctggaaatttttaaagaaataccactgactgtttatggatttacggatgatgtaccggagttattgctggctgctgatattgtcgtaactaaagccggtggtttaacagcggctgaaacattgattgcgggctgcaattatattatttataagccgctgcctggtcaggaaaccggtaatgctgtttatttagagcagtattgcggtgcacaggtagccggttcgtctcaggaagtaaaaacgatggtctgccgatatgcggatgtcgactcccaagtacgcttgcttcagaggcagcagcgcagcttgaaatatggtaaacctggagctgcagaagaaataagcaattatattttaaaaaaacttgaaaaataagtaaaagcttgaccgttgactaaatcaactctataatgaaatggatttgggaaaaataatattttgcgacacccggttttcgtgtggatgcctgcaatttatcggaggcattgctgtggagcgttattattggggtgctttaagcgctgctgtcggattgggcaacagtaagcttgaagctttagttgcggtgtttggcagtgcgcgtagtgcgtatcttgctgatagacaagagcttttggctgcccgcgtttataaagaggcggccattgataagttcctaaaatttagaaatcttgcgttacctgaacagctgcagaatttttgcgagcggcagcaggtgcggctgatgataagcagtgatgcggactatccggtctcattaaggcatatcgcattaccgccgaaggttttatatatcaagggtaatttgcccaggcttgattgcagtataggtatcgttggttcacgtcgagcttctacttatgggttaaaggcggcgggtgactttgctgctgatcttgcttcagcggggctggttattgtaagcggtggagctaagggtattgatagtgctgctcacaaaggtgctttacaggctgggggaagtacgattgccgtacttggctgcggtatagatgttgtttatccgcgtgaaaatacggcgcttttcgagcagatatgttcaaatggggcgctggtaacagaatttgcacctggaacagaacctcttgctgctaacttcccgtcgcgcaacagaatcatcaacggaatgacgaaaggtatactggtagttgaggcggctaaaaagagcggtgctatgataacggctgaatttgccgcagatgaagggcatgaggtatattgtattccaggaagtatttatctgcctaacagtattggctgccatagtctgataaaatctggagcacagcttgtagataggccggaagatattttgaatgatctggaattgaacttcggcagtaagcagaaaatagagaatttatcgttgtttgccagtgaaggagcagaggccgtttcagaactggctaaacaattgatggatataatgacacaggaaccggttacgttagaggaactggtagaattaagcggtcgctctctggcagagatcagcggggaactgctggatctgcaaatgcaaggtaaacttggcctggcagatgggcgcaggtattaccgaatttaggaggacttattattatgacgaaaaatttagtaatcgtggaatcacctactaagtcaaaaactattgaaaaatttttagggcgcaattatactgtccgcgcttcaatgggacatttgcgcgatttgccaaaaagtttgtttggcgttgatatcgaacatgattttgagcctaaatatattaatattcgcggtaaaggcgaattgattaaagaattgaaaactttggctaaaaaagctgataaaatttatctggcaactgaccctgatcgtgaaggcgaagctattggctggcatttagcgcatatccttggtgttgacccggaagcaaactgtcggattgagtttcatgaaatcacttctggtgccataaaagatgctttgaagaatccgcgcccgattgatttggataaagttgatgctcaacaggcacgtcgtattattgatcgtatcgtaggctatcagcttagtcctttgttatggcgtaaaataagaaaaggcttgagtgccggacgtgtacaatcggtagcagtaaaaatcattgctgaccgtgaaaaagaaatcgctgatttcattcctaaagaatattggactttgaatgctaaactgcgtgaaaaagctaaagctcctatttttgaagcagaggttatcaaacatctgggcaaaaaactggaaatacatactgctgaggaagcggctattgtagaaaaagctttggctaaagctgcttatatcattgaagaagcaacaaaaaaagagcgtaaacgtaatccgctgcctccgtttactaccagcagcctgcagcaggaggctgttaaacgtctgaattttactaccaaaaagacgatgatggtagctcaacagctgtacgaaggtgttgctgtgggcaaagaaggttctgtcggtttgattacttatatgagaaccgactcagtacgtattgctgatgttgctgctgctgatatccgcagttatattgaaagtgagtttggcaaagaattcaggccttcacatgcaaacagctattcaagtaaaaaaaatgctcaggacgcacatgaggcgatccgccccacaagtgtacatcgtacaccgctggaaatggcaaaacatctgaataaagatcagcttaagctctattctttgatttggaaccgtgctgttgcaagtcagatggcatcggctgtttttgatgttactactttgctgatcggcgccggcgattaccaattgcgtgcaacgggctctgttttgaagtttgaaggctttttaaagctaagcgataaaaaagacctgctcgaggataaggataaaaccgttccttatctggaggctaaaacgcctgtagaattatataaacttttaccggctgaacagcacttcaccgaaccaccggcgcactttactgaggcgaccctggtaaaagagctggaagacaaaggtattggacggccgagtacttattcgcctactatccagactattctggaccgcggttatattgctaaggaaggcaaaaaactgatgattaccgagctggggctcatgatcgtcgatatgctgactaattatttcaaagatattattgatattcctttttctgctgaattagaaacagagcttgatgagattgctgagcataaagctgataagactaaaatactggaaaaattctatgtgccgttttcaaaattgatggaaaaagccgacaaagaaattgaggcagtagaagctcctgtagaagtcagtgatgtgaaatgcgaaaaatgcggacgtatgatggtaataaagcaggggcgttttggtaagttcctggcatgtcccggttttccggaatgccgcaacacgaagccgattctgcataagatcggtgttaagtgccctgaatgcggcggtgaagttatcgagcgcaagacaaaaacgcgccgtattttttatggctgtgccaattatccggaatgtaaatttacatcatgggacaggccaacagaagaaaaatgtccgaaatgcggtaaagtgatgctggaacgaattgaaaagaacggcaataagaaactgtactgttctaatgaaacctgtgaaaatggcttgcatataaaaaaaggaaaggcaggacgcaaaagtgctaaaagcaaataaaccgattcatgttatcggcgcaggtttagccggctgtgaagcagcatatcaaataattagatatggcattcctgtaattttgcatgaaatgcgtccggtaaagtctgacgaagcgcataaaactgcagactttgcggaacttgtttgcagcaattctctgcgtgccaataatttggaaaatgctgtcggtcttcttaaagaagagatgcgccgccttgattctctgatcatgcagcaggctgataaacatcagattccagccggcggagccttagctgtcgacagggaaggttttgctcagggcattacggaaattattaaaaatcaccctttaattactgtggtttatgaagaagtaacagatttgcagcagttggaaggttatgttgtagttgccagcgggcctttgacgtcagcagtattggctgaaaatatcaaaaagctggtagaagcagattattttcatttttttgatgccgctgcgcctattgtgaccgcagagtccttgaattatgaaaaagtatatcgtgcctcacgttatgataaaggtgatgcagattatttgaattgcccgtttgaaaccaaagaagaatatctggcgttttgggaagctttacgaacagcagagctggctccggtcaaagaatttgaaaaagaagttttttttgaagcctgtatgcctattgaagaaatggctcgccgcggtgaagataccatgcgcttcggtccactaaagcctgttggactggtagatcagagaactggtaaacaggcctacgccgtggtccagctgcgtcaggataatgctgctgcttcgctgtataatctggtcggatttcagactcatttaaaatggcctgagcaaaaacgtgtttttggtatgattccggggctggaaaatgcagaatttgtccggtatggtgtaatgcacaaaaactcttatatcaattcgcctaaattattgaatgataagtttaattttaaagcgatgccgagattttactttgccgggcaaatgacaggtgtagaaggttatgtggaatcggctgcttctggtttgatggctggcattcataccgctcgggcttatttagagcttcccgatattaccttccctaaagaaacagctcacggtgcattggcacattatataagcaatcctgaaatcagggattttcagccgatgaatgttaattttggactgctgccgtctttaggtaaaaagatacgtaataaaaaagagaaaaacgctctgattgcagagcgctcattgaatgctttgcaggatgtactgcaaataatcaagtaagctgtgatgaactggaaagacaaacataacttgttttttaaactgctgcggctgcactttggtctggcactgtattccattggtttgacccttggcatccaggctaatatcggcttggcgccatgggaagcctttggtatcggtgtttcctatgttacaggattgacctatgggacgatcaatgttttgagtgggcttttgattttagtagtgacagttgctatgggtgagcggtttggattaggtacgattcttaatgctgtattgatcggttttggtgttgatgttcttcagtactatcatgctgtacctttaatagaaaattattggctgggaatcatcgtaatgtttttagggcagttttccatcagtctgggcacttatttttatatcagtgccggacttggctctggtccgcgcgattctttgatgatcgggttaaaacgtcggctgccgaaagttccgattggtatgatcagaggccttatagaaggcagtgttttgctggctggctggctgctgggagcgaaggttggtttaggtactataatagctgcgtttggcatcagtactattttgcagttgacttttaattggctgcactttgatgcaaaatcagttcagcacgaaggcatctggcagactttaggcataaaaaattaaaatattaagagtagcggcacattaaattggccgctatttttgtttatattcagatttttacacatttttgtgtattcaataaaaaattcaaaaaatttagtacttggttattgaaatagcttcctggtttgtgatactataagtctacataagaagaagggatttattatggcagagtcaatatcgcaatatcctatggttgataagtttctcaggtatctgcaggttgaaaaaaacacgtcgccgctgactgttaaaaattatgccgctgatataagtttattcagtaattttttagcagaacggctggggaaagattttcaatggcagaagatcggagttttggatattcgtgcctatttagcgctgctcaataaagaaaagtatgcgcgtacgacgattgccaggcggatttcttcgctgcgttctttttataagtttttaatgcgagaaaattatgtggagcaaaatccttttgttaaggtaagaacgccaaagctggaaaaaagattacctgtatttttggaagaactggaaatcaatgagatattaaccttaccggataaagatacgctgggattaagagatcaggcgatattagaattactctatgccacaggttgccgtgtttccgaattggtgggacttacggtgactaatatagatcttggcagccaatatgttttgctgctgggcaaaggcaataaagaacgtatcgtaccgatagggcatacctgctgccaggctgtacggcagtatttgcaagttacacgcggagctttgatggaaaagaataaaacagaggcgcatgacaaggtttttgttaatagcaggggaggtccgctgacggatcgcagtgtccgtaggatcttagataaatatataacccaactggctatgcagaaaaaagtcagtcctcacacgatcaggcatacttttgccacacatcttttagatcatggtgctgatttaagggctgttcaggaattgcttggacatgctaatctgtccacaacgcagatttatactcacattacgactgaacgtattacttctgtatatcagaaaaatcatccgcgtgcttaaaatttgagggaggaatcatcatggaacttttggagaaaacaagaaaaatcaacaaattgctgcaaagaggggaaaaagtagaatataacgctatcgcacgtctgctgcgtgatgttattggcgctaacatttatatcgttgggcgtaagggcggcgttaaaggcagcgctcttcaggatgatttcgaatgtgatatcatgcgcgaacaggttttggatgtcaaaaacttcccgcaaaaatatctggattttattatggacgcgaaagaaacagtttcaaatattgaacataaaaatcaggaatgttcctttgttaaaggtacaaaatgcttttttgatcagaaaaaaactactatcgtgcctatttacggtaacggcgaacgtattggtactttgatcgtagctaaatatgataaacccttcgacgatgaagacctgctgctggcagaatatgctgcgactgttatcggcgttgagattctgcacgagcgcgcagctaaagtagaagaagaagtgcgtaagaaagcaatggttcagattgctttttcaacgctttcttattccgaactggaagctattgtcaatattctcggcgaactgaaaggcatggaaggcttgcttgtagcttctaaaattgctgatcgtgtcgggattacacgttctgtaatcgttaatgctctgcgtaaattcgaaagtgccggtttaatcgaaacgaaatcgcttgggatgaagggaacatatatacggattaaaaatgagttcctgctggaagaactgcgtaaaaataattcttaaataaaaaatgaccggattgctgtaatgttgcagtaaatcggtcatttttagtatcttttaaggttcctaaacaagatattgtaaaaaaaattacagaaactacttgattttgtgtaatcactgtgctagtatagtaaaaatatttcaaagaagaagggagttttataatgcgtacagacaaatttgcaaaagaaggtttaacttttgatgatgtgcttttggttccggcagaatctgatgttttgccgcgtgatgtagatgtttccacttatttgactaaaaacattaaattgaatattcctctgatcagttctggtatggatactgttacagaatcaaaaatggcgattgccattgcccgtgaaggcggtttaggtgttatccacaaaaatttaacgattgaagaacaggcaggagaggttgccaaagtaaagcgcagcgagcatggtattatcgttgatcctttatttctggctcctgataatattcttgcagatgccgtaaaaatgatggagcattatcatatttccggtgttcctatttgtgatcctgatggtaagctgcagggaattattactaatcgtgacctgcgttttgaaactaatcttaataaacagattaaagaatgtatgattggtgaaggtttggtaactgctcctgttggtacgagtcttgaagaagctaaaaaattactgcgcgaacaccgtattgagaaattgccgttggtcgatagcgaaggttatcttaaagggctgatcacaatcagtgatattgaaaaagctaaaatgtatcctaatgcctgcaaagacagtgatgggcgtctgcgtgtagccgctgctgtaggcgttggtgctgatatgatggaacgagcttccgctttagttaatgctaaggtagatgttatagttattgatactgctcatggacattcgcacggagtcctgaattcagtgcgtcaattgcgcgaagctttcccggaattgaatattattgccggaaatgtagcaacaggcgctgcaactgaagcattaatcaaatgtggcgttgatgccgttaaagttggcatcgggccaggatctatttgtacgacccgtgttgtagccggtatcggcgtcccgcagattactgctatcaatgattgcgcattagttgcacgtcaatatggtattcctattattgccgatggcggtatcaaatattccggtgatattgctaaagctatcgccgcaggtgccaatgttgttatgattggcggtttgttagcaggaactgaagagtcccctggcgaaactattatttatcaaggccgttcttataaagtatatcgtgggatgggctctttaggtgctatggaacgcggttctaaagaccgttatttccaggagaacgccgataaattggtaccagaaggaattgaaggacgcgtacctttcaaaggcctggctgcagaaacaatcttccagttggttggtggtttgcgtgcaggtatgggctactgcggtgctaaggatatcgaagaaatgattacaaaaactcaatttattcgtatgactggcgccggtttgaaagaaagccatccgcatgatgtcatcattacgaaagaagctcctaactacagcctgtaataaaatttagaggaggtttttcgagtatggaagatgcagttttattttcacttaaaggtcaggttgctataattactatgaacagaccgcatagcttgaattcaatgaatgaagcattgattgacgggttgcatgaagctctgacaaaggtagaaaaagacccggcaataaaatgtgctgtgctgacaggtaatggaaaagctttttgtgccggcggagatctgccgtttttggagactcttgcagatactgctgtaaaaaaggctttcattaccaaagtagggcaagttgcaaaacgtattactacaatcgagaagccaattattgccatggtcaatggtgttaccgctggtgccggtgttaatctgatgctggcctgtgaccttatttatgcagtagatacagctaaatttgctcaaagctttgcgaaagtagggttgatacctgattgtggtggtttatatttcctgccgaaagctgtcggcgttcataaagctaaagagctgatgtttacagctgatttgattgatgcagcaactgctgaaaaaatggcgttggtaaatcatatcttccctgcagcagagcttgaggacgcggttatgcaaatggctgaacgacttgcagcttcagcacctttagcgatagggctcatcaaaaaatatctgaataatactgcgatgactttagacgaagtgctggaaatggaagcagttgcccagcctttatgtatgggcacggacgatagtgcagaaggaataactgcctttaaagaaaaacgtactcctaaatttacaggtaaataagaattcacaaaaaagacggaatcgctgtcagcggttccgttttcttttcacgtaaaatactgtataatattactattgacgattatggaggtttgtatgttagattttgatttttcatcaatgttatataggattccggcgcttttgatagctatcactatccacgagtatgcacacgcgcagactgcggaagccatgggcgatcctacaccgcggttcatgggacgtttaacttttaatcctttagcacatcttgaccctattggtgccttgatgcttattgtggccggtttcggctgggctaagcctgtaggtatcaatcccaataatttcagaaatcgccgcgaaggtattttaaaagtttcttttgcaggccctgcggcaaatttgtttttatgctttcttgcagcattgattgttgctttaatgaccaaatttggtgttatgaccaaaggcgtttattcgtttttactttggacacagctttataatgtttggtttgctttttttaatcttatcccaatcccgcctctggacggttcaaagattttaggagaactgctgccgccgcggactgcttatcagtatgaaaatatggttggccaatatggcttttatatcttgctggctttggtctttaccggtatcgttggtatgatcataaggcctttggcaagcacgtatatgtctttggtaaacagtattttggggatagtattttaattaaaacggcttgttgaattatgattaatgaagggacttgatgttgatgactaaaggtagaattttcagtggaatgcagccatctggacgttttcacttgggtaattatatgggagcgctggagaattgggttcgtttgcagcacgaatatgaatgttttttctccattgttgatctgcatgcgctgacttcgtcttatagcgatacttcaaaattacaggaaaatgttatggaaatggcgattgactggctcagtgctggtcttgaccctgaaaaaaatgtcatttttgtacaatctcatgttaaagagcacgctgaattagcgctgcttttaggtatgagcactccgttgtcgtggctggaacgtgtgccaacctataaggataaactgcagaattggtctgctcagggcaaggataataatacctatggttttttgggatatcctgtgcttatggcagcggatatcatgctttataaagcaacctgtgttcctgtaggtgaagaccagtctgctcatttggagctgacccgggaaatagtacgccgttttaactatctttataatagagaagtgttccccgagccacaggcagtattttccaaagctaaggttttaccgggtattgacggccgtaaaatgtcaaaatcctatggcaataccattcctttcggcgctggaccggaagaaatgtgggaacgtatacgtatgatgactactgacccgcagcgtataaaaaagactgacccgggacatccggaagtttgtattgtctacgcttttcataaggtattcaatcctgaggaatatgaagagattggggcaagatgccgtgccggcgagattggctgtgtagaatgtaaaaaacgtttggcagaaaagatgaatgcgttgctggcagatatccatactaaacgggaagaattatcaaagaaacctgaatatattaaagaagtacttgattatggagcacagcgtgcccgcaaggaagctgaaaaaactatggctgaagttaagaccgccatgaatgtgctgtaatatatggctaacctgtcaatcaaggttcaggattttgaaggtccactggatctgttgatacatttaatagaaaaagaaaaaattgatatttatgatattcctattgtggcagtgactgagcaatatattgaatatttacaggcaatgacggagtttgatattgagattgccagtgaatttttgctgatggctgccacgctgctgcaaatcaaatcgcgtatgcttttgccaaaacaaactgctgaaggcgaggaagatgaaactgaccctcgtcaactgctggtggaaatgctggtagaatacagacgtattaaggtctgtgcctcaaatctagctgaactaaagcttcaggcagaacgttgccgttaccgactgccgcttttgtctggttttgttgaacgcagcttgaaacaatatgaggcagaagagttgattagtgctatgctgaccctgctttcagtgaaaactgagaatacggcttatattgagcgccaggaatttaatgtacaggataaaatgaatgagattgttcatatgctttctcaacatctcaacggtgtagaatttgccaaagtattttcacgtactggttcccgcagtgagaaagtcgcgtcttttttagctgttttggaacttttaaagcttggtgttgtaactatcaaccagacagtggcttttgctccaatctatatattcctgcgacagggggaacgataaatgtttcacgattacttaaggggttctttagaagctttgttgtttgctgccggtgaaccgttatctgttgccaagctagctgaaataatgcagcttgataaacctcaggtatgggaactcttatcgcttttagagcgggattatgaagatgaaaagcgcggcctgtatttaagaaaagtggcagaaggttatcaattatgtacaaaagaacagcattatgaattgataaaacagctggcgcgttctcaggaaatgaaattatctaatgccgctatggaaacattggctattattgcttttaaacagcctgttaccagaagtgaaatggaagctattcgcggtgttaaggtcgacggtgtcgttaatacgcttttagaatatggattgattagtgagaccggacgtaaggattctattggtcatcctattttatatggaactacagataaatttttgattacttttggtctgaattctttaaaagacttaccggattttcctgatattttgtcagaacatgaaaacgaaccggaacaaatgtcactaatggctgaatttaatgaagagcttaataaaacagaagaaacaggggatttataatctatggaagaacgtttgcagaaagttttagcttctgctggggtagcctccagacgcgaagctgaaaaatatattttagccgggcgtgtaaaggtaaatggtaagattgttaaagaattaggaactaaagtaggagaaaaagcttttattttagttgatggtaaaccgattaaacgtgagaagaaagcctattatttattttataaacctcgcggagttgttactactatgacggatccgcaggggcgcagaactgttgctgattttgccaaagatttgccggaacgggtttttccggtaggccggttggactataatacagaaggtctgctgcttctgactaatgatggcgatttggcccaaaaactcactcatccaaaacatgaagtaaataaaacatatagagtgactgttccgggactggttccgcaggacaagcttgatctgctgaggatcggtgtaaaattagaggatggaatgacagcgcctgctattgttactctgattgggtatgataacgaaaaaagtaatacaacttttgatatcgttattcatgaaggccgtaaccgtcaagtgcgcagaatgtgtgattttattgggtttcctgtaagacaattaaaacgtataaagttaggtaatctgacactgcagggattaaaacgcggcggttatagaattttgaatgaagacgaaattaatgctttaatcaaggcggctgcgatcaatgaataaagttatcgtcgtaggcggaggtgcagcgggtttattggcagcagcagctgctgctgaacatggggcacaagtaacagttttggaaaagatgtttaaacctggaaagaaacttttaattacaggtaaaggtcgttgtaatatcaccaacgattgtgacttgcaggaaataatcaaaaatattcctggaaacggacgctttttaaacagtgctctacgtcagtttactaatgaagatgttgtaaaacttttaaatgataatggtttggaaactaaggttgaacgtggtggtcgggttttccccgtaagtgatcaggccaaagatgtagtagatacattgttaaaaattctgcatgatttaggtgtagaattggttactgatatttgtgtgactgaagttttaactgatactgaaaaagttatcggcgtcaaaactaaaagcggtaaagtatttaaagcagatgcagttattgttgcagcaggcggggcgtcttatccaggaaccggatctgacgggagtggatttaaacttgccgaaaaattgggacatgcgataataccacttaaaccttcgctggtaccactaactagtgattcaccttatattcctgatttgcaggggttgtccctgcgtaatgtacaggctactgtttattcttcaggaagtaaggctgcttcggaatttggagaaatgttatttacgcattttggtgtatcaggtccaattattttatcactcagtaaaacagttgcagcacttttaaaagctaataaaactaatatcgatttgctgatagatttaaaacctgctttgacttttgaaaagcttgaagcaagagttcagcgtgattttgagcaatacagccggaagcagctgctgaatgggatgaaagaccttctaccgcagcgtctgatccccgtagttttagatcaggcttatcttgatgaagaaaagcctgttaatcagatatcaaaagaagaacgtaagcgtttagtagaagtgttaaaagggttatcagtttcgattacgggaacgaggcctttagcagaggctattgtaacagctgggggcgtatccataaaagaaatagagcctaaaacattgcgttccaagttgtggcaaggattgtattttgcaggagaagtcattgatatagacggttatactggcggctataatttacaggcggcattttcaacaggatatgctgcagggacagcggctgcatatcaataaataggcagggtggtaaatgatggagaagaaattagtagttgccatcgacggtccggcaggagcaggaaaaagtaccattgctaaactggcggctgaagaattggactatatttatattgatacaggtgcaatgtatcgttctgtagcttggaagtttttacaaagtaagcaggatttttcacctgaattagtaagtaaacttgctgctgaaatgactattacttttaaacaggaagcaaaattgaaccgtgtttttgttgatggactggaagtaacagatgaaatcagaactccggaagtaacagaaattgtttctaaagtatctgctgtaggagctgtacgcgaagctatggtagttcagcagcgccgcatgggagaagcaggtggagtggtgatggacgggcgtgacatcggaacagtggtatttccgcatgctgatttaaagatttttttgacggcttctgctgaggagcgggcatcgcggcgatacaaagaaatgcttgccaaaggaatgcaggttgatctgaagcagctgcagtctgatattgaggctcgtgataagcaggactgtgaacgtaaaattgcgccgctttgctgtgcagaagatgcgatttttttggatagttctaatatgtctattcaggaagttgcttctcaaattttaactttggtgcaggagcattaagctatgttttattcagtcttaaagattattttaagaattttattcaaaatatttttgcggctggaagtaaaaggtgcagaaaatattccagcgacaggtcctttggtaattgccagcaatcatttaagtttgctggatccgcctgtaatcggtgtagcatctacaagaaaagtgcactttatggcaaaacaggagttgtttgtacctgttttgggtgatatttataaacttttgggcgcatttcctgtaaaacgtggtggggccgatagaacagcaataaaacatggtattgacttgatgctggatggtggtgtgttagctattttccctgaagggactcgcagtaaaacaggggcgttaggtaaggctgagccaggtgctttgatgatggcaggaaaagctaaagcagtcattgttccaacatgcgtaaaaggtaccgatatcaaacggcaggggaaattatggccgcaagtaaacgtcaaatttggaaaacctatttttttccctcaggatgtaccgatcagcaaagaactgctgcatgaacttacagaagctttgatgctggaaataaaacgcttacaagaagcggagtgatagtatgaaaatcagaattgctgaatattgcggtttttgttacggcgtcaaacgtgctgtagatatggcatataaattggctgaagcaaatgaagcatctggaacattaggtcctttgatacataatccgcagcttatcgaagatttaaataccaaaggagtgccttgccgtgaaagcctggacgaatttcaagctggagaaactgtcgtttttcgctcgcatggagttggccctgacgtttacgaagctgctcatgcaaaaaatctgactattcttgatgcaacctgtccaaatgttaaagctgcacagaaaaaaggacaagctttggctgaggctggttatttacctgtaattattggtgaaaaaaatcatcctgaagtaaaaagtattgtacaatgggcaggaaaacatgctatagttatagaatgtataaaagatataggtaatgtacctttagtagataaatatggcgttttaattcaaactacctttgaattggcaaagtttgaagaaattctggcagcacttcagaaggaacgttccggtgaatataaaatagaaaaaactatttgcctggcaacgtctcaacgacaaaaggctgctctgaagttagctgatgaagtagacgcctttgttgtaataggcggcagaaacagtgccaacacaagacacttgtatgagcttgttgcagaacactgtaagcgtgcttaccatatcgaaacagcctcggaattaaacgaggagatgtttaaaaactgtcaaaatataggaataacggcaggcgcatcaacgccggaccgtataattaaggaggctatacgtgtaatggaaaacatggaatcttttgaaagtatgctggaacaaagcctggaggacgcacatgtctaccctggtaagattgttaaagctacagtcatccaaataggcaaagatgaggtatatgttgacttcggctatatgaaagaaggcgctattgctttttcacaatggtctaatgaatctccggaaattttggctcaaactattaaaattggtgatgaagtggaggccaaagttattcccggtacttcgaaagacgattttatccgtctttcgaaaatcaaagctgaacaggatgctgcatggaattatgtagcagatttggcagaaggtgaaaaacgccgtgctactgtaaaagttctgcggattattaaaaacaaaatgaaaaatattgtcggcttagctgttgcagtcgaaggcgttgaaggttttatgcctgcttctcatgtggaattacgccgcgtagaagatttttctgattatattggtaaagaattggaagcggaagttattgaagttgatacggcaaaaaaacgtttagttgtttcacgtcgtgatttgcttagaagtgaaaaagaagcaaaagcccaggcttggcgtgatgccaaagaagccaggatccaagctgctaaagaagctcgtactgccgcagaagaagccgcttatgcttctgttgaagaaggacagacagttacaggcaaagttgtaagaattgctgattttggcttgtttgttgaagttggacaggggttggtcggtttagttcataataccgagttatcctgggatcgtaatgtaaaagcagaagatgctgctaaagttgatgatgaagtaactgtacttgtgaaaaaaattgaccgtgaaaacagacgcgtagctctcagtataaaagctactcaggaagacccgtggctgactgaagcagctgcttttaaagaaggtatggttgtagaaggtactgtagagaggttcctgccttttggcgctatcgtaaaacttgccgataaagttgaaggattagtccatgtttctgaaattgctgaaacccgtgttgaaaaaccggaagatattttggaaatcggtcaaaatgtaaaagtaaaagttatcaaagttgatttgaaacataagaagatcggcttaagtatcgttaaagctgttaaagaagcagaaaaagcagaatacagctcttttatcaatgacaaaccggagctgactcttgatttaaaagaacagctggaaggtttgaacaattaattaaacggatggtagatatgtcgcgagagcaaagaaaattggatcatatcagatatgcattggaacttggagatggaccgcttcctaacggttttaccgatatgcattttctgcataattgcttgcctgagcttgctcctgctgatattgatattacaacgacgctgggcggtattaagctcagcgttccctttttgataaatgcgataaccggcggtacggataatgttatcgatatcaaccgcaagcttgcgcaaacagcaaagtcagttggagcagctatagcggtcggttcacaatatggagctgtaaaaagtaaaagcagctatcagagttttaaagtagtacgcgaagtttatcctaatggagtcgtttttgctaacgtcagcgctctggcaacaccggacgaagcagctgaagctgttaaaatgcttgatgctgatgctttgcaggttcatttgaatcctgcccaggagcttgtgatgccggaaggagacagaaattttaaaggtcttttggataatatgcgtcgcattttagaacatagcgaagtccctgttattgtcaaggaaaccggttgcggtatggcagcagaacaaatcaaacagatgcttgtttttggctttacctggtttgatatcggtggagcgggaggcacgaatttccctgcaatagaagcaaaacggtttacttcacaaaagtctgttttagctgagtggggtataaacaccgctaaaactcttactgaggctttttctgtttgcggccgcaatgatattattatagctagtggaggaataagggatggactgacggctgcgaaagcgtttgctttaagtgctgatgttgtggggatgtcagggaatattctgcgttatattatagaaaaagacattgaagaagctcaaagggcattaacaaatatcatcaatgatttaaaaatggtaatgctgcttacaggttccagtgatctgaaagctttgcgtaacgccccaatatattttacaggtgaattacgtgaatttttacttggccgtaattatgatatttcaaaaataagtgccgtcagaaaaagatagtatgtttatcccgttcttcaaataagaacgggatttttgtgtgttttgtcaaatttgaaattataatgtataatattaagataccaaactgtgcttttagaaaggaaaactatgcagggaatcattagtgccgtacgccgtaacagtttagccgaaaatgccggaatcaaagccggtgaaaaactgtgtgctgttaatggtgtgtcagtacacgatattatagaattaagctatttagttgcagacgaacagattgtattgacgattgaagattcggaatgccgacagcgccagatagttattgaaaaatatactgatgaagaattgggactggaatttgaagcggctgtttttgacggggttactacttgttataacaactgtgtattctgctttgtagatcagatgattcctggtatgagagaatcattatatgtacgtgatgacgattatcgtttatctttcttatatggtaattttattactcttacaaatatgaaggaagaagattttgaacagatcataaagacgcatatgtcaccgctctatatttccgtacatgcaacaagaccagaagtacgctgccaaatgatgaataaccgttttgcaggtgaattgatgtcaaaaatcaatagactggtggaagctggaatttccatccatacacaaattgtttgctgtcctggttataatgatggagaagtgttggaacaaacctatcgtgatttggaagccttagcgcctatggtggaaacaatggctgtagttccggttggtattacaaagcatagagaacatttgacaccgatgcgcttattttctaaacctgaagctgccgctatagttgataaagttactgtatggcagcaggaatgccgcgaaaaatttggaaaatccttcgtttatctgggagatgagttttatttattagcagaaaaacaactccctgatgcatcatggtatgatggatttccacaaatcgaaaatggcattggtctgagtcgtagttttattgacgaatggcagcagatcgctgccaaaactgatgtttgcaatcatagtgttgatgcagtgataccggttggtaccagtgcttataaaattttgcagccactgctggataattttaataataaaactggttcaaaacacagttttatcccggtaaataacgaatttttcggtgaaactatcaatgttaccggattattagttggtaaagatattttaaatgctgcccaaggcatgaagagaattattttgcctgctgttgttttgaatcaggataatttgttcttagatgatatgtcctttgatgactttaaaaaagcttttgacggcaaagtagagtgcgccgttaatgcacgcgagttggttatgctgcttagcaggtaggaggccgattatgaaagattatggtttactgcaggtttatacaggatcagggaaaggaaaaactactgcggcattgggtgtggctttgcgtgctgctggcaggggagccaaaacggtcatgctgtcatttctcaaagatgatcctgattatggtgaagctatggcagcacaataccttccacattttttactgaggcaggttggacgcgatgctttcgtaaattttcataatccagatcctattgaccttaaaatggttcgtaaaggatgggaagaagcaaaaaaaattcttattgaagatactgcagatttactgattttagatgaactgaatattgttttggcaacaggaatgctgccattagaggaagttattgattttttgaaaaaatataaaggtaagacagagatcattacaacaggacgtggtgcgcctgaagaattgattgatatagccgatttggttacggatatgcaggaaataaaacattatttccataagggcgtcagctcccgtgacggaatcgaccattagagagtgaggatgagaatgttatgggaaaaccgatagtcgctatcgtaggtcggccaaatgtaggtaagtcgacattatttaatatttttgctaacagcaggatttcaatagttgaagatactcctggtgtaactcgtgaccgattgtatgcggatactgaatggcttgataatgaattcatgatggtagataccggcggtatcgaaattatgaatactgataaaatagctgtttctattcgtcagcaggcacagatagcaattgctgaagcagatgtcattttgtttgtttgtgatgcgcgtgctggtattactcatgaagacgcagaagtagctaaaatgctgcgtcaatcgaagaagccaatagttcttgctatcaataaagctgattctccgaaacaggaaatggaaatttttgagttttataatcttggtataggtgaaccgattccagtttcagctgcaaatcatcttggactgggtgatttactggatgcagttgtggaaaaatttcctgaaacctcagcttatggtgaagacggcaatgaggatgaaatcaaagtggctttgattggtcgtcctaacgttggcaaatcttcaatttttaatactttagtaggcgaagaacgttctatcgtaagtgacgttgctggaaccacacgcgatgctattgatactcccgtaattagagaaggtcagaaattcctttttattgatacagcaggtatgcgccgtaaagcacgtatagacgagcctattgagaaatacagtataattcgttcattaagggctgtagaccgctcagatgtcgttttaatggttatagatgctatcgacggtattacggaacaggacaaaaaaattgccggatatgcgcatgaggctggtaaagggattgttttagtagtaaataaatgggatttgtacgataaagataatacgtctaccttacgttatacagaaaatctgcgcagggaattggtatttatgcagtatgctcctgtagtctttgtttcagcaatgactaaacagcgtatacacagactgccggaggttattcattatgtagcggagcagaatgctatgcgtatttctaccagcgtgcttaaccaggttgttgaagacgctattgcaatcaatccgccgcctaccgaaaaaggtcagcgattaaaaatattgtatgccacacaggttaaaatcaaaccgccgacatttgttatttttgttaatgagccggaaatcatgcatttttcgtatcaacgttatttagaaaataaattacgcgaagcttttggttttgaaggaacaccgctgcaaatgatcattcgcggtaaaaacgaagaagaataaggtgggggagaaatggcagaaggcttagtatggcttgtttgcttcattgtcggtcacgtatttggttcgataccatgcgggttatggttagtaaaagctgctcatggtattgatatcagagaatatggcagtaaaaatataggaacaactaacgtttttcgtactgtaggtgggaaaacagctttttttgtactcttatgcgatatgatgaaggggattcttgctgtagcgttagtggcttattttaccaataacgcaatgggaggaatggttgctgccggtatcggagctttgctcggacataattattctatctttttaggatttaagggtggacgcggtgttgctaccggtttgggactgattctttattttatgcctaaagtttgcattgccagctttggagtctggttgattttggttttacttacgcgctatgtttcgctggggtctgttatagctgccatttgcacaccgatttttgcttattattttggttactctcagccgttagtaatttttgctgtcgtagcaggaggatttgttgttatacgtcatgcagaaaatattaaaagacttttgaatggtacagaaagtaaaataaaacaaggtaatgcaaaagatctacaaaaaaaataataatattgattacagccgtatttatgtactaaaaacggctgtttttctatttttataagaaaatcttaaaacatatggcttttaccacgaaacaatgatataataaaacacatgtaaaaaccatatggacatttaataaaagggaggacgatatcaatgtctgacaaatctactttttacttagtgcgtgaagaaattttaccggaagcaatcaaaaaaactattaaagtaaaagaaattttaaaacgcggtgaaatcaaaactattaatgaagctgttgaaagaatgggcttaagccgcagtgcttattacaaatataaagattatgtattcccgttttatgaagccagcaaagagaaaattattaccttatccttgttgcttgaacataaagctggtgtcctttccagagttttaaatactgttgccagtgattccggcagcattatgactattaaccagggtatccctttgcagggtgttgcaaataccactatttctattgaaacaaaagaccttacaattgatttggaagccttattagataaattgcgtatgatcgacggagtgaaacgtttggaggttttgggccaagtttaacttatatccgttgatgcgcttttaaccttggaggggatattgtgaaagagtgcattaaagtcgggcttttaggtgcaggaacagtgggcagcggtgtattgactgttttagaagaaaatactgctgagatagaaaaaaaagtcggtgttccaatccatgtatctaaaattttagtccgtgatatgaaaaaagctaaagaattatcagaaaaatatcagttaacagacaaaatcgaagatattgttgaagatcctgaaattgatatcgtagttgagcttataggccgtgagcatccggcgaaggaatacattgccgctgctttagaacataaaaagaatgttgtaacggctaataaagatgttttagcaaaatacggtaaggaattatttccattagcagaagaaaataaagtggattttatgtttgaagcaagtgtaggcggcggtattcctattatcagacccttaaaatcctgtttggccgctaataaagttacttctgtaatgggtattgttaatggcactaccaattatatgctgacaaaaatgtcgcaggaaaatatggattatgctgatgttctgcgtgaagcgcaggaaaaggggtatgcagaatctgatcctaccgcagatgttggtggcttggatgcagccagaaaacttgttattcttgcgtcaatagcatttaatacgcgtattgatttaagtgacgttttagtagaaggtattgacgggctggatctatgcgatattgaacatggtaaagagctcggttatgcaattaagcttttagctattgctaaaaataatgctgaacatggtattagcgtttgtgtgcgtccgacgatgctgccggtatctcatcctttagctggtgtaaatgatgtattcaatgccatttttgttacaggtgatgctatcggagatgcgatgttcatgggccgtggagctggtaaaatgcctacagcaagtgcggtctgcggcgatataattgatgttgcacgtaatattattcataaatcgaacggacgtattaattgtacctgctttgatgaaaaacatctctgcagtttggagaatatgatgtctccctgttatatacggttacatgtacaggataagccaggtgttttagctgctattgctgctgcttttggagcgcagaatgtaagcttaaagaatgttgtacaaaagagtaaagtcaagggtgttgcggaattagtcgttattacttatgatgtctctgaattaaatttacaaatggcggtacaaacattgaaagctctgccgatcgttgaaaaggtttgcagtgttattcgtgttgaagatcacgacctggagtaattttgatatgaaaaataaaataactgttattgttcctgctacatcagctaattgcggaccgggatatgattccctgggtttagcctgcaacttgtataacgattttacttttgaaattttagatactcctgggtttgctttagaggttattggcgaaggagaagatcgattgcgggccggtggcagaaatttagcatttctgtcatttttgaaggtttggaatgaagttagaggtactaggattggccttaaagtaacgatgcagaaccggatccccttatcgcgaggtttgggcagcagttctactgccatagttgccggacttgtagcggctaatctgcttactggatcaactttaactaaagagcggcttttaaattatgctacggaaatcgaaggacatcctgataatgtggccccggcacttttaggcggtattacaatcagttatatggatagatcaggggcacattcactgcgttttctgccgcaaaaagagcttcgttttatagccgttgtacctgaccagcctctttccacgcataaggcacgtcaggcaataccacagcacattcctcatcaggatgctgttttcaacgccagtcgtactgcactttatgttggagcgttgatgagcggcaattatcaatatcttaatgctgccttagaagatcgtctgcatcagccttatagaattcccttgattacaggtacagaggctgtttttgaggcagccaaagcgaacggtgcttatggagctattattagtggagctggatctactttgatggcctatgttgatccagaaaaagattgtgatataattgctgcagcaatgaccgacgcttttgaaaaatatggtcagcgcagtactgctcatattcttaagttagatattaatggcgcccgagaaaaagaacatagctgaaattaaaatattgcttgacttttatatgcaggatgggtataatactcattgtgattcggggcgtggctcagcttggtagagcgcttccttggggtggaagaggtcgtgggttcgaatcccgccgctccgaccatttcggatcgccagcctttacgggtaacccccgtaaaggcttatttttttgtctgtgggtaaggaggttcacacctatgattcgtacgctgcctttggtttgcagtaattgtgataataaattcgttcctgctgaagaattatattatcgtgacaattttatgagtaacagtattagagatgtgcattttatctgccctgattgtataaaaagatggaaagacaaatggcgcattaaaacagcagttttttctgaaaaagattatgtgatgacagtgagtattactttggaagatggcacaatatataaaaatcttgactgtactccgttagaagaaactgttgttacaagtgaagaaatcccagaagaagcacagcggagattattcagcatttatactgaatgggattccgaacgcaaaaagaattccttgaaagattgtacttttaaagatgagtttatgcgtacaacttttagctgcgaaacctatggcggcgaaaagtttaacgatattgccttccgtttcaatatgaaagggcaaatagaaacagaaacaccggtacctgaatatgttttgaaacaaataatagatgcatatcgtttatatgagatgcagaataaagaataattagggggataatatgcaggaattgttggagaaaattgagaaaaggcgcacttttgccattatttctcatcctgatgctggtaaaacaaccttaactgaaaaattgttgctatatggaggggctatccatctagctggctcagtaaaagcgcgaaaaagtaataaacatgcagtctctgactggatggaaattgaaaaacagcgtggtatttccgtaacatcttctgttttacagtttgattatgctgggcaccgcgtaaatattcttgatactcctggccatcaggacttctcggaagatacttatagaaccctgatggccgcagatagtgctgtaatgcttattgatgctgctaaaggtgttgaaccgcagactaaaaagctgttttgggtttgccatcgcagaaaactgccaatttttacattcgttaataaattggaccgttatggaagaaatccgttcgatttgatggcagagctagaacaggttcttggtattcatgcttacccaattaattggcctattggcattgatggtaattataagggcgtttatgaccgtatcaaaaagcagatcgaactttttgaggatgataatagccatggttctaaaattttaaaatctactaccggttctcttgatgatcctcagattattgaggcattagggcaagagttatatgataatttgtgcaatgatattgaacttcttgatctggcaggcgatgaatttgatatgacgcgtgtaaataatggcgaactgacaccgttgttttttggcagtgctatgactaattttggtgttcgcagctttttagagaaatttttagagctttctccacaaccacagccaagaattttgcagaatggtgaaattttagatccttctacagaagaattttctgcatttgtttttaaaattcaggctaatatgaacccagctcatcgtgacagaatcgcttttatgcgtatttgttccggcgtctttgaaaaagggatgtctgtttatcacaaacagggaggaaaagtggttaaactttcacagccacagcagtttttggctcaggaaagaactatcgtagaaaaagcttatcccggtgatattataggcgtttttgatccgggtatctttggaatcggtgattccttaagcgatgaaaaaatgaaagtccaatttgaggatttccctgtttttccgccggaaatttttgccagagtgcagccaaaggattcgctgaagcggaaacaatttgtcaaaggaattactcaattggcacaggaaggcgctattcaggtctttgaacaaaaggatatcggcatcgaaagctttattgttggtgttgttggtgttcttcagctggaagtattggaatatcggcttatcaatgaatacagtgcccagcttttgatgaatcagcttgcttataccgttgcccgttgggtttatgcggaagataaaaagcttattgataatattaaaggactggatagcggtatgcttgtatatgaccaaaaagacagacctgttattcttgttaataacgaatggtcattgaactggattttagaacgaaatcctggcattcaatttttgacagttccttcagatgttgctaaaatttagatattaaaatataaattatgtaataatttaagtaaagttaattgtaaaaactttaaaaagtagtttatgctataaacagtggcaaaagaatttttggtgaggtgaaaagtatgacatataaaaacggaacaaataaattcaccttatcacaaaaaatagttcttctgataacgtttgttatagttgcatcattattgcctgccagtttgcttatagcccatagagtttccggtgtcgttgatgaacgtataagtgtaaatgctgtcagtattactactttactttctcattcgccggctgtaatccgttcgctgacatatgaaactgatatcaataataccaatgaaactctgaataatgtcgttaacatggcggccaagtcatgtaaagccagtattattattttagaccgcaataaaaatatacgggtatttcacaatcctacttcgatagacggatttgaagatgaagcgcgtcagatagtggctgaacagggactgagtactaatctaaactggtatgatacttcagtttttaatgaaaaggcagtaggggtcattcgcgatgaccgtaatactgttgttggctatattgtagctggagtatcacctaaaatgattcaggatttgacagtagaatcagttctgctgatttttctggcaagtttatttggtttgtttgtaggtataggcggtgctgtttttttagcacgtcatgtaaaagctactttatttggattagagcctgaagatattgccacattgttacaagaacgcaatgcattgcttaattctgtaaaagagggtgttgttgcaatcaataaagatgctgaaataactttgattaatactgaatcagagtttttgtttgctcaggcaggaatacctaatccacacacacttctaggcaaaccgcttgaaacagttatgaacggattaacgctggatactgttttaaaagagggaagagcaacattggatatgccggtacaggtaggttctgttctatttatcgcaactcttgttccgttatttgacaatggacatatcggtggtgccattataacatttcgtaaaaaaacggaattagaagaattggctaatcagttgactggtgtacgtaattatgctgatgcactaagagctcagacacatgaatttatgaataaaatgcatgttatcatgggtttgattgatatgaaagcttatgacgagttaaaacagtttacgatggaaattgccaataaccggcaggctgaagctgcttatgtagtcaccagattaaaagatattacattagcaggttttattttagggaaaatcagcagggcaagagaattagatatcgagttttctttaacagatgaaagcgaacttacaaccgaatttattcgtcctacagtacaggagctgattcttattattggcaacttgattgaaaatgcttttgatgttctgcgtgatcatcccagtgaaagaattgtaaatctgagtattttaacctttgataatgaaataatggtcatggttgaagactccggacctggtattcctgaaaataaacttgaaactatctttgaaaaaggttattctagtaaggggcccagacgcggtatcggactttttttaataaaacagacagttacccatttaaaaggtactatcgaggttgaatcaaccgtaggcgaaggtaccacgtttaccataagattaccaatcgtaaggacggtgaaaacatcatgatcaaagttttagtagtagaagacgacccgatggtagggaagcttcacgaacattatttgacccaaatcaaaggttttcaactatgtgatatcgttcgcaacagtgatgaagctttgaaaattatgcagactaaagagtacaatcttgtcattcttgatatttttatgccaggaatggatggtctgcagctgctggcaaaaatcagagaacaggaatatgatgtcgatgtcattattgtatccgctgccaatgataaagataagattaaagcagcactgcggttaggagcatttgactacattataaaaccttttgaatttgaaagatttaatctggcgttaaataattataagagccgctataacttggttgaagaacagtccatccttaaacaggatgaacttgacaaaactatcattcatcaggatacagatgtagaagttactttaccgaaaggtttggacaagaatactttaaatactgtttggtctgaaattattaaaatcgacggaatgtttactacagaagaaatttcggctaaagttggtatttcacgtgtttcaatccgtaaatatttggaatttcttaaatccttgaaactattgagccttgatcttcatcgaggcagtgtaggtcgtcctgtttacaaatacaaatgcattgataaaaatgcaaatattattgatctatatattcaataaaggttgttgctgatggaaaaaattactgctattcaggttttggatgtacctgtgcacccatatagtatggatgcggctgttcaatatcttgatgataagatacaagaacaaaagcactcatttgtagttactgctaacgcagaaattattatgatgtgtcaagacgatgcagaatataaaaatatcttaactaatgttgccgatttagtcctgcctgatggcgccggtaccgtttgggcaggcagacagttaggatatgctgtgccggagagagttgcagggtttgacttatttaatcgtttacttaatctggctgctgagaaaggttatagagtttttttctttggcgcgtcacctggtatagctgaagctgcaaagaaaaaagcagaaagtttatatcctggtgtaactgtagttggatgcagggatggttattttaaagacagtgataacaagtctataatagatgccattaataatagcggcgcacagattttatttattgcgttgggagcccctaaacaggaaaaatggcttcagacacatcttcaagagctaaaaccttatattactatgggaataggcggtagttttgatgtgttggccggaaaaatggaacgtgcaccgttatggatgcaaaaatattctttggaatggctttttaggctctacaaacaaccgagccgttttacaagaatgcttgctttacctaaatttgttattaaagtaatttgttccaaatgaaataaaaatggacaaaaagatatggctgtattataataatgtgatgaactaaaggttcatcacattattgttttctttttcttttcttaaacttgccgaaagagagggactctctatgaatatagtcaaagacggtcatccgttcatatttgcttttgctattattacttttgctgtaggttattggggtagtttaatatgggccgtagttcctgcagtgttaatgctattttttatttattttttccgtaatcccaatcgtcctacacaatcagatgactctattatttattctcctgcagatggaacagtaatggcaatagaagacttttatgatgaagaatatttaaatgaagatgctataaaggttactattttcctttccgtttttaatgtgcatgtcaatcgcagccctgttaatggtgaaataaaataccagcgttatacatgtgggcagtttgtgccggcatataaaaaatctgcctcttttgaaaatgaacgtcatgctattggagttcaaaacgataagatgagagttttggttattcaggttgcaggattactggcgcgtcgtattgtatcgtgggtgactttaggtcataatttgaaacaaggcgaatgttatggtatgattaaatttggatcaagtactgaactcgttttaccaaaaaatgttgaaattcttgtaaaaaaaggtgattcagtagttggaggagtttctctgatcgggagggttcattaaaagatgaattatcgtcgtatcatacctaacagcattagtgcattaagtttaacatttggcgtgttatctatttttgatacatttgaaggcaatttttccagagcagctatatttataatattggctgttattgcagattctatggatggaagagctgctcgctttttaggagtaggaggcggggaatttggtaaagaactggattctttatgtgatttaggttcttttggtgtcgctcctgctattcttatttatcaatatggtatgacagatttaggtttacttggaaaactcattgcttccatttttacaatttgtggtgctatgcgtttagcaagatttaatgtaaatgttggtgaggtaaagggatattttcaaggcatgccgattcctgcgggagcctgtgttttagcaacgtatgttctttctgattattccttttccacttattttgttgcaattctaacttttgtaattggttgtattatgtatagtaatgtaaaatttccggattttaaaggtaaaggaaatccaatgtttttacctccggtaattgttgctgctgctgttggcatatatttactttatgtaaacctttcagcatggccttttgcggccatgtttacctattcgttagctgggattattaactgtgtttatgcaaaaatgctaaacaagcagtaaatatttttagaaagcaaggagatttttgatgagtacctattttgacttgatcatgattccgttgcagcttttaattgtattcttcacgatctattattttacgctttctttctttggcctttttggccgcagaccagaagaaaaaatttatgatgagcaaaaaacttttgctatgatcgtttgtgcacacaatgaagagcaagttatcggtcaattggtcgagaatctgcatctgctcaattattctgatcatttatatgatatttttgtagttgcagataactgtaaagacaatacagcgcaaattgcccgtcaagcaggagcaatcgtttatgaacgctttaatgataatgaaaaaggcaaaggatttgcaatggattggatgttccaaaggctttttgaaatggaacgtcaatatgatgctgtttgtgtctttgatgcagataatttagttcatcctaactttttaagagaaatgaacagccgtttatgtaaaggtgaacgattaattcagggatatttggactctaaaaatcctaatgatacctggatttcaggagtattttctatttctttctgggtcgtaaaccatgtatggcatttagctaaatataatatcggtttatcgagctgtcttggcggcactggtatgtgtatttctacagatatattgcgcagacatggctggggtgctacatgccttacagaagatatggaatttacaatgaaagctttgttggaaggtatacctactacttgggcacatgatgccatcgtctatgatgaaaagcctcttacttttatgcaatcctggaatcaacgtaaacgttgggctcaagggcattttgatgtagcaaaccgttatatcggtaaattgtttgtaaaaggcattaaggaaagaaatatcgttgttcttgatggaataatcaatttattccaaccgtatttcttacttatttctactttttttgtcatttgcagttatatctatcaattttatcctttctatacaaatgtcttatatgctattctaccgttagaagtttggacgctgataggtataggtcagtatatttttcctatgattgtactttttaaaattcatgcttcttttaaatcatggatgtaccttttattgtatccgctctttatttacagctggatacctattactgtactggggtatattcacaggcatgatcatgaatggagccacactgctcatactcgcggaataagctttaacgaagttttaattccggaaaatgctgaacttggcccgaaacaagtcgtatttcctaaaaaacaataacttttgaccgctcttctaaagagtggtctttttctttataaaatgcttgaattctttattttataaggcttttatgttattataagatgataagatataaaatatataaggagaagtttgtgaagatacgcggtattttatttgatttagatggaacattgatcgatactatcgatttgataatccaagcatttgaacacagctttgcagtttgcttgaataaaaagatgccacgtgcagagttggtgaaatattttgggctgccgttacgcagtgctatggaaaattatgtagataaaaatcaggtagaaacattatgtgcagtttatagagagttcaatctaaaatatcacgatgagcttattaaaccgtttccaggggttaaagaaacattgtctgttttgcagcagcgtggaataaaaatggctgttgttacttccaaaaaggtaccaatggccaaacgcggtttgcagtgtatggggttggaaacctatatagaagcggttattggatgtgatatatgccaacatcataaaccacatccagaaccaatggagaaagccttgagcgctcttaaactgaaagctgaagaatgcctttgtataggcgacagtccttttgatttacaaagtggacaggcggcaggctgttatggtacggtagctgttagttataccagctttgactggcaggaaatgcttgatgaaggtaatccaacgtatattctgaaagaaatgccagatttgataaagattattgatgatttgaataataaacactaaggaggacaatatgcgtaaaatagcaatcataggtggaacaggaatctatagtccggaaacgttacaatgttttgaggaaaaggtgattcaaactccttatggagcagctttatgtaatattggaacaatgtgcggcaatcaggtaattttcattacccgtcatggtgtgggacataaaacagctccgcataaagtaaactatcgtgcaaatatctgggcactgaaaagtctcggtacagaagaaatttttgcgactactgcagttggatctttaaatcctgatatggaacccggacatttcgttgtatgtgatcaggttttagattttacgaaaagccgtatcaatactttttacgacaatccagaacgtggtgtcgctcatgttgattttaccaatccttactgtccaagattacgagacaaagtaattaattgtttatataaaacagatattatttttcataaaaaaggctgctatgtatgtactgagggacctcgctttgaaactgctgctgaaataaaaatgtttgcaatgttgggcggtgacctcgttggtatgactaatatgccggaatccttgctggccagagaagcagaaatgtgttatacaaattgttccatagttactaatatggctgccggaatttctccgacacctctttctcacagtgaagtagttgaagctatggataaaagtattaaaaatatggaacagcttatcagcgcctttattgctgctaatgaagctgatagtatggagtgtggatgcccgcagtgtatgactgaatttggtggttttactttataaggagcctgtaaaaatggttaaaactatggaatggcagggacagagcctgcttttattagatcagacgaagctgccatcagaaattataactattctttgtaaagattaccgtagagtaggagaagcaataaaacgtttggaagtacgaggagcacctgctattggtgcggctgcggcctttggaatggtattaggatggcaggagcttgcatcaagatatgctgatttcagccaggaaactcttttaatagagttcaaaaaaataaaaaactttttgctttctactcgcccgacagcagttaatcttggttgggcagttgaaaaaatatataaacatgctgttgctatgataaatgcacagcaatctttaaaagctattgaaacttcattgggaaatttagcctgtaaaatttatcaggaggatattgaagtcaatagaaggattggtatctatggggccgcattattgccgcagcaagccagaatactcacgcattgtaatgcaggagctttagctacctgtggatggggaactgccttgggggttgtcagacaagcttttttagatggacggctggagatggtatacgcagatgagacacgaccgttattacagggggcgcgtttaacagcctgggaattaatagaagataatattcctgttactttgattaccgacaatatggcagcctgggttatgcaaactcaacatatagactctgttatagtcggcgcagatagaatagctgccaatggtgatacggcaaataaaatcggtacttatggagtggcattggctgcaaaatatcatcagataccattttatattgctgcaccgatcagtacttttgattttactttagaaactggcaaacagatccctattgaagaacgttctgctgacgaagtacgattgcttcatagtgtggtaacagcaccacagcaggtgaatgtttttaatcctgcttttgacgtcactccgggagaactgattaccggcattatcacagaatatggtgttatatctgcgccatatatagaaaatataaaaaaattgcagaaaatactgcaagaggaggactaatattaattatggaaagtatgattcgtgatatagctttagcaccatccggaaagcaaaaaatctcttgggtaaaggagcatatgcctttgctcaatattcttaatgaaaaatatagtaaaaatcaaatttttaatggtttgaatatggtagttaccattcatttagaagcgaaaactgcatatttggcccaagtactcaaaaatgctggcgctaatgtagttgtaaccggcagcaatccgctgtctactcaggatgatgtagctgcagcgttagctgatagcggtgttactgtttttgcaacccataactgtactgataaagaatacgatatgtatctcagcaaagcattagatgtggagcctgatcttatcattgatgatggcggggatcttgttaatatgctgcacggtgaacgcaaaaatttggttgccaaacttattggcggcagtgaagaaactactactggcgtgcatcgtttaaaggctttatccaataacggtaagttggctttccccatgattgcagttaatgatgcttattgcaaatatcttttcgataatcgttatggcactggccaatcttcttgggatggtattatgcgcactacaaacctttctgttgcaggaaaaacagtagtcgttgctggttatggctggtgcggcaaaggggtagcaatgcgtgctaaaggattaggcgctaatgttatagttactgaaatagaccctattaaagggatagaagctgtttttgatgggttcagagtaatgcctatgcaggaagcttctaaatatggcgatttctttgttaccgttaccggctgtaaagatgttatcacaaaagaacattttgctgttatgaaagatggagccattcttagcaatgctggtcatttcgatgttgaaataaacatcaaacatcttgaagaattaactgtagaaccgtcgtatgaggttagaaaaaatatcagaacttttacgatgtcaaatggccgcaaaataaatttattgggagaaggccgtcttgtaaatctggcctgcggcgatggacaccctgtagaagtaatggatctttcttttgcgatgcagtttttagcaatgaaatatctgttggaacataaaaatgaacttgaaaataaactttatgttttaccagaagagttgaatacagaaattgctgcgcttaaattacaagctatgggtgtaggtattgataagttaacgcaggaacaggaaacatatctgcaccaggcctaaaggaagtgttaatcttgcaggatgatctcattattgatgcggctcgtagacaaatagttactgcaggcataaaaatggtcgagcaaaaaatgattgcaggatcttggggaaacctaagtataaaaatagatacttcacgttgtgcaataacaccatctggacgtagttatgacagcttaaatactgaagatattgttgttgtggatatgcaaggtaataaaataaagggagctttgattccttcatcagaaacacctctgcatctggcaatctataatgctatacctgcagcacaagccatagttcatacacatagtgtttatgccagtgcctgcgctgcgctgcatagatcgataccggcgttaattgaagatctggtgcaaataataggcggtagtgtggacgttgccgaatatgcgttaccgggaacaaaagtattagctgaaaatgccttaatagctttacaaaataaaaaagctgcattactagctaaccatggagttgtatgctggggaaattctttagaaactgctttaatggctgctgaaatagttgagaaagcagcacatatttattgtatttgtgaaactatgggcggtgctaaattattaccggaatcagacattgctataatgcatgatttctacaagcagcattattctaaacgccaaatagaaaagggagatgaagtacttgagtaaattactaataaaaaatgtagaaataatttctgctcccgataacgaaaaatattttttaggcattgataatgacactatcagtgttatcagtaaagaaatgccgacaggttttgaaaatgccgaaataatcaatgcttctgataagattgcagtgcctggtctggtaaacactcatacacatgctgctatgactttattgcgcagttacgcagacgatatggtattgatggactggctgcaaaataaaatctggcctgcagaagcgggattaaatgatgaagatatctattggggcacaatgctttcaatcgcagaaatgcttaaaacaggaactacatgttttgcagatatgtattttgcaatggataaagttgcccaggcagtgaatgaaactggtattcgtgcttctttaagccgtggtctggttggacttacaccagatgctgatgaaaaactgcaggataatgaaatgctttttaaaaactggcatggaaaagctgatggccgtattagagtaatgtttggtcctcatgctccctatacttgtcctgtctcatatttaaagaaagttgtagctaaagccggtgaattgaatgcggaaattcatatgcatttatgtgaaacggcaggagaagtaagtgattgtgtaaaagagcacaatatgacacctataaaactaatgaatagtttagatatgtttaattgcggaactttagctgcacattgcgtgcatgtaagtgaagcagacttggatataatggctgataaaaaagtccgtgtagcacataatccgcagagcaatctaaagctggccagcggtattgctccagtgccggcaatgcttaaacgtggtattatagtcggtttaggtactgatggaacttccagcaataataatttggatcttttagaagagtgccgtctggcagctatgcttcataaaggaataagcggtgatccattgcttattcccgcccaggaagctttaaaattggcaactaaacaaggtgcttcggctttgggatttaatgatgtaggagaaattgaggtaggtcagaaagctgatattgttctttacgatatgcagaagccttattggtatccacgccatgatcgtgtttctttactggtttatgctgcaagcgcaactgatgctgatacagttattgtcaacggtaaagttttaatgaaaaatggcgaactgttggaaatggatgtagaaaaaatttatgcggaggccaatatgcgaggccatcgcttaactagataaagcaaaaaaactttaggagtgacgagagtggcaaaaatacttgtaaaaaacaatttagcacctgctgtttatgaatttattattgaagcgccaatgatagcccataaatgccaacccggtcaatttgttatgattcgtacagatgaaaacagcgaacgtatccctttgactatagctgattttgatcgtgaaaaagggacaataactttgattgtgcaaacagtaggcaatactacaacacatctttgtgaaacttttattgttggtgatgaaattttagatgttcttggcccattaggaatgccttcacatatgggtaaattcggtactgttgtttgcgttggtggcggtatcggcgttgcaccggtttatcccattgctcgtgcttatcataaattgggtaataaagtcatttctattatcggtgcccgcaataaagatctgattatttttaaagaaaaaatggaagctgtcagtgatgaattgattattactactgatgatggaagtgctggtcagaaaggctttgttacagatcctctgaaagcaatgcttgaagccggtgaaaaaattgatttagtcttggctattggacctgttattatgatgaagaatgttgcagaaactacccgaccctatggaactccgactactgcaagtttaaatactattatggttgacggaaccggaatgtgcggtgggtgccgtgtcagggtaggggatgaaaataaatttgcatgtgttgacggcccggaatttgacgcacatttagtagattttgctaatcttgttcagcgtcagcaaatgtataaaggtcaggaaatgcttgaatatagctgcggaggtcattgcaaatgcgtggaggaatgagaaatcctatgccggaacaaccggctgatataagaaataaaaattttgaagaggtagcgcttggttatgatatggcaactgctatcgatgaagcacagcgttgcttaaattgtcctaaaccgcgctgcgttgaaggttgtccggttaatgtagaaataccagcttttattcaagctattgctcaaagtaaattaaatgaagctataactatcctgaaacgtaaaaatagtttaccagctgtttgcggacgcgtttgtcctcaggaaaatcagtgtgaaagtaaatgcgttttaggtatcaaaggagaatccgttgctatcggacgtctcgaacgctttgttgcagattatgctcgtgagcagggaattgatatcaccaaaactgatatagattcatcaaaagataaaaagatagcaattgttggcagtggtccttcaggtttaacagctgcaggagatcttgcgaaaatgggctatgatgttactatgtatgaggctcttcatgctccaggtggagttttaatgtatggtattccacaatttcgcttgccgaaagaaattgtaaaacacgaaattgacgccttaaaagatttgggggtaaaaataatccctaatgccgtcattggcagaaccttcaccatcaaagaattaatggatgaagaaggattcagtgccgtttatgtaggtacaggtgctggattgccacatttcatgcatatagatggcgaaaatttaaatggagtctattctgcaaatgaatttcttactagagttaatttaatgcgtgcataccaatttcctaatgttgcaactcctgtatatgtaggtaaaaatgttgccgttgtcggtgctggaaacgttgctatggatgccgcgcgtacagcaaaacgtcttggcgctgaacaggtatatatagtttatcgccgcagcgaagacgaaatgccggctcgcaaagaagagataggccatgctaaagaggaaggcattgaactgagactgctcaataatcctacccgtattctcggaaatgataagggctgggttaatggtatggaatgtataaaaatggaacttggtgaacctgatgcatcaggacggcgctctcctgtagaaatcaaaggttcagaatatgttcttgatgttgatatggtagttatggcgataggccaagggcctaatcctttactcaaacaaacaacacctgaactggaaactaataaacgcggcaatattgttgctaatgaagaaggtgctacatctattcctggtgtttttgccggtggcgatatagttactggtgcggcaacagtaatttctgctatgggagccggtaaaaaagcagctctggcaattgatgaatatttgtcaaaacattaaaaatttctttctctgataataataaccgtataaaatatccggcaaaaatttgccggatatttttaattttctattcatatttgtttttattttacttaacttcagaatggtaaaaacttctatgatatgttaaaataaataagataagttttatattaaaaatttttcttcgaggtgaataaaatgcaatttccattagtattaggagtttctgcacgtcatgctcatttatgccgcgagcatatgaacattttatttggtgaagggtctgaattacaccccaaaaaatatattggacaaccgggacagtattcttcggaagagcagattactttagtaactgctaaaggtgagatgaaattaaggatcatcggtcctttgcgtaaatatacacaactggagctatcttttactgatgccagaaaagtaggtctgaatcctccaattcgaaattctggagatattaaagaatctgctggaggaaaattagtaggacctaaaggtgaagtagaaattacagaaggtgttattatagctgcacggcatatccatttatatcctgaaacagcagaaacatatggtttaaaagatggtgatatcgtttctatccaaacaaatggagaacgtgctttaattatgaataatgttttagtgcgtgccggtgaagggaatgctgatgaagtacatattgatactgacgaagctaatgcatgcaatttagacagtggtatgatggttgaaattattacaaaataattaacgaggtggtaaagtgataaaattcttgatatttctatccctgttaattcaattgtcattactaaatatcggttatgcaaaagaatatcgtaatcctgaagctggctttaaaataaacataccacaacaggaaataaacattgtaagtaaaaatttttatggtggaatgcagcctaatggtaactttatttacgtttatagcctgaatcaaaaacaggcatcagatttattagaagaaaatttcactacagatgcttttaatgatgattatacggcaattgaattattagaacgttctggtattgatcctcaaaaagccagtcttaaattattggatcctgttctctactggccttcacataaaccttttattaaacagctgcccaatgatgttgcttttaatattcaaactcaaaaaatccatggcaaaaaaagtttaaatatgcagtttactgaaaatatggaaaacgaaattaaggataaaaattcatatttatgttcaattgatttgctttctgcaaataacagattatacgtaatcagtaccaaagtcttaaacagccaaaaagagtctgaagtatcagctgaatcaatacgtaacgagtatcgaaaaggtgtgttaataacaaaaccttctgcaaatactaatacattaatttacactgataaaataggaaaatttaaatttgatcttcctgaaaattggtattatgttcaaagttacttttctgataatcctaaagcttgtttgacttttgccttaccgttggaaactttggaaaaaattaaggaaaaaactcaaaatttggaagcgaatgacttagataaagagaaaatagctgataatgtttccgaagaaaatatagcgtcatggatggatttactaacagaaagtgtatggtcagtttcctgtgaaacaaaagaatttgagacagctgcttatttagaaaatccagaagctactaaagcagagatgcagttgttgttttcagagctaaaaaactatattgaaagcagccgctactataaaaacagtaggtttgattttgatgtcaatattactcctaaaataggatatataaatttcgatctatcatttaatttaaaagataaaaaagatttcgacaataccggcagaattttctttacaaagaaaaaaggtggtcttgtagtttatacatccactcttagaaatacagaacaaccagcttctaaagaactcatagagaatattaagatgcttgatttacagtgattttgatgcccctttacttagcagtatgaatgcaaaggagacataaatatgagaaaaacaatctgttcaggaatcatcacattcggtatcttggtcagtctttccagctgctatgctttcgactatcgcagtgaagaagctggtttcagtgtcgatattccagatgataacactattattgtcagtaaagatctgtttgcggcaggcagcaataagtctggcatgcatggtatagcagctataagtcagcaatctattgaaaaatatacgaaaacagcttttgctaccaataaatttgaaagtgatttaaagaagatagctgaagatattaaagctggaaaagatatcttagctgatcctgcttatgcttatcttactgtaccgcaaaatgagttacaagtatatatgcagaaacttatgcaggataatccacaatctttacctggtaataaaagctataaaataacaaagattaacaaaataccagcattagaaatcaacaatgatatgctgttgaattatgaaataaaattgccaattgcttatactcggaaagaacagcagaatatacaaaaatataatccttatgttaaattcagtgctgatggtaaacagatgacagcacagtacaatttaatttctaaaatttatattttgtcacaaaatgaccaattatataacataagcagtggatacgttgagtttcctgcaaaggaccaaagtgaaacagttgttgaagaaaataaagctgataaatttattcaaaagttcacggacaataaagttgataaacgtgcatataagaaattctctaaagcgtttacaaaaaaactgaatttctttaaaccacaattatctaattctgaacttataattaaagatggtatttttaacaaagagttcaaagtaccacataactggctttacattcaaagcaatcaaaaattggaaaatatgcctgtcagcttcttctctgcattacctgtcagtagtttggaaaagatggggaaggagtatatagattctaaattatttaatattgaaactaccaaaataggcattaatgtagaatctaataatattgatgactttgattttagtaaaattttgaaagcttattccgaaggtgttgtaggtatttcagcagaatataagccagctcgtcctaatgatcaaggaccaaagcggtttttagaaaatcctgtttttactaaaatgatgttcgaagaatttatgaataaaccgtttttgaatccacgtgaaaaagcaaaactagaaaagtttgttcagattaaaaattttacacatgatattgatatcaatcaagaaaactgcctgcttcaatttacttatgatgtagatttacatttgccacaaactttatctaaaatcaaccaacctggttatgatatttttcaagaaaccgatttgacggatttatctatatatgggcaaaagaaagtttactttgattcagataatcgaattaatctgttgtgttattttacacaagataaaacgatgaagtcaaatttgattcaaaaagaatacgatagctataatttattcaaaagttctttgttaaaagaaaaatattaaaaaatactttctaacacctggataataagtcttgaaatattatccaggtgtttttatctaaaaatacatcgtcataaatcgtttttaaggcaagtgaaaaataaattgaatagaagttataatacaatagattaaaacagcttaaaagagaaatttacgcatatatgtggatttatgttaaatatttacgttatagagtttaacggtatcaaaaatatcgttaatacttgccgacggctgtgttgcggtttatgatctttatgtaactgttttacataatatatattatcggacgtaaagtgaaaattggtaaatttcgttgtagatagttgttgaagaataatttcattaaacgaacaattgcaaacagatgttttgacattcttacctgttcctgatataatagaaacaattagaatagaaataaatgaacttactatctttagaaattttttgagtatatgatgattggaattggaggctggttttatggcaagaagagcacgtttcagcgattttgatggagttattacagaggaaatgctttccgatcggcaaagagctattttagatttcattcgtgagcacgtttatgctaagggatatcctcctgcagtacgtgaaattggtaaggcagtgggtttatcttcaagtgccagcgtacacactcatctgcataaattagaagaatatggttttttgcaaagagatccagccaaaccacgcgctatagaattgacccaagacagcagctggcgtcagaaaacggtcgttcctgttcctttggttggcaaagtcactgcagggcaacctattctggcagttgaaaatgttgaggagacctatcccattccactagatttgcttggctgtcaagaagatgtttttatgttatctgtttctggagatagtatgatcaaagctggtatacttgatcatgattacattgttgccagaaagcaaaattttgctaataacggagatatagttgttgctcttattgatggtgaagaaacaacagttaagcgttattttcgtgaattacgttcaattcgtctacaaccagaaaatgatgcctatactcccataacaggtactgataatattcaggttcttggtaaggtaatagcagtattcagaatgctgtaatgtctataatacaccaaataaatatcataaagacagctatatgatgtcatatagctgtctttattttctgagataattaaaaagcagataagaggaacaataaaaatcctcttgtctgcttttctattgatataaaatttgagtttttatttctcccctaccatttttgcagctgacataattgcaatacgcccgtgctcaaaagtaagtcctccttgaaaatatacattataaggttcacggcaagggccatcagcacttaattctattgatgcgccttgtacaaaagtccccgctgccataattatttcatcttgatagccaggaattattgcaggaactggaacaacatgtgcatcaactggtgaatttttttgtatggctatacaaaaattacataaacgctctttagtttccaaacgaatagtctgaattatatcactgcgtctatcatttgcagaaggagtaacctgataacccaggcgtgaaaatactgcagaagcaaaaattgctgttttaacagcttgcaaaactatatgcggagctaagaataagccctggtataattctctggccgtatctccaagtgtagcccccatttctccgcctaatcctggagcggttaatctatatgacgcaagttctactaaatcctttcggccaacaatataaccaccagtaggtgcaagaccgcctccaaggtttttgataagagaaccggccattagatcagctccaacttctgttggttcttgtttttcaataaattcaccataacagttgtcaacaaaacaaataatatcaggctttattgcttttactgctttacagatcgttcctatttcttcaattcttaacgttttacgcacactactgtaaccgcatgaacgttgaatatgtatcatttttgttttatccgtaattgcagctgtgattttttcaagatcaatttgtgaaccaatcatgggaatttctttatagactacgcctaagtcagtaagagagccaggggtttttacaggtatgcctatgatagtctgcattgtgtcatatggagctcctgtagcagcgattacttcatcgcctgctttcaaaactccgagtaacgcaacggctaatgcatgagtccctgaaacaaactgagatcgtaccaatgccgcttccgttttaaaaatatcagcatatatttcatctaatttttctctgccaacatcggaataggcatatccagtagttggttttaaataaaaatctgataccatatgctttctaaaagcttgcataaccttttctgtattatacaaagctgcttcttcatagctttcagcagcatgtaatacttctaataatgcttcctcttctatttttttaaaatcagtcatttacgtatagtcctcatattataaatttttcgaaatcctctaactgttctgatgccagacgtaccttcataaaagtaccgttttctttatattcttgttctaaaacagtacctatagtatgtagtttagcagctttttcagattctgtatatggaataagcagagtgacttctatagattttaatttcagattttctgaaatcagagcaaggagttcttcgataccaataccactcttagccgatatacaaacactattttcttgctgtgctaaacgctgtgccaaagcattttcagagggaagtttatctattttattgtaaacggtgagtattgttttattttgtgcacctatttgttctaaaaccttataaacagcatcactttgttcctgatataattcatggctcacgtcaatgacatgcagcaataaatctgcctcagcaacttcttctaaagtagatctgaatgctgcaactaattgatgaggcaaacgttgtataaaaccaacagtatcagtaagtattgcttcgtgcttgtctggtaatattaactgacgtgtagtaggatcaagagttgcaaacaattgatctttcgcataaatatcagactgtgttaataaatttagtaatgtagatttacctgcattagtataaccaacaagacttattgaaggaacttggtttttggcgcgcttaatcctatgtaaagtccggacagcgcgaactttttctatggagtctttgataaaagctatacgatcgcgaatacgccgtctatcaacttctaattttgtttcgccaggaccgcgggtaccaataccgccgcctaaacgtgataaaataagtcctttacccataattcgcggtagattatattgcagctgtgctaattctacttgtaattttccttcattagtacgagcccgctgggcaaaaatatccaaaattaaagctgttctatcaagaatacgaacacccattacctgttctatatttctttgctgcgccggtgtcagttcatcatcaaaaatgcacagatcaatattttcctgttgtgcatacaaggccagctcctgtacttttccttttcctataaaaaatgccggatccggtttagcacgacgttgaataaaacggttcactactacagcacctgctgtatccgcaagctgctttaactcttcaagcgaatcttcagcagtccaaccgccttttatctgtccccagtccataccaactaaaatggttttctctgctgctactgctaaactggaactacttgtttgcttgtctaaaatccgctctattgtattgattacattaagaaaattaatagcttctgcttcttccagagaaaaaggtccatattcatcgcagataaactgttcttctttgtcaagcccaactatcatgccaaaagaaattatggactgcgtgtaatcaggtgcggtaacacctattgtaaccatggcatcgaatttattattttttaacgctgaaaaatcaactccactcaacactggattaccatttggatgagtgtggacacaacggattccacttaatctgccaatacctctgcgaccttctactgctggcagttctacactgtcattaccaccgattacaatattagttatttgcccgcttctagaaatataaagagagatttctctgtttataaattctgtaatatcagctaattttaaagctaattccgcagaaatgagctgccctaaaggcacttgtacatcgtacaaagcaattaattcattcaaaacagaatcccgtattccttttttgttacctaaaatttcacgcatgatttacaccttaaagagcagacatggtattttaccatatctgctcttccttttcttacaattactgacgaacgcgtgccggctcgacatttattttatagcctttaatcgtgtttttgtgcattacacccaaaactttttcggccatatcttctgggacttctacaaaggtaaacttgtcataaatattgatcaaacctacttctttggcaggaatatcagcttcaatagcaatagttcgaactatatcctgaacagtaactttttggctgcgtccaatattcatgaaaagacgaaccatgccaggacgaccaccagtattacttaaatctttcgccagaatatcttcaggcgaagcttctaaagctttattaccttcctgcatcagttttaacgcagcagcaaccacatcttcagcatcatattcttttaataagcttgctgcaataggcatataatcatgatagttagactgatccagcacactctgcattttggaaacgatcatttcacgctgacgctcaataacattggctgtagtcggcaattgacgacgtgttattttggttttagtagtgcgttcgataagtttcaactgacggaattcacgcggcgtaataaaggtcatagcaacaccagtattacctgcacggccggtacgtccaatacgatgaacatagctttccggatcctgaggaatatcaaaattgataacatgagtaatattatcaatatctatgccgcgggcagcgacgtccgtagcgataagaatatcagctgttccgtcacggaatttcttcataacacgatcacgttgagtttggcttaaatcgccatgtaaaccttcagccatataaccgcggcttcccaatgcaatagccagatcatcaacaccttttttagtgcggcagaaaataatcagcttaccatctatttctgcatcaagcaaacgacataaaccttcgatcttatccttagtttcaaaataatattgatcgataagcggaactgtgagttcctctttgctgatcgtaacatttttaggagccttcatatatttttttgtgaggcttaggatcggtcttggcatagttgctgaaaacaacaaggtttgacgttctgcaggaagatttttcataatttcttccatatcgtctacaaagcccatatccaacatttcatcagcttcatccaggactaaaaatttaatatgatcaagtttgatagttttacggtttatatgatcaatcaaacggcctggagtaccaataactatttgcacgccgctgcgtaaagctctgatctgacggtcgataggctgtccgccataaacaggtaatgctttaattttagaagtacgtccaattttaccgatctcttctgcaacctggattgccagttcacgggttggagtcataatcagagcttgaatatggcgatgatcggtaatactttgtacgaccggaataccaaaggcggctgttttaccagtaccagtttgtgcctgacctataacatcgctaccctctagtactaaaggaatagtttgctcctggatcggagacggttcttcaaaacccatagctgttaaagatgctacgatttttttatccagcagtaagctgccgaacatttcttgtacattagttgtcattgtttaaatttcctcatttcttcttgcttttattttatctatcaccatagaaatagccgttaacgcactacgcagtttattttcagttctggttccgccgaaaagatgtttcacacaatgtacgtcattgccatcagctacagccatataaactaagcctacaggtttttcttctgtggcaccaccaggacctgcaataccagtgatacctacaccataagttgttccaaaaagatctctcactccggacgccatctcacaggcaacctgttcgctgacagcgccgtatttttctaaattttccgcagatacgttgaccagtttttgtttggccatattgctgtaagtcacaacactgcccaaaagatattcactgctgccaggaatatcagtgatcatgctgctggctaaacctcctgtacaggattccgcaaaggcaatcgtactaccgctttttaatagttcctgaccaagatattctgctaaagaagcatcatcaacgccataaataaatttacttaaccgttcatagatttgtgcttctgtaccggaaatcaaggctttggcttcttcaacatcggacgctttagctgtaatacgaacaataatttcaccgcggcgagcataaatggcaatggtaggattactttgtgaagtgataatatcatcaagctgcgctgcaacagatgattctccaatgccacgcatttttaaaatacgcgaatagattataccttgttgagcataacgctgcataagtaacggtaaaaagcgctgttcacatacgtaatttaattctgacggaggtccaggcagcaaaacaatcagcttgccattatgttctaataccaaacccggcgcagttccaacttcgttgattaaaatttctgcacctaaaggaaccattgcctgtttatcattattagatgacatacaaagaccttttttaacaaaaaaactattaatcctatcccatgtatctaaatccagatacatttccagtcccagcatatcagcaataacttctttagtgatatcgcctcttgtagggccaagaccacctgtagtaataacgatatccgctctctctaaagcaatttctaaaacgcttctaagcctggtctcattatcgccaacagtcgtctgataaagcacatcatagcctagtttatttaattgtcgtgataagtactgaaaattagtattaagtatttctcccaacagcagctcagtaccagtatttacaacttcaacgatcatttgttttgcccccttgctggcaaattaaattctctctcctaccatttcgtaggtgaaaccctgtaaaatttttactttaataaactcacctgcttgaacatttcctgcgttttcgacaaaaatactgccatcaatattaggagcttctttatatgaacgaccaaaaacaagatcagggttttcctcatcgcaaccttcaacaagtacttctaaaatcatatcttccatattatgatgcatatcttctgatatctgtgcctgtaaagacattaattcatgaaaacgttcttccttgatttgcgtatctatctgttctggcaaatcagctgctacagttccttcttcttgggaataagagaacacaccggcattgtcgaaacgctgtgcttcaacaaaagcttttaattcttggaaatcagcttctgtttctccaggaaaaccgacaataaatgtagttctgatagtaatgcctggtatacgctgccgtaatttgtttagcaatgcctcaacttctgatttagtatcatagcgattcatgctgctgagcaatctatcgctggcatgctgaagcggaagatccacatatttgcaaaccttatccaagctggcgaaagcttcaatcaaatcgtcagtaaaattatttggataacaatacatgacccggatccatttaaggccttccagtttattaagttcagacaagagctccggcaggcgcagtttaccgtaaagatcttcaccgtatctggttgtatcctgtgcaacaactatcagctctttaacacccttatcaactaatgctttggcttcgccaagcacttgttcaaacggtttgctgacataaggtccacgtaatttggggatgatacagtaagagcagcaattatcacagccttcggcaatttttaaatatgccatataatcaggagttgttaaaatacgcggtgccgggattggcgccagttctgcttttttcagagactccagcataatgaaccgctctccatgagtgaccctttggataacataagcaatatcttcatagcattcagtacctataacggcatctgcttcaggaatattttctaaaagttcttctgcataacgctgccctaagcagccggtaataatcaaatatttacaggtccctgttgttttatactcccccatttgtaaaatagtattaatagattcttctttggcagattctataaaaccacaggtatttataataatcaaatctgcttctgcaggatcgttagtaattgttatctgctgttcatggatcaatcccaacattgtttcagaatcaacgagattcttaggacagccgagacttactaagcctattttcacgtttgttcctccatctattttactgcaaatctagccgactgcagccatttatttgttaaaatctcctgttgtaccagagtattataagcagtattaagccataatttttcaggctgctcaatatgattaccatttaaaccattggatagtaaaaacatataacctgtattttgctccaacgcaactttctgcggtgccgatgacattaaaagccagtctctgaacatttgtgcatcctcatattttttagaagcagcatcaacggctaccccatataagcttacaggagtcccttcactgggaaagacgatatatgcaggaaaatcattttccaaatatttgaatacgtagctgcgccgagtaatagccaagtctgcatcaccaacagtggtcaggcgaattggtgtgaaaggaaagcgggaatattgaggaatttgtctgttaagacctctgaaatatgccaggcttttttcctcgcctcgaacacttgcaaaagcagctaaaaagttacgcgtatttgccgaatcggaaagattttccatagccacacgcacattttgaagcttaatgatatcctgccaactcaaaatattttcctgaccgtattttctggcataactttgattaaccaaaaaaactacagggtcataaaagacaccgaaccattgactttgttcatctttaaaaacagacggtaataaatctccagcctcacttaaaatggcatacaaacgctgctgtttacttaaaagctgcagctcattatgctctaagagatacaaatcaggtaattttccctgttctctttcttccggcagtaatagttttatcacagcattccgatcagggtcattattatactcgctgattaaagcctgtagaaaactgttatctaaattagaatataataacaattcagtttttccatgcaccgctatacttgtttcatttttgtcagaatcaaaaataaaccaggctatacatgcaaacatcagagcaatgattaacagtatttttttttgaggcatctttaacctcctgttttatcgccgtttgttcattttatggttaaatgcaattttgctgtgtcgtgctttgggattatgggaagaagatattttcagtaaacatttctcatcatcaccaataaggttaccacgattagtctgctgtaaagcttctttaaccaactgacggtttttaggatttttatattgcatcagagcacgctgcatcgctttatcatgaggattacgggcaacaaaaacctttttgccagtttcaggattgataccggaataatacattgctgtcgatgcgcttcctggagttggaataaaatcctgcacctgttcaggctgatgtccgatatccctcaaaaattcacttaactcaactgcatcacgcagagtacagccgggatgactggagataaagtaaggtactaaaaactgtttgaggcctatttcttgatttttcttattaaaagcacgcataaactttagataaacagatttaccaggcttgcccatattagataaggcatgttctgctacatgctctggagcaacttttaattgcccgctgacatggtaacgacataattcatctaagaaacgatcatttttgtctgctaacaaataatcgtaacggataccggaacgaacgaatactttctttattccagaaagcgcacgaactttttgcagcagtgctatataatcgctgtggtcagcatcaagattaggacagggtttgggaaacagacactgcctgtcgcgacaaactcctacttttaattgcttggcacaggaaggatgtctgaaattggcagtcggaccgccaacatcatgtatataccccttaaaatttggcaattcagtgattttttttgcttcccgaacgatagattcatggctgcgtgtctgaatgattcttccctgatgggaatgaatagcacagaaagagcaactcccaaagcaaccacggcagctgataacactaaactgtacctcctctattgcaggcactcctccgtatttttcataagcaggatgataagtacgcatataatccaaatcataaatagcatccatttcttcctgtgacaaaggaaatggtacttgattttgaacaacaaattttttgccgttcttttggacaacaatcttcccagaaaatggatcaagttctttactttgcagattataagctttagcaaacgcttccctgtcttttaatatatcttctaatgaaggtaattcaataaattcatctaacgcttgcaaatcatctgctaaataagctgtaccccgtacataatggatatcttcgatagtagctccgccagctaaatagtcagcaatttcaacgatctgcttttcacccataccatatatcaaaaggtcggcattgctttcgactaagatggaaggcaaaattttattttcccaataatcaaaatgcgcaaatctgcgcaaactggcttcaatgcctccgataataaccggcatttccggccataagcgttttatttgctgcgagtaaactacagtagcatgatcagggcgcttccccatctctccgccaggtgtatatgcatctttttttcttggttttttagccgcagtatagtggcaaagcatcgaatcaagatttccacctgaaataagcactgccagacgaggcttgcccagcacctcaaaatttttcagcttgcgccaatctggctgacacaacagtgcgactttataaccctgcgcttctaatacacgacaaataacagccggtccaaaagaaggatgatcaacataggcatcgccgctgataaacaaaaaatctatttgttcccaaccacgggcattgatatcttcctgggaaatcggcaaaaattctttcattaggatttatggcctccgatattatttcttatattctttaatgacaactccatcaacgttttcagctggagcaggctttccgttaacagcaatctgcattgccttgatgttgccatattttacaataatttttttgtcagcagagaaatttttttcctgattgcttactaaagttccttcaaaaactttttctccatctacagtaacttctacccagcatctgtcattacaaaacatatagagatttagattgtttttatcaggaacagcttgcttctgctgtacttgcttattgtcagcaggcgctttctgtgttttagcagcagccgcttgttcagcgcgttctttggctttttttgcatctgcttctatttttgctttttcctgctcaggtatttcattgcttttggcagtatcatcacttaaagctgattgttttggtgtcacaatattttccggctgatcactgctgctgaataagaaaatataaccggcagcagcaattataactaacaacacaaatgacagcagataagtaaaaatattcgaagaatttttttgcggttttagatgaggagcaacgcttattttagaagttgtacggatttcagcaggttttatttcttctggatcaacacctgcacaagcagctttgtaaagcgtaactaattctggaccgttgagccccagataattaccataggtgcgtattattcctttagtaaaaacatcacctggaattttagcgtagtcacctgtttcaatagccgctagatagatttttcggatactggtagcttcttctacctgctctaaagaaagtcctttatcaagtctggtattttttagaatttctcctatattatccataagcttaccctcctctatcatactttattgcgctgtaaaaaaacgttcttctatttcatgacgcgacataattaattcgcggggtttgctgccaacagactgacctacgataccaagttcttccatacaatcaactaagcgtgcagcacgcgtataaccaattctaaatttacgctgcagcattgaagaagatgcctgaccagtatccatgactaaacggactgcatcttcaaaaagttcgtcactcatcagatcgttgccattttcagatgctgcgttagaacctttagtatcactttctaacacctgctgagtaacttcttctgaatattcgactggtatggattgcttcttgataaaatcaacaatcttatttaattctccatcactcacaaaagcaccttgtacacgtacaggtttatttgtaccgataggataaaaaagcatatcgcctttgcccaatagcttttcagcaccgcccatatccaaaatagtacgggaatcggtctgtgaagaaacagcaaaagcaatacgtgaaggaatgtttgcttttacaattcctgtgataacatcaacagacggacgctgagttgccaaaataagatggataccagctgcgcgggctttttgagccaaacgcagaatagcatcttctacatctactttagccaccatcatcaaatctgctaattcgtcaataataattacgataaagggcattttttccgcggcctgtgcattatagctattgatttcccgcacatgattatcagcaaaagccttgtaacggcgttccatctcggcaacagcccaatgtaaagctgaagcagcttttttggaatcagtaacaacaggagtcagtaaatgcggaataccattataattagaaagttcaacaaccttagggtcaactaaaatcattttgacttcttcaggacgggctttgtataaaataccggcaataatcgtgttgatacatacagatttaccggaaccggtagaaccggcaacaagcatatgaggcattttagaaaggtctaccgtaataatattaccactgatatccttgccaaggcctacacaaagttttgactctgttttacgaactaaatcgcagtcgactacctccctgaaaaataccggatcattttttcggttcgggacttcaataccgatggcagctttgcctggtatcggcgcctcaatgcgaacacctgaggcggcaagtttgagcgctatatcgtctgctaagtttactactgaacttactttaacgccaggagcaggttccagttcaaatctggtgacggaaggaccgcgtgtaacagcgacgacgctggcgcgaacacggaaatcttcaagtgtctgttctaaaatagcacattgttctctgatatcctcttcggtatgcttatctttggaaacatacggaggattaagtaactccaaaggtggaaacaagtatgtacttgcttctgctgccggcagagtttctgtttttactttttcactgacagcctttttaggagccgggctggcagcagaaatatttttatcagcagtatcaatgatctttatatcgccaggattctgatttttgtaaggattaagaaaatcatgctctggcatttgtactgctgtttcctttggtttattaaaatctataatcggccttgtaataatatgaggctcatttttctcagcaacaggaaattcttcgataaatggctgttcatcatccaaaaacgcttcttcatcttcagctttactttcatttttgccaacagcttttcgaatgatctgtttaaactggctttcttttttgattcctgaagtaaagcctgcaaaatcatcactgttgtaaggattaacagtgttcaaaacttccatattcttaaaatcagaagtttcagcagtagtttcattatctgaattttgataagttacaatatttttagcttttctaccagctgtttctgccgaagcctttaaagacaatttccccgttaataaaacgctgcagatgatacctgcaatcaaaattatcaatgctccagctgttcctgacagacgtcttaatgctaaaagaaaagttccgcccaatagaccgccaccttctttaagctgttcaggaaccagttcttcccctacaggtacaaaaacatgatgagctgtgcctaaaaggcacagcatcaataatgttagggctaatcctttttttgaaaaaccaattcccttgtgggaaaaagaaaatctaataccaagaactatgcatgcgagcggaaacaaaaatgcccctttacctaaagtatagttcataactttatctataaaagcacctattgttcctgtaggaagcccaaaataagctgctgctgcaaaacatcctaacgcaagcaaaagaacgccgcttatttccaaacgactgttattctgttgttccgtacgttctgctttggttcttctcaaattaggcacctcatttacaacattagatctccattataataggcaaaatcatcggtcttctgcgtgttttttcgtataaaaatctgccaagtgaatcgcggacagcagattttataacagaccattcagaaacattgctctgttcgcatttatcaagagcctgctgaactttctctttagcagtttccatcaagccctctgcttcacgcacataaacaaagccgcgagaaactatatccggaccggaaactacagtgcaggtatccttatcgatagtaacgacaactatcatgataccatcctgggacagctgtctgcggtcacgcagaacgatattgccaacatcacctacgccgagtccgtctacaagtacttttccggaaggaacgcggccattgataccaatactattgcgtgtcaattcaatgatcgaaccgttttcgcctacgacgatattctcgcgcggcatacccagactgcctgcaagctgtgcatgcttgatcaaatgcctgtattcgccatgcacaggaatgaaaaatttaggacgcaccagattgtgcatcattttgatttcttcctgactggcatgacctgaaacgtgtacaccattgcttttttcataaataacatcggcaccaagtttatacaagtggtctattgttctggaaaccagcttttcattgcctggaataggtgttgcggaaataataacagtgtctccgggaacaatatcaacttttttatgatcggacatagccattcttgttaaagcagacataggctctccctggctgccggtagtaatgataactatcttatcaggagtatagttgttgctctcatcaatgtcgatcagtacgccttcaggtatttttaaataccctaattccatggaaatatttactacatttaccatgctgcgcccgataactgctactttacgtttataacgaacagcgctgtcaactacctgctggatgcgatgtacgtttgacgagaaggtagcgacaataatacggtttttggcataacggaattcatcatcaaaagtctgcccgactattttttcactttgcgtataaccggggcgttcggcattggtactgtcagccattaaagccagtacaccctgatcaccgaactctgcgaatttattaaattcagttacctgtccatctacaggagtctggtcaaatttgaaatcaccggtatgaatgataataccaataggagtatggatcgccaatgcaactgcatctggaatactatggttgacacgtataaattccactttgaaatttcctgcgtgaattttatctccaggtttgataattttgcatgcttcagagctgaccccgttttctttcaatcttccctgaagaatacctaaagtcaaagcagttccgtaaacaggagcgccgatctgtttcataacatacggcaaagcacctatatgatcttcgtgcccatgagtcaggaagatagctttaaccttgtctttgttctccactaaataagtaatatcaggaataacaagatcgattcccaacatatcatcttcagggaacatcaagccggcatcaacgagaattatatcgtcgccataacggaataccgtcatgttcttaccgatctcccccaatccgcccaagggaataatatttaatttactttgtattttactcaaaaaaaatacacctccaaaatttttttaatttatttccgtacaagtatttagacctctagtaataaaatctattaaccgcacacctactctacggtatattatacattaaataatgcagaaaaacaaatgtttaatcaattatcaataaatttttattgtaaagattcagtgaactgaacataaaaaaacaagcataccttaaaaggtatgcttgtttgaagctcttacagatcctcaccatggttttcgataggacctttatttttattcatgcgctgccagaagaaagcaactgcaagaattgctacgccaatagcatcagtaacagcgccaggaataatcatatttaagccgccaacaaagaacagcagtctttgcaaaaagctgagcttggactgacagaacccaatcatggcgacagatacgccccacatgccgataatcgccgttgcacaggcaaaagtgattgtaaatggagttgcatcaatcataagcagttcaggtgccaaaacaaaaatatacggaacgataaaagccgctattgccaattttgctgctgcaaaacctgtcttcattggatcggcaccggagataccggcaccagcataagcagccaaagcaaccggaggagttacgtccgcaacgataccaaagtagaaggcaaacatatgcgctgccaaaacaggaacatccatctgcaccaaagcaggagcagcaattgtagatgtaataacatagttagcagtagtcggaacgcccataccaaggatcaaagacgtgatcattgtaaagaacattgccggcaataagtgtccacctgcaagatcaagcagtgccgtagccaatttaaggccaacgcctgttttggttacaacaccgataatgactccggctgtagcacaggcaatcaaaacaccgagaacacctttagagccttcgatcaagcctttgactacatcaccaaagctgatacgtgtagattttctgaggcaggaacagatcagagtaagaccaatcgcccacaaagcagcacgcatcggcgtataaccggataccaacaagtaaacgatgatcgccagcggtaaaatcaaatggcctttttccataaacagtttaccaaacttaggtaattgatcacgcggcgtccctttaagcccaaactttttagcttcataatgtacgcctatccaaacaccaatgtaatataacagcgccggaatgacggcagctttaacaacttcgatataagggacgccgacaaattcagccatcaagaatgcagccgctcccataacaggaggcatcagctgtccgccagtagaagcagcagcttctaccgcgcctgcaaaagcaggacgataacctaatttcttcatcatcggaatcgtaaaggcgcctgtaccggctacgttagcaacagagctgcctgatactgtgcccatcaacccagatgataatacggcaaccttggcaggtccgcctgcggcccagccggcaacagcgttagccaggtcgataaacaacttgcccaaacccgtagcttccaaataggaaccaaataagataaagagataaataaatgttgaagatacgccaagtggagtaccaaaaataccttctgtggtaaagaaaagatgatcgaacatctcctgcacaccaactccgcgatgtgccagaatccccggcatatacgggccggcaaaagcataaaacataaaaaacagtgcaactgtaagcatcggccagccgacaacacggcgagctgcttcaaacagaagcaatgtaccgataaaagcaatactgaaatcaaattcagtattcataccggctcttaaaacaagttcatcgtaaaaaattacgatataaagtgcactggcaacacttagaacagcgaaaataacatcaagcggatgcattacagatctggaccagtttttcctgccaggatacagcagataaatcaaagaaaatccaaatgccaaatggattgctctctgtaagtgtgcatcaagtacaccgaaagttgcggtatacaattgaaaaacggcgaaggcaatacagataaaagaaattaatttgtcccacattcccgttaaattacgtttgtcagactctttgtcaaatttttgcaggacttcttctgctgacatagttgttttatcttgttcactcattctgccctctcctccccttttgcaaaatttaatttaaccaatattgataacgtttttctgccttgatttcaaccaaggttccttgtccatatagatcgcaaagatcatagactttatttttatgtataatacgaggctttgcttgtacggcagttcttaattttacagtcttataaggccgatccatttttaagataaacttaccgtcaggagtattagtcaaaattccttctgcaggtgaatatggcagtcctactcccagtgattgataccgagtatgtgtcataaccatatcatctgcaccgtcaactctaaaaaattcttccaccgttgtcagctggaccgaatgggtaaatgcaatattccattcttctcctctttttgcagtaaaacattgttttggcaatccatcttcgggattaatagaaactactaattggttggcataccaaaacaatattcccaaaccaactaatacagtaactgatatcagaatcatttttttagaaaaagaccgattaccggaagttcccggcaaccggtctctcaggttcatcatataaaatatttaactcttatttttctttcaagtatttttctgcgcccggattaacaggaacagacataccgtccaatgcggttgctttagaaactgcattagctacagaatgagctgctttcaaacgatcgagattgctgaaaatagctttggtgatagcatagccggtatcagcatccattttatcagttactgccaacatagcacgaactgcgattgcctgaacgtcggcttcttgattcgggtaagttttggctgcaatagtaagtttggtatagaaaggatattttgcaatcaaagcgtcagctttatcgctgtcaaccggcagtaaaactacatggttttgagtcgcgatatcctgaatagctgcggtcggatggcctgcagttacgaatgcaacgtcaacattgccgtcttttaatgcattggaagcttctgcgaaagagaggtattgaactttaatatcatcataagtgataccataagcttcgagtatctggcgggcattagcttcagtaccggaacctgcggcacctactgcaacgcgtttgcctttaacatcattaagagatttaataccgcttttatccaaagtcacgatttgtatcgtttcgggatacaaagtcgccaagccctggatactggggacttttttatctttgaacatttctgaaccgttaacagcataataagcgatgtcattttgtacaaaagcgatatcgactttatcctgctgcaacaagttgatatttgctacagatgcaccggtggattgtgctgaagcattagcgccgggaacatttttattcaaaatgtcagcgatagcgcctcccaatgggaaatatgtaccagctgtaccgccagtagcaatattaatgaatttttgcgcagccggttttttctcgtcctttttgtcagaaccaccgccgcagccggctgccatagtagcaaagaccatgatcgccatcagaaaagctaaaagttttttcataggatcccctcctcatttttgagtgtacacagttgtatcatgaaaaataaaagctcatttttcaaatgactatgccactttacttacttagtttaattcgataaatttctataaaatcctgcaagttagaagaagctctatattgtatacaatatactttatctgtttttcttaaatttttgccgctttgctaaaattaaaagaatatggtatcatatatatcgttatcaaatattcagagggcaataaattcccttgccaataagagaaaaggatgtgtgttttatgagttccggagcttatactctcaaactttcacgtacgctttacaacgatactttccgtgcccagctgcttgacgaaaatcagcaggtaatcggccatcttcgtatcgttccaggtgtcccgcttgaccgcagcctggtcccggaagacgcgcccagcgttccggcttatcttttggtcattgtcgatgacgccgatatcaacaaggataatctgatcgattttgaagaacgtgccagttatgctttactaaaacgtttttcaacagaagcaatcagtttccagcattgccaattctattatccttcacctgctttcatttttgaacaggcagatgcacttactaatcctgttatgtgaaaaaatcccttcaacatttttgttgaagggatttttttatacatttttgttattttattatcttcagataaatttgtcactgccttcggcgctttccccgtttttaaagctgcggtatttgtcataaattatccgcatagccgttgcaacggcttttttagcactgccctgatattgacgttctaaaatattctgcagctcttcgtgcccattggaaagattgtaaccaataaggcactgcgcaatatattgccgtgccagttcagtcgccagtgtgcagtctgcctttacgataagtccgctcttcatatctacaaccacaatcacgcctattaccttatacatttccgcagctgtaattcctaccggtaattttgcataccccgaaaaaagtactctttcattactttgttcgtttaacataaaaatcctcctgtttttttaccgacaagctgcggacggaaacattgattgttttgacctgcattgccgtcatatattctactttttcttttattttgtgttgtaacaattttgttacttcaaaaatcttaacgccgtaatacaatacgacatcgacataaatgctgatgcctttcgtttcggcacgcctgcgcactttgatgcctgttactttatcaatgcccatcattttttcggcgatgagattgataatgtcataaatagcgtaatcggaaatcaacagcttgccatagtagctgaacgccggtctgacgatcgaacggtcttccccgcttttcttcctttgcttggaaaataaattatatggtaaatcagcaaaataacctgtaaaatgcggcttcaactcgacagtcggtaccggaacaatatgcttgccgtcgcgcagccgggcctgtttcgcctttttgatctcctgcttggacgcgatttgctgaatataaacggtcttttcaggctcaggtaactccaaacgcttaactattttctctatcatattgtcggaagttgccaaaatcagaagccgccggacgtcattacctgccaaagcctgacgcactgcttctgcatgatcttcttcagtaaaaatagcgcgcttgaccgcctgtattctattcgtttcatttttagcagaagttccggctaatattttggttcctttgataagtaatccgtcatcaataatagcatcacaattatttttatgggcaatacctattgctcgatgacttttaccagtaccgctgggacctacaaaagctactactttcataaaggcctccgcaaatccgacttaaatttattgtttatattctatcacatttttgacatttgtatataaaacttcaaaaattcctaattgctcaggaaaacgcccgctcactccgtgaaaatctgaaccgccagaaaccagcaaatcaaaattctgcgccagctccagccagtatttctgctcatttatatctgcggaaggatgatagacttcgataccgtcaaattttacattcttcatcaaacagttcaccagcggcttatcctccaactcacttggatgcgcgagcaccgccaggcctcctgcctggtgcagcagctctacggcctcctccggcgataatttaggctgcggttcataaccgggcctgcctctctttaaaagcacgtcaaaggcttcctgcaccgtagcaaaataccctttggcaactaaagctttagccacatggggacgtccgactgctctgttgtcaggatcacattcggccacctcgacataatagcccagagcagctattttcttaagaatcttctgcagcctgagttcgcgcgcatggcgcatttcatgcattttcgtcagcaaacgctcattactgatatcaatatgatatcctaaaatatgtacgctggcttcaccggcctgagtaccaagctctacgcctctgatgatgcggggagcgttttttatatttacagcagcggcttctgcctgaacaatgccatttacagaatcatgatcagtcaaagccagtacgcctattttagcagcagctgccgcttctaccagctttgccggagtataagttccatctgaacttgtgctatgagtatgcagatctactaacattttacatttcctgcgccagcttaatcaaagtgctgacgccaaatccggtaccacccttaactttaaaacccgcagttttagcagcggtagaagtaccgccgatatcaatatgggcccagggtatccctgcttcgacaaattcaccgataaacaatccgccgctgatacagctggcttcacgtccggcactgttgagcaggtcggcaacatcacttttcaacgcttccttacattccggcagcgcaggcagctgccagtagctttcgcctgcttttttaccagcttcgataatctgtctgatcaaaacatcatcgttgccgacaacaccagctgtttctgtccccaaagcaacaataacgccgccagtcagcgttgctatatcaactaccttggctgcgccctgcttgcaggcgtaccagaccgaatccgccaagaccatacgtccttcggcatctgttgaaataacctcgatcgttttaccgttagctgcttttacaacatctccgggacgctgagcgctgccggaaggcatattttcagcacaggcaatgatccccatcacattgcagggtattttcagtgcggcaatagcccttaacgcgcctaaaactgcaccagcaccagccatatcgtctttcatctcacccatattgtcactgggcttgatcgaaatacctccgctgtcaaaagtaatacccttaccgacataagcagtataaggcgcagcacctgctccattatatttgattgtaaccagacacggaggatggatagagccctgccctacagccagtaaagcatgcatgcccatcgcttccatcattgttacgtctaaaatttcaaattccatatcatattccagagccaatgcttctgcttcttcagccataacgcttggagtcactaaattgccgggccggttgaccagatcgcgtgtataacaaaccgcatctgccacaacctcagcttctgcaagcacccgttcagcatcaggaataccggaaataatagaaaaatcaagttccggtttagcttcaggtttacccttacattccgtaaattgataccctcccaaaaccagcccctctgccaaagcagctaagtaatggacccttgccggattagaaagaatcggtgccacaacagcagtctgctttattttggcagcaattagagccctggcagcactgcctgcagctttacgtagattgttcggcttgcattcatcacctttgccaaagccggcaacaataactctctgcaaccttccatcctgcgctataacaagatcagtcaagcttcctgctgctgtcaaatcttcatttttttcagccagcccattgacagcctgcactatattagctggaatattcatttttgttaagtacggcagacattccctgcacaaaaacaaggtaacagactccgcattaactatactttcttcttcaaaaccatctatcactgattttactaactcttttgctgtttcctgatctaaatccataatactgctcctttatacttttttatttttatctgaaagttacacaggtagtcaactcatccaaataggtgttgccatttgatttctgcagattcaaatcactgacaacgaccttcattacactatgacgcgtaccgcccgtataatggctgcccagagaatgaatagcatagggaatctcgttggaggaaccgagatacaacatcacgtgtccgtccatatgcagtgtagaaccaggagttaaaccttttatgacattggcacgctgagcactgctcatattgcccatttttttatgaataccagcgcttgtttcctgctcgtcagcattgcgcggcagaaaaatacctactgtacggtaagcattactgataaaactggaacaatcgacgctttgctgcagtccgccccaaccatatacagaatcgtaaaatttaaaagcgctgcggataatattattagtcgtataaggcagataaccttcgtgcagcgaagcattggcagccaaaactaccttctcttcctgcagcttgccctctttagtcctgacaggaaccttcaccgtataagcagatgcttttttatcagccagctgcaaacgagcgccctgctgaaataaaacctgagctccgtccgcctttaatgtgtaatccttagcaactacggtcagaaaattcttaggctccgcataacgcaaccagatactgcggtcagtttcggcaacatcaaatttagacagccagccacggtaattatacgcttgcacataataaaaataaccgttagtactggtatgcaaaatagcgacagcctcgcccggatccaaagcggtttcctgcaaagcatcaaaattacggtcaccggcataaaaaaacaaaccttcacctgtcggcagattacgcagattagcacgccttacagtaacgccataacgcacagtgacctcagccggtattgccgccgcattagtttgcgaacgcagaatatttttataattatcactgacgagcttaccttcccggtacagttcatcactcaaatctgtatgcgtattgacataagttgctaccgttttaccgctcagggttttaggataagcggccatatcataaactgtcggcgatgcggcaatgatctttttattgaaagcctctacgcccgccgcatttagcactactttatcaccgtcggcattatgttccgtccagtaggccgggctgataaatttttcataagcagtaatacctgctgcctccacaggtcctttaggcatcagcaatatcatcagcatcatacacaaaaataaaatttttttaatcacaaaaaactacctcctaaaccaatcttcacaaatattattgccgacaagaccggtatatttgccggcattctccgcggcctcagcctgtttgctgaatctgacagctttaagcgtcttatttaattcgataattattaaattctgtaccgagggtaaaaatcctgccccaaacacagaaaaactaccgtagttttataataaaactacggtagcagcaagcattaaaaagcttcgtaaatgccgtcctgacgttttttctctgcagttttggaaatatacgaaccaaaaataacagggtaacctttacgttctacgattgtcttgatgtagtctctatgtggacaaggcggacggtgataattgtctgatacgacgcacgatgctaaatgtaccacaacatccctgcgatcatcaccccagcgtttaagtttacggttcaaatcttcgatttttccggctacaccagcaccacagcagccgccgcaggtaatcgtcatatatttggtatcggcatcataaccggtaaatctgccgctgcgctcataaaacgatttcatgcaggcataaccaacgcattttttctgcacgatgtcacactgaattatcactactaatttcgccattattttacaaggccgtattcttggagaacggcgaccatttttgctttatttgccggttccatcggggtcagcggcagacgcggctgacctgcatcaatgccagtaacgagcgttaccgcagcttttaccgggataggattggtttcgataaacatagcgtttgccaacggcaccattctggcattcaattttgcagcttcgcgtacgcggccgtcttcataagcctgcataacgtcctgcaagataccgccgccaatattgctgagcacagaaataagcccggtcgcgccgacagacataaacggaagaatcagtccgtcgtcaccgctgtagatcgtaaactcttccggcagaaccgaataaagctcggcaacctgagcaacattgcctgcagcttctttgatcgcaacaatattctcaaaatcagcagccagacgtgctactattgccggagagatattggaagctgtacgtcccggaacattataaacaatgataggcaatcctgtactttgcgctacagctgcaaaatgctggtaaaacccttcctgtgtcggcttgttgtaatacggaccaactatcaaagcgccatcgacacccattgcctcggccattttcgtcattttgacagaatcagtagtgttattagaacctgtaccagcaataacaggcacgcgtttattgatacgattaacaactacgcggaacaattccagtttttcctccgcactcatagtagcagcctcgccggtagagcctgctacgaccaagccgtcagagccattattgataagccattcagccagatcagccgccttttcataattgacgctgccatcagcattaaaaggagtgaccatagcggtcaaaagtctgccaaaataaggatttttcattacttacacctcgcttataatttaaacgctttatgaagcgccttcacagcatcgatcagatgttcctgtttgattatcgcggagatagtcgtatcagaatccacagtctgcaggatgcttattttgcagccggtaagcgctgcaacaaaattagccataacaccgggtacgccgcgcatcgccgaaccgacaaccgaaaccttggcacaatcctcggttaaagtatattcaaaatctgtaccatttaaaactttatttgtatgttccacatcatcggcaaaaaccgcaaacatagcattgctctcggataaattcaaacagccgacgctgataccggcatcagccagatcctcaaacagcttgcggccgctggcgatatcctcaggattgagcgcaacccggaactgagccagatcggtcagatgagttacaccgctggccagcctgcgctcattgatagaagtatcctcttccgtttctgcacaatcatttgtaatgagtgtgccgggagcatcgctgaacgtagattttacgatcagcggtatatttttcttcattgcgatctctactgcgcgcggatggataacctttgcgccctgatgcgccatttgacaaacttcgccgtaggagatctgcttcaatatcgaagcctcttttaccaaacgcggatccgctgtcataatgccttcgacatcagtataaatctcgacacattcagcatgcaaagcggcgcctattgcagcagccgtagtatcactgccgccgcggcccaaagtagtaaacttgccgttattttccgtcatgccctgaaacccgcagacaataggaataacgcctgattccaataaatgatgcaaattgctgacattgatatttttgatccgtgccgcaccaaactgagaatccgtaataatcccggcctgaccgcccgtaagcgccatagcattgatcccgaatttctgcagcgtcgctgccataacgcaggctgccatgatctcgccgcagcacatcatcatatccagttcgcgcacgttgactgaaagattcgtttccttcagtaccttgatcagggtatcggtagcgtaaggttctcctttgcgtcccatcgcagaaacaactacaaccggagcaaaaccgctgcgtacggctttctgcaccttatccttaacagcgatgcgcgcttcctgtgaagcaacggaagtaccgccgaacttttgcactaaaattttcatgaactgtgtcgctctcctatcttagatccagccgtttttgatcatcgtttcggcgatctgtaaagtattcagcgcagcgcctttacggatctgatcgccgacgacccacatattataagacttctcacatgattcgtccctgcgcagacgtcctacataaacatcgtctttttcggaagtatataacggcatcggatattcctgcttagaaggatcatcctgaacagtaacgcccgggaattttgccagcgcttcgcgcatagccccaagatcgacttctttttccagctcgatatttacagactcggaatgactgcggtaaacaggtacgcggatcgtagtagcagtgatccgcatttcataatcctccataatttttttcgtttcattgaccatcttcatttcttccttagtataaagattatcgcagaaaacatctatttgaggaatcagattaaaagcaataggataatgcttctcagcgctggcggaaggaaggatattcgcagtcatttccctgccctcactatgctccctcacctgagcgtcaagctcgtcgataccttctttgccggcaccggaaacagcctgataagtagacacgatgacacgctttatttttgctaggtcataaataggttttaaagccataaccataataatagtagaacagtttgggttggcgataatacctttatgcttcaaaatagcctgcggattgacctccggcactaccaacggtacctcagggtccatacgaaaagcactggaattatcaatgaccaccgcgccggctttcaccgcatgcggagcgaaatctttagaaatggaaccgcctgcaaacaaagcgatatctatacctttaaaggaatcgaaagtagcttcttcaacagtgtaggttttacccataaaagctatttctttaccggcgctgcgtttagaagccagcaggcgtaattcggaaaacggaaagtttctttcctcgataagtttcaaaaactcggctcctaccgctccggtagcgcctaaaatagccacattatattttttcatctgcttcccctccataaattttattataacagcttatccaagccataagtcaaaccaactttatccatcatcttgcggcagccaagcatcacaccgggcatataacattcacggttgaccggttcgttgctgatgcggagagtttcgccctgacttccgaaaatgacctcctgagaagcaacatatccgggtaaacgcacgctgtggatcttcatacctttataatcagcgccgcgggcacctgccagcaactctttttcttccggatgtccctggtgcatttcctgacgcacctcggcgatttgctgggctgtaataaccgcagtccctgaaggagcgtcaagctttttatcatggtgacgttcaatgatctcaacattaggaaaatattttgctgcctcgcaggccagcttgatcatcaatattgcccccaaagcaaaattaggagcgatcagaatacctgtattattagctttagccaactcatccagctctgccagatcagcctcgctgaagcctgttgtaccaacaaccgcacgaactcctgccgacagcactgtgcgcagtgatgccattactacatcaggacgggtaaaatcaacaactacatcaggctttactaccatcagtttggctttaagatcagtagctactgccatctgattaccgtttttaaccggaatcattttatcggcgccgaaagcatcgactgcggcaacaagctccatatcctcctgttcaagaacagttttcacgacctcgctgcccatacgtcccaaagcgccattaactaaaaccttaatcattaatttcacactccttataaaaatcaaaaaccgttgagagcaatactcaacggtcaacagcattgttacatacaaatataatctgcatagttgagatagccctccgcctgtaaggcgacagtccggcggttttttaccgacggcccagcataaccgcatggctgccgttatacttcggcggttaccctttccttcgtttcagcgatccctctccgcgaagtactcttgctttccgctcctctatctaataatattctattggatttattatatctctgcgctatacacttgtcaaacaaaaacgttaaatttctttaaaatataactttttttactttttttgtaactaaaggcgatttaaggcctctatcacgatttaaaatccgggaaacaaattttttcccaaactcctcaaagctcctccaatctccttcaatctcctcaatattcctcatttgctttaatattaccgctaaggtaggatatagatacaggaacttgcgcaagtttcggaaagggtgtcccaaatgtatagcaaaataaatgtaaaacaaagtttttcggacttcatcttatatattttcccgtccgtagttacaatggtgctggtatcgttctattcagcgatcgacagctggttcctggcacaatacgtatcaactaacgccatggccgctatcaatatcgtcctgccttactcaaaccttatctggggtctggccgtcatgtttacctgcggctcctgtgccctggtcggtattaagctgggcgaaggcaaacgccgtttagccaacacctacttcacctcaatgttctggtttctgacgggatttacggcaatttttgcaatcatcgcttactttaatatggaccgtattatttattctctgggttctacagcgctgctgtttgaagattgtaaaacttaccttaaatatatgattttaggtacgccgatcctggcggtcaagctgttcctcgaatattatatccgtctggacggcagacctgcctattctctgataatgtccttaacaggctttatcctcaacatcgtcttagactattatacgatcgttgttttaggctggggcgttttcggcgcctcgatctctacgatcacctcgatcgccatctccacgctgatgggtttggtttatttcaaactctacgaaacaaacctgaaatttaccaaattccactggaacaaatggtactttatcaagtccagcttcaacggagccggcgaaatgctcaccgagctttcctcgggtatcgtaacgattttctttaatatcgccattatcaaatttgccggcgaggacggcgttgcggctatggccgtcaacatcaacatcttctacttcctcatcagcatctatcttggtatcgcaacaggcgcacagcctgtcatcagctatgcctacggcgcgcaaaacaaaaaacgcctgggcgagatcatcgatcactgtaaaaaagccattctctttggctccctggcggtcttcaccttagcccgtttttacggcgccaacatcatctcctggtacatcggcgataaccagcaggtcattgatttagcagtacacggtttcaggatgttctcctactgctttatcttcctgggcttcaacatctttatagccggcttctataccgcgataggtaacggactgatcgcaggcatcatctcgctgctgcgttcgctgatattcgtactggcagccttatttaccctgccttcaattataggcatcaacggtatctggctctctgtacctttcgcagaattggcaacaatggcaatttctatagtcttttatctgatgttcgtcaacagctacttcaaaaagctggtgtaataagcagtaaaactctgcctatgatggcagagttttttgtttctaaatatttttaaagatattatacagcaatcaaatcattaggacttggtactgccaaaaccaccgccgcgaacagctttgtcaatatcggcatctccatctgctaccagatatttataaaagatgccttgggccacacgctcatttttagcaagcactacaggttcagtccccatattcagcaacgccagcatgatatggccctcgttatctgcgttattataatagtcggcatcaatgatgccctgattattaacaagagaaatatgcttttttacagcgatgctggaacggatatgtactcccaaatattcgtcatcctgcatataggccttgataccagtcggtaccagctgcaattttcctggcagcagttctatatcttccggcagacagatatcatagcctgcagatttctgcgttttacgctccggcatcggaaactcgaccgcagcatatttagtgattttttcaaagcctcttactttcatagtacacctcgcttataaaaaatcccgccgaaggaatcagcgggatcttaaatttcttgcttatttttccaaaccgttagccaaaacagctttgcgggaaaggttgatgcggcctttttggtcgatctcagttactttgacaactatttcgtcaccaacagaaaccacatcttcaaccttgcctacacgttcggtagacagttgggaaatatggacaagaccctctttacccggcaggatctcgacaaaagcgccgaaattcatcaggcgggtaactttaccggtataaaccttgccaacttcagcatcagcaacgataccgtggatcatatcaatagctttagcagcagactcgctgtttactgcggcaatgaaaaccttaccgctgtcgtcgatatctattttagcaccggtttcttcaacgatctttttgatcattttgccgccggggccgattactttgctgattttttcaggatctacgctgatcgtagtgattttcggagcatattgagacagctctttgcgcggttcggaaatgcattccatcatgatacccatgatatggtcgcggccgcgtttagcctgtgccaaagcctgagtgaagatatctttattgataccgtcgattttgatatccatctggattgcagtgatacctttatcagtaccggcaactttaaagtccatatcgcccaaagcatcttccagaccctggatatcggtgaggatagtgaaatattcgccgtccttgaccagacccatggctacgcctgctacaggtgctttaataggtacgcctgcatccatcaaagacagggtgctggcgcagacgctgcccatagaggaagaaccgttagattccagagtttc

SEQ ID NO: 9976 - DNA, 34454 bp, Unknown
  gut microbiota DNA sequence
gtccgggactgcgcatgggtttggtttcaccaacactgtacggcgggaaattataatgatggatataacgtttagtatcttctactcccaaaccgtcaaggatctgtgcttcacgcagcggagcgagtgccagaacgttgaggatctgagtttggccgcgggtaaagagcgcactgccatgcggacgtgcaagcaggcctacttcgcaggtaacaggacgtacttcatccagctgacgtccgtcaggacggatcttatcaacggaaatagtacgacgaacgatctttttcaccagcttttgcgtgatgtaagctacgtcttttgcattatcaggatatttttcaatgaaaacttctgcaatttcagcttttaccttagcaacgttttcttcacgctctaatttattagcgtccatcaaagcttctttcagtttatctgcgccataggcttcgatctcggcagcgatttcagcaggaggttcataaacaggaacttccattttaggtttaccgacttcagccatgattttttcctggaaggctaccagctctttaataacgccgtgggcaaaccagatagcgtcaagcattgtttcttcagaaacttctttcgcaccggcctcaaccatcaaaatagcatctttagtaccggcaacagccaggttcagcaggctgaccttagcttgttccacagtaggattgataacaaattcaccatcgacaagaccaacgcgtacacctgcgatcgggccttcgaaggggatatcggaaatagataaagcgcaggaagcgccgatcattgccggcatatccggagcattatcagggtcaacagatacagcagtagctactatctgcacatcattatgatacccgtcagggaacatcggacgaatcggacggtcgatcagacggctggtcaaaatggcctgctcgccgggacggccttcacgtttgataaagccgccggggattttaccgacagcgtacattttttcttcaaaatctacagtcaacggaaagaagtctactccttccctgggtgtttttgtaccagttaccgcaacaactactgcggtatcgccataacgaaccaatacggctccatttgcctgcttagcgatcttaccgatttccatggtaatcgttctgccgccaagctccatactgtaagtatgcattcttctgcctcctctaagttttcacaatttaggttacctgattgtattcgccataaattgcgtttctccttttactttttaaaattttcttaaaaaatctttgctgtaaatctctgttttttcagtaggtaaaacggtacaaaaaagcacaggctctaagcctgcgcttttaagctgtttgcttcagatcatctttcccgctaatatttctcgataatcctgatagttttcttccagcagtctgggagtatccaggccataagggcattttgccttacatttaccgcagtgcaggcagtcttcgatatttttcatcatagcctgggccttgtcagtaagctgcgctgcctgcggtgctctcctgatcatcagcgacattctggcacaggaattgatctctattcccaccggacaaggcatacaatagccgcagccacggcagaaactgccgatcagttcctgccggtctttatcgattactgcctgcagctctgctgtcagaagcggtgggcagtcgatatagttcaaaaattcatccagttcattttcacgctgcacaccccaaataggcagtacatgatcaaactgcgccaaataagcataagcggctgcagaattatttatcagccctcctgccagtgccttcatggcaataaatcccatgccgtgagcagcacatgcccggacaagctccagttccttctcggtagtcagataactgaaaggaaactgcagcgttgcatacaagtcagattctatggcctcgccggctactgccaaacgatggttggtaatgccgatgaaacggatcttcccctgttccctggcctgctgcatcgcttcatataaaccgctgccgtcacccggtttagggcaaaaggcaggattatgaaattgataaatatctatataatcagtttgcagcaggcgcagactggtttccaggtcattccagaatcctgctgctgtaacagacggtgttttagtcgcaataaatacctgctcgcggataccctttagcgcgactccaagctttgcttcactgtccgtatagctacgggcagtatcaaaaaaatttatccctcgttcaaacgccctgcgcaccaattttactgcgtcgtcctgcggtatcctctggatcggcagtgcgccaaaaccgtttttattgacagtgatccctgttttgcccaagctaacttcagtcatcgtaacgccccatttctcactcgatttctactacaaatatagcatagaaataaataaaagtcgaacaaagcgccgcagctctatgttcgacttcactcttgaaccagctttagatatgctgagttttagtaaaaatatttttattagcttcgatactttggctgctgcccacaacacacaaatacttctcgcttaatgtatccctgatcagcggcgccagcttctgcaggtcggcattcgttaagtctatgatctcactgcgcatttgctgccgcattgccgtatctacctgttttagatgataaactccagcctgctccaaacgcatggagttggtcagcggcgtatccagaccgctgatcgtgccgatgatgtattttgtcagctcacgttccgagagctccagtttttcgagccaggacggcatatcataatatgcctgcagcgattctttcagcttcggatcacggtaggaagcaaaaaacatggtcccgttacggtcaaaacgcgctgttgcaccgtaagcgccgccctgtaccctgattttagtccacagatattcgtaacgcaggatagtttccagcaccttcattgcgccgtggaactgatagccaaatttgtgaaaatcaccgccggcagcaacatattgtactttgccgggtgtcatgatcccttcattttctcccggagcctctaaaaactgcggtgctttaccggcaacagctgactgcggcagtaaagctgcaaaattcagagcctgctctaaaaccagcatccgttcgctttcttcacaggaataagccagaagatatttgctgctttcaaagaaaatacccaacagctgccgcaattttgctaaggtatcctctgccctgccagcaaagtcggctgacagctcttttaaaaattcataatagctgaattgatcctgttcattgactctggctgccgttgaaaaatatgaagccagacgggtacaggctacagtctgcccccgagagaagaagctgctgtcccaatctgtttttacttcgtctaaaatttcctgcagccgtttggcgtcgtctattttactgccaagcgcaactgcctgcagaatgtcgaacaatttatccagattagctgtcagcgctttagcctgaacggtgaacttgatcgtataatcgttagcgtcgtcggcagctgagtaagcatgcatctggaaagaaacaccgccggtatatttgttagaggccgtggccagctcctgataggtatacttgtcggtattaaattttccaagcacatcactgagcagataacagtaaggcaacaggtctttatcaatacctgtcagatcaaaataccagttcagataagctattttattggtaaaagccggtacatataagatatcgtttgttcccagctgtttcaaaacagtttctgtaacttctacttcacgtctgatatcgctgcgttccaacagcgggatcgtttccagagcctcggcagtatcagctgcagcctggcgtttgtgcagttcgctgcacagttcgatattttgggcaatagtttcagtatccatcgacgctttgagcacagccattttttctgccagtacttcctgctcccgttcctctttcccctgctcaggattcagagtcactataaccttatgggtattgtccagcagataattttcaatcagctgctcataataacgtgttttgataccttcgcgcagctgctgtaaagcctcagtatagcgcagacctgctaaaggatctccgtcatacagccaggaatccatcacgctgataccataaatcaagcctttgggataagcgccgaaatcagcttcccgcagcttaaattccaaataattgagatgtgcctctaacagctctttatcgatgccgttgatcgtcagctgctgcagcgtgtgataaataatactgataaatttatcgcgctgttccggtttggaaccggcggctttaatcgaaaagatcggctggcggtagcttccggcataagagccgctaatgtctttggcaacaccggattgcagcaacgccagacgcagcggtgccgaattgccttccagcagaacactttccaatactcttaatgccatcgaggttttaacatcacgtgcatcaccagtaactatatgcagttcgtgataagttttatcttcggtagcttcgtcagctccaaccggataagtgccaagaacttcctgcgttctggcaaaagcattctgcagaggtatttccgagttcactgcgccggtgcgtttaaagccgctcaaatattcgtcgttcagatactgcagtgttgtttcgatctccatatcgccatacagataaataaatgaattttcagggctgtaataagtggtatggaaatgctcgaaagcttcctgagtcaattctgggatagcatccggatggccgccggattcaaagctgtacggcgtgtcggggaacaatgccttcattgcctcatagtcaagcaaagcatcagcagaagaaaatacgcccttcatttcattatagacgaccccgttatagctcaaagcgtccgtcggttcctcaatattataatgccagccctcctggcgcagggtatagggattttcataaatcagcggataaaaaacagcgtccagataaacatccatcagattttgaaaatctttggcgttgcggctggcaaccggatacatagtcttatcaggataagtcattgcgttcagaaaagtattcattgaacctttaaccagttctacaaatggctcttttaagcgatacttgcgcgaaccgcacaacactgaatgctctaaaatatgcgccacacctgtatcatcatacggtggcgtcctgaagctgatcgaaaaaaccttattatcatcattgttacctaaatataaaagtctggcaccgctgtaagtgtgctccatcacatatgcttctgactgaatctcgtcgatataagcagcctgcctgatcacaaagccgctgtattgtttatttatgtctaatttcatttttgcctccgaatatttaacatttgtcattattttatcacaaatcgtccacaccaactaaaaaatctttgtgacaacttgtcaaaataaaatattttctttataataaacttagcgacgttagattgacgtttctttgatgtcatattttttaggaggagcaattatggaccaaactcgttttactctgcgtattcatcccctgattatgaaaaaattaaaagtaattgctgatcacaacggccgttctgtcaacaaagagattgaacagattttgaagtggatcatcgacgattttgaaaataaatgcggtaaaatacgtactgaagaactggatctgatcgaccaccctgaaaaaaaagctaaaatcgagcctgttaaagaccgcccgatggatatgctttttaaactgtaagtccacaaactaaaacgcgcatctgcattgcaggtgcgcgttttcattttattatttaaagtagttgacaccggaaacaaagattttctgatctttattgccggtaatattgcgatacagaccatctacaaagcgttcactgtggcacattttaccgaaaacgcgtccgtcgggactggtaatgccttcgattgcatacagcgaaccattggggttatagggcatttccatagtaggaactccctgtgggtctacatactgcgttgcgacctgtccgtttttgaacagctctttgataacagattcaggcgcatagaaacggccttcaccatgagatactgctaccgcatggatatcaccgggttctacttcgctcagccatggagatttattggaaacgatacgggtgtcgacgatctgcgatacatgacggccaatattattaaaggtcagtgtcggagattctgtttccagatctctgatttcgccataaggcagcaaacctaattttaccagtgcctggaaaccattgcagatgccaagcattaagccgtcacgttcattcagaaattcagttaccgcttctttgatcctgggattacggaacatggtagcgataaacttaccgctgccgtccggctcgtcaccggcactgaacccgcctggcagcataacgatctgagaatttttgatcatgctgaccatcttttctactgactcatcaatagcctgggcagtaagattgcgaatgataaatacgtctgcaactgcaccggcttcttcaaaagctctggcactgtcatattcgcagttttgtcccgggaataccggaataaagacccgcggttttgctaaggtcacaggagctgtcagcggcaaatcagctctatataacggctgatttaattcaccttgagctttttcttcgattttataggggaaaatttcctgcagcggttccagatattcttcctgagccgcgtcaagcctgatagcggtatcgttgatggagataaactgttctgctgtcagatgacccagaagcatacagtccagaccgtcaaacaactcttcgatactggttccgtctgccagttccagcaccataccaccaggctgcagcgtaaataaacgctcagtatcctggaacggtttaatgaattcaaaacccagctgattgccaaggcacatagtagtaacggcagcggcaatcccgccttcttttacagcagcagcggcaagcaccttacctgccagaaccgctttatgtacagcacgcatatttttacgcaacactgcaaaatccaaaacttcagcattatcgcgcggacaggacaggaataccactttatgaccagctgctttaaattctgcagaaacagctttttctccatcgataacatcaacagcaaaagaaacaagtgtcggcggcactgttttatccataaaagtaccagacatactgtctttaccgccaatagccggcaaatcaagcgcgtctaaagctgtaaaagcacctaaaagagcgctgaacggctgtccccaaacttcagtattattaagcttggggaaatattcctgcaaagtcagacgcagtttatcagggtcagcacccaggcatactgcacgcacaacagactcaactactgcatacattgcgccgtggaacgggctccagcacgcaacatcaggatgatagccgcaggccatgaccgaagcggcagtagtcgtgccattgagaaccggtaatcggcaaaccataccttcgctcggcgtaaattgtgtttttccgccgaatggcatcaataccgtgccgcggccaatagtgctgtcaaaacgttcggaaagtcctttctgactgcagacatttaaacggtttaaatttcccagccaggcttgttccagagaagcagctttattaacacattcaggtactttatcaaaagcattttcgccttcagcagctttaactgtgatattagtatgctgcgctacaccattggtatcgaggaatgcccgtgccaaatcaacgattttttctccgcgccagtacataaccagacgtgggttatcagaaacctcagctacaactgtggcttccaggttttctttatcagcatgtttaataaaatcatcaagatctttggcttcaattacgacggccatacgttcctgcgattcagaaatcgccagttccgtaccgtcaagcccttcatattttttaggaactttatcaagatttacgaccagaccgtcagtcagttcaccaatagcaacggaaacgccgcctgcaccgaagtcattacagcgcttaatcatcgccgtaacagcagggttgcggaacaaacgctggattttacgttctgtaggaggattacctttctggacctcagcaccacaggaaagcagcgaatctacagtatgttctttagacgaaccggttgcgccgccacagccatcacgtccggtacggccgcccagtaatacgatcagatcgcctgcagacggacgttcacgacgtacagtatcacgcggagcagcgccaataacagcgccgatttccattcgtttagcaacaaacttatcatgataatattcctgtacatgaccggttgccagacctatctgattaccataagaactgtaaccggcagcagcaccgacagttatttttctttgaggtaatttacctggcagagttgcttcgatcggtacgcgcggatcagcagaaccagtaacgcgcatagcctgataaacataggaacgtcctgaaagcggatcgcggatcgcacctcccaaacaggtagctgcgccgccaaatggctcaatttccgtaggatgattatgcgtttcatttttaaacataactagccattcttctgttttaccgtctatttctaccggaacaacgatcgagcaggcattgatctcttcagaaacgtccaaatcgtcaagtttaccttccgaacgcagttttttcataccgataacagcgatatccatcaatgttaccgggcgctcggtatcctctccgtaaacagcgtcacgggtagccatatacttatcgaaagccgcttgaataggtttattatactcgccggtttcaatttcaacatcttctatctgcgtcataaaagtcgtatgacggcagtgatcggaccaataagtatcaagtacttttatttcggtaatagtaggttcacggtgttcttcattaaaatatttctgacaccacatcatatcttccaagctcattgccagacccatttcctggcgcagcgcttccatttcatcgctgttcttggtcaaaaaaccggcaaccgacttgatcctggcaggttcttcacaggttgcgatcaaagtggcaggtttctcccactctgcttctctggcttcaacaggatttatacagtagcttttgattttagcgagttctgcttcggtcaaatttccttctaaaatataaattttagcagaagctaccatcggacgttctttttgcgtaatcagctgaatagcctgttcggcaaaatcctccctttggtcatattgtccgggaagatattccacggcaaaagcacagcagcctgcaggcacttcaaaaatttcgtcagtaacagtatctaccggaggttccgacaacactatttttcttgcagcagcaaattcttcatcactgacgcccatcacgtcataacgatttaagattctgatgcctgtcagatttttcatgcctaagttattgcgcagatcggataataatccatgtgcttcaacagcaaaagcatctttcttttccacaaaaatacgtctgattgtactcataaactcagcctccaaaataagatgcggttaaaaatactcgttaatataattatgacacttgggaaacagcctgtctaacaatgaagccgcttcctgattatgtatcttcagcctgttttcagcagccagttcctgtacggaaaactgaccaaaatataactgtgtaaaggctgctacatccatttcaatatcctgcatatccactgtactcttaatattgatctgactggcatttatttccagtttcaataacccgttattaagaggcagggttttatcatttatcagcaaagataatgttccctgtacatctgcagctatgtcagtcagctgtaaaagtgcctgacgcacattaatgcagcgtgccatcataaacggctgcaaactgccagcatatttctgatcctgtaaatgcagatacgttttatcccagacttctgccagccagctgaaattttcagcttcagtaacatgctgtctggcaaactgcagcagagaatcacgcgccgctgtttcttctgccataagttcctgcacagcaaatgttttatcatcaatgctgtaaaacatatagccagcaactttttcgccgcgtttaacaagcaccgctttaatctgttcaccctgatgaactgccagtaaatgcagccagttttttaaatcacgttttactacgccgtgataagctgcagtcacggtatcatagaccttttggaaaacttcggccttctccagccctgttcgatgcaatgacatatcagaaactttatcgcctttgggcaatgcggccaaaggcatctcgtaacgatgcctgtaataacagtaatcaaactgatatggacggtaaataccggcactgatcggcattaataaaacaaatgcctgaccctgagcccgtaaaaccgaaaaagcagtttccagaagcggagcaaataaatgtctgcccctgtattccggcgctgttgcaacgccgacaatataaggcaatttcaaatcccttccacgcaaattgatagtataagggttcaaatgcagcatattcatcaaattgccggatttttcatcaaagccgccaagcaccatattttcttttaagcagtattcattaaaataccacttaaaaaaaggagtatcgtttttttcaaagcaataatcccataattccattattttaggtaaagtttcgtcattaataatacgaaaatccatatttacacctatttaaaaacagacgaatattttttgatcataaattcaggatgatatgattccttagcagtacgcagcccttcatgccccatatcttcttctctgtttaaataaactacatccccccatgcatgttcggcaaattctttattgattgccgcataaataccgcggatatcaggatttgctttttctacatgcagaacggccgtgtcgtcattgatctttttaccgaagctgaatgcttcaatttttccgttgacacggatagcgccgccgcgcaaaccaagtgcttcaaaattatcgatcgcttcatggatagcacattgctcacagcgcaggctctcgtcttcgccaacacgtttttcgcaccattcatcaccaaaagccttgcactcttcgtaattctctggtccgataggttcgtaaacataatcgggatattcttttttaaacgcattgtaatgattttttttaccatgatatttacgcccagacaaactagccagtttttcacgcaaataaacataatcccaattatcacgatcttcaataaattccatctctggaaaagctttttccagccgctctttgccatcgtcataaataccatgaatctcaaaaggcttgccttcatgatattctttaatttctgcaaacaatttaggcagatcttcatctttaccgccaaaaggctgcaaaaagaaatccacttcgttgcgtttcaccttgatcaccagaaagtcatgtactactgtccagtaaatgccataacagtcctgccatacaaataaatttgtaaacgcacattcagaaccccgttggtcaggacgtgataaataactttcgaacaaaggcctgtcagccaatgttattttttttagttctaaaataaaaaggacctccttaagatacacaactttcctattctgatattataccataaaactgtctatttactaaagaaaaaaccaattgcctaagcaattggttttttaacttcattaattattagcctttgcgagcattgaagcattcgcggcagtataccggacgatccatggaaggacggaacggtacttcggtgtcttgaccgcattctgcgcaagtagcatggaacatttcgcgagccgggcgctcgttgttgatgcccatacgttgtttgcgagcttgacggcaaccagggcaacggccgggttcatttgtgaagcctttttcttcgtagaattcttgctcggaagcagagaatacgaattcggtgccgcattcacggcatactaaggttttgtcttctttcattggttaatcactccttacattaaacataccccataaggacttatagatgttaccactgcttcctcatgttgcgtatgtagcatggaagaagttcggaaccctacccggaccactgagatatactataagcagtatatctaaaaaaaagataaaagtcaacaagaaatgtacattttaaaatttataattatttaggatattttattccgtcggagtttacattatcatttaaataatgtgtatcatttacatactcaattgtaaagcggtcctgccatttaccaatacaggttgtgctggcattatgtacgccaaacacccacagtttattgatatcaagccccagtaaaaggcaaagctgtactcttataacgccgccatgagaaacaattgctatatttttatcgctgttatttttaaaaaggtcttcacagacagaacgaacccgcaatgcaacatcgtcgaatgattccccgcctggcattctgcactgtgccggctgtttaaaaaacaactctaactgatcactccattttgctttgatctcatcatagctcaaaccttcccattcgccaaaacaaacttccttcagttcatctaaaggctgaacagtaagtccatgagcttcagccaaaggtgctgcagtctgtctggctcgctgcatggagcttgaataaatttcgtccaatacaatattttcataatgctgtcccaatgctgcagcctgacacagacccttgctgttaagaggattatctatgtgcccttgaaattgaaatgttttattagcttctgtttctccgtgccttataagatatatcttgcccatattgcctccttattatttaccttttacctgtactgaatgcgcaaattcttccacttcagcatgtactcctgcttcagcaaatgtttccatttcattatacgccttaatgcctgcatcaaacaaggtaaaagctaaaactgcgccttctcccgccccactgttaatatccaactttagcggtgccgatagctccagccgattcaataatttttccatacccggttctgccgacacatgccctgccatacaatattcaagaactaccggagctaatttgcaggctccgacagcagccaggcatgtagcgataccatccagaattacaggtaccttgcaggcagcagcctgtaaaacagtaccagtcatagcggttattaccggatcgttaagcttttgcagaaattcaattccttccagctgtaaaaatgcttctgtttgttctgtaagagtatatttttccagacttcccaaggccagcatttgcagtttatcactgacaatatattcttttgtcagaatagcgccttcttcaagcgcttcctcaagattacaagatgtgaccagcaatgggtaaacctctgctttagcttctcgtaccagcaaaacaacaggcagctcctcctgcatcgctttagcaacagaatctgtgtcagcactccacaaaaacaaagcttttttaggatattgaacagattttttatcagcactgccgataataccggcgtaacgcgaaaccatagcttccagttttgcaagtgaaccgaccggtttgataagattgtcaaatctgttttgtgcttcctctactttttgacgatcgattggttttatttgttcaataatattatttatatccatctttaaaccttccttatcttagtaagaatactgctgtcagtaaataaatcacattgccgcattcagtcagtgcaccatatgtatcaccggtaagtccgcctaactgtgtttttaaatattgcgctattatcaaagtgacagtaaaacatattcctgccaccgccagatattgtaaaccacaggccgcaataatacctgcgcatactgcaaaagcaatatacgtataaaatggtttggcatacttggtaaacatatgccctattccttcttttcgcgcatagggaaaattgacaataaaaactaccataaaagttcgtgtcgcaacggacatcgtcagtaaaacccaggtcagtgtttcaccgctaagttcaagataggcagctattttgagcagcagcaaaataattattgccaatacagcattagaaccaacatggctgtctttcattatttccagcattctctcgcggctgcgggcagaaaaaacgccgtcagcagtatccataaaaccatcgtacatcaacccgccggtaataatgatctcggccagcagcaaaagcgttacccgtaaaaaaagcggcgtttcgatataaaacaggccatagtttacggctgccaaaagtgatccgataaccaaacctaccaggggaaaatacggcacactgcgcgaaaaatcttcgtcacgccaatctgtccgttttgaaaaacgcactcgcgtcaaaaattccaagcaagtgataaaatcacgcatgcatgccaccacacttatacagttctttataggtattgatcgccatctgtaaaataacaatcgccaaagacgctcctgtaccttcgccaagacgcatacccgcgtcaactatcggcgtaagtcgcaaaacctccagcatctttgcatgtgatatttcagcagaaagatgtgaacaaagcatataatcagcacaggctggttcaagtccgtacgcaagcaaagcagcggcagtcgcatttacaccgtctaccattgtaggaatacggcgtctggcaccagctaaaatcatccccgccaacccggcatggtcataaccgccaaccttacagaggatgtccatggcatcgcccaaacgtggttgatttttagccagaccatcagcgacgacctttctttttatcgccatccgttcatcgttgataccagttccccttcctactgtaaactcgggcggcaaccccagaaatgcagaaacgattgctgcggtcgatgtagtattcccgattcccatttctgctgttactaataagttataacctttatcaatacattcatctgcgaccttcataccaactttcaatgctttttcggcctgctccactgtcatggccggtccctgtgtaaaatcttctgtaccccaggcaaccttctcctggtgaactttaggcattgcactcaagtcaaaagccgtacctgcatcgatcacaaaaacatcggcaccggcatgacgtgccataacgttagcgccggcagtttccctcatgtaaccgtttatcatctgcatagttacttcctgcggatatgcgcttacgccatatttggcaattccatgatcgccgcacattaacagcattgcacttttgattttatcaggcaatgccgtaccagtcatggcagcatatttttcaaccatttcctccagcttacctaaactatgcagcggcttatccattttagcccagttattttttattacttccgcagcgttgctatccaacggtggaatcattattttttccattgctctgctccttcatcatcaaaactaaatgccattttctttagatcaacagcttgaccggcgacacaataaaagaccctgtcacatacatcggcaacctgctggtttatccatccggcaagatctctgtactcacgtgccataacattatccggtacgataccaccgccaacttcattagtaacaaatactaccagtttttctgtttttctggcggcttccagtaattttacaatttcacatttgacaaatgttaccttttcttcaaaagttcctgcaattgcaaccttgccatacatcaaattactcatatacaaagtaagacagtcaaacaaaattgcatccgcttccttacctgcctcaaccatcacctgttcggcagcataaggtgcttcataattattccatctttggggagaacgacgttcctgatgtagccgaacacgttcagccatctcgtcgtcaaagatttcagccgtagctatataagcgcatttagatccataatgcaaaacaaaacgctctgcgaattcacttttgccgcttcgtgcaccgccagttactaaaatcatttctttacacatccttaagcctcccttcaaaataaaaataccctctcgagagagggcataaataaacaacctatgcaagtatccacctatctcccgtaggtgtaagatacccgtaacaggcaggtctcctggctcaggttcaacattcagctgcgccttcccagtttcccagtggcatattgcagtgaacttccctttacagtagcgggactgcgccggatttacaccggtcttccctattaagcgccgaccgcaatcggcacacctgttgattttttccaatactatatattctacattcttttgcaaagtcctgctgacctgcaaagcattttttcatattcttcatctaaataatcatgggcgtcattaacattccttacggtaatcaatacacggctgcgtccaaaccagtaatacaccctgatttcataccattgagctacaccatccgctccgacgaaacgacattcgcagccagaataatcaggagtattattgtaatttgcagataaaacgtcaaaatcaagctgagccgtaaatttttcaatatcttcaggataaagcaattcctgaacgatatgcttgtaatcatttttataatcacctgtatacggaataaaaacattccctgtaggattaaaagccattcttgaatagcgtccatcttttagattcaattcaattgcaaaatcatacatctgcgggaataaatcgcccaaatctctgtatgatggtaattttacagtacgtccgtaaccgttgatgctgcgacgttcagcattaactatttcaatcttacttaaattaagcagattttcaaactgcggccttctcaacggctggcaataatagaatccctgagctatattgcaggaaacacttttcattatcgcaacctgtgcctcagtttcaacaccttcacaaatcatcgtgatatccaattcttttgcaatagctgccatccctttgatgattttgatatctttatcattatcacaggcggcaagcattcttttatctatttttaaaatatcaacgctgatatcacttaaaatacgcagagacaaatacccggcgccaaaattatcaacagcaatcttaaatccctgatttttcagctcgtcaacctgcatcccagcaaaattcacatcatcagccaataatctttcagcaagctcaactaccaaaagcttgtgcggaacattatgcttatcggcagcttcttttaaagaatcaataaaattttcatctttaaaatgttcaaatgaaaaattacaggagattggaaaaacctgtaaccccaaggcaaggcgtaatgctaagaaatggcagacttcttcaaaaacaaaattttcaaatttagataactggttattatcttcaaggataggaatcaaaacttccggaagaattatcccgcgcgtaggatgctcccagcgcagtaaagcttccgcaccaacaatctcattagtatagatattgtattgcggctgaaaataaacagtgaactctttattattaagagcactgcaaacttcttcagaaagagaattataaccagttgtgaattcaaaatcattgattataaagaaactgcggcagcatttgtgaaaaacttttttgttgagctgagcaacagtttttaccattgcatcttccagcgagtcttcaactcgacatacataaagatctccacgcagtttgatgctgacattgcaaatacgcttgacttcgctttctaccatatcagataatccgtcaaaccaattattatgcgtttcttcatctgtaaaaggaacaaggcaaaagaacttatctccggcctgtcttgttgtaagatatcccttcacaacacgtcggttaagctctgttcccaaaatgcgtaaaacattatctgctgtctcacgcccataaatatcaacgatatcatggtaagggtcaatatctaaatgtattagcgccaaaagctcttttttgcgctgcagcatttcatccgctttttctttaaacttatcaaatcccagtgtaccgcttactttatcacgtacatatttctgcgaatacaacattctttgatgttcagaagacttaaggtagagaattgctacaaacacaccaaaagcaattatcgacaacaggtaaaaattcatagtaatctcccattatctttcaatataattatagtaagtatatatctttcgtataaaaaatactacatttttaactacttcaaaacatttttaaagtaatttaacccaaaagaaaatgaccatacagttcttaccgaacctatggtcattttgttttaagcttctacttctacttcaactcttgataaaatgaaacataaatcagaaagtctgttcaaacagataagaacctgctgattgacttcttctgtttcagataagcggagcagacagcgctcggcacgacgagtagttgtacgcgcgatgtccaaagcagctgatccgggggtgcctccggggatgataaaatgactcaaaggctggagcatattatcgaatttatcgatagtttcttcaaacattttcacatgctcttctttgatataaggctcaggcaaattcaagcttgctatatcagccatcagtgacatcagaagctgctgaactttgtaaatcgtttccctgacatcttcgcgtctgactgtagctcttgccaggccaagcgccgaactgatctcatcaactgtaccgtaagcttcaactctcatgctttgttttggtacacgttcgcctgtataaagtccggtagtgcctttgtcaccagttctggtatatactgctgctttcattttgtcaccatccttccggaaaattttaaattaataaatttcttcagctttaaagaaatttttgatttcgcgtgcagcggattcttcactgtcactgccatgaacgatattttcgccgatagtcagcgcgtaatcgccgcggatagaaccaggaacagaatctaacggattagtagcacccatctggccacgaaccgctttaattgcattctcaccggaaataaccattgctgcaacagggccggaagtaataaattcaaccaattcaccaaagaaaggtttgccttcatgttcagcataatgatatttagcttgttcttcagtgatttttactaattttaaagccgaaactttcaagccgcggcgttcaaaacgagcgatgatttcaccaatcagattttttttgacaccatcgggttttacgagtacgagtgtttgttgcattggaatctctcctatctagactattttaatttatactaaatcgcaaaacgattttagccttttaaaagctgctgatactttttcttatccagtttctcgatcattgctgtgatcagctgaacagcaccttgataatcatccatatgaataatggattgatgactatgtatataacgggtagggatactgaatgttaatgtcaaaacaccggtatcgtgtaaatgtatacgaccgccatcagtagcaccgccctctgaaatactgatctgtgttggcagcttcaattcttcagcaacttcttttgcaaaatcacgcaatgctgtattgggaatcataccagcatcaaaaattgttatagcaataccctttcccaatttcgcaggagctacatcatcacttacacctggcgtaccaccagccacacatgtatcaataacgaaagcaacgtcagggctcagcagattaacgcttgtttgagcaccacgtaacccgacctcttcctgtactgttgctacaccatatacagtattaggatgctttgtgccgatattttccataacgtctgccatgactgcacagccgatgcgattatcccaggctttaccaagcagagttttaccatcgcccataactgcaaattcagcatatggcgtcactgggcagccttcgaaaactcctaaattgcgagccatgccttcgtcggcagcgccaatatcaatatacatatctcgcttggcaaccacttttgttcgttcttccggtgtcagtatatgtggaggtttactgccgataacgccaacaagatcacccttgctgccgtgtacagtaacgcgttggctcagcataacctgctcccaccagccacctaaacaagtaaattttaaaaaaccttcttttgttatatgcttaaccataaaaccaatttcatccatatggctggcaagcataatttttggcaagtccttgccttgaccttcattagtaaaaacagcgctgcctaatttatcataagatactttggctttgccctgcagccgcttttgaagcaaatttttaattgatgtttcaaatcctgaaacaccgcaggtttcagaaagctgttttaaccaagttaattttttatccaattatttcgcacctccactgctgcgcatagctttggcctgcgcgcgtaaccgtgccacacggtctgcggtactgggatgtgtactgaataactgcttcatatcttttgcgctaaaggggcaaatgataaacatatgagcagtattttcagtagctcccggcatcgttctgttttttgcatacgattctattttcagcaaagcgtcagccaaagcatccggattaccgcttaactcaccaccggatttatcagccatatattccctcgaacgcgaaacagccatctgaataatacctgcagccaaaggcgccagtatcatcatagccaaaccaacaatagcactgctgctgctattgcggtctctgtcgccaccaccaaagaacatcccccagtgagatagcgtcgtaataatacctgccatagatgcagctattgtaccgattaaaatatcaccatgtttgacatgactcaattcatgtgccaaaacgccttcaatctcatctttatctaaggcattggccaaagcggtagttactgcaaccgcagcatgttcagggttacggccggttgcaaatgcattcggcacagggctgtcaataatatatactttaggcatcggcaaattacctctttccgccaaacgctgcaccattttatataaagcaggcgcacttttttcatcaacctgtttggcattatactgtgccaaaaccagtttatcgctgttccagtacgaaaatagattcatggcgagggagatgataagcatcatcatcataccgcgggcaccgccgaaataatctccgaccagtaccaataacacagtaagagccgtcattaaaaaagctgttctcatacttttttgttcctcctcaaaataaaaactatcgaacattatctataagacctgcgtaagtcttatagcatattataccaattactgcactatttttcaatttgcgctttaacagctgtcaacatattttcactgttttcacgaacttttttctttaaaataggatttaacagcccggcaatcatcggaataccaaattcaaaatctaccagcagggaaacttctgtcccttcactcacaggtacaagtctccattccccttccatttttttcaaatcaccctcggtctgacaataagtgatacgcatttcttccggataaaaggtatcgcgttcagtccagacgattttacgaccatcaacattagatacccaatgtgaaacagtagtattttctccgcgttctaaaatttctacactcaccagatcatgcataaaagaggggtaagcttccatattttttatgatttcaaaaataggcttactatcgccgttgatcacaatctttgtttctacgcaaggcataattctgctccttttataaatcttcaatcacttcagccgtactgctgacagcttctctaaagatagtcaaaacctgatcaataacatctgtaggcatgatcagaggcggttcaatacgaataactttaggattatttagagtataagcaataataactcgtttatcgatcatcagcgacatcagcattccaccggcgccttcttttgtaagctcaattccgatcatcattccgcggccgcggatctctgcgatgaccgaaggataatctttttgaattgattccaacccttttttaaagtatgcccccgccgcagcactgcgatccagcacatcatttttttcaatgtaattcagcgcagcattggcagcagcacacgctaattgattaccgccaaaagttgaagtgtgtaaaaaaggtgcttctattaatccagcccaggcatcagccgtagcggttatagctccgatcggcatcacccctccacctaacgctttagccgtagccatgatatccggagttatctgctcatgttcaaccccaaaccaggtcccggttctgccaataccagtctgtacttcgtccgcaatcagtaaagtaccgtattggtcacataactctcttactgctttaaaataaccttccggcggaacgatgatgccgccttccccttgaatcggctctaaaataacggcagctgtttcttcatcaatagtttcagcaagatcatctatatccccatattctacatgtgtaaaattatccagcagcggtttaaacggatctctaaacaaatctctgccagtagctgtcaacgaaccaaaagtttttccgtgaaacgcattccttgccgcaataaactttttcctttttgtagccagtcgcgcaaccttcaggcatccctcaacagcttctgtaccgctgttaacgaaaaaactgtattgcaaagcaccgggagtaattaaagccagtttttcagccaggtctgccataggtctgttaaaaagcactttaccgctcattggcattttatgcagttctgcttctacagcagctacgacatcaggattgcgatgtcctaacgcaaacattccgtagccgccaagacaatcaatgaattgtttgccctcgctgtcagttatagtccacccctctgcatatctttcaacgcttgccaatcccataaaccgaaataatttcgcctgagcagggttaatatatttttcatatttactgatcgtttcttcgacatacatatgtataatcctccgactacttcaataaactacttacaggaactaattgaataccagatgcatttacctcgtcgataactttgctccacgctgcggcagtatgcggtctggcatgacaaatggcaatagcgcttccatttctgtccgccatttctacagcctgccatattttagcaataatgtcatcttcgtcggaactgttgtccaaaaatatattgttatgggcagtaggaacacccatactgcgtgcgacctgatcacctatagatttggagtatgtactgctgtctacaaaaaacaagccttgttgttttaaaactttcaatacagctttcatcgttgcttcattacttgttgctttagaaccctgatgattattgacaccttcgataccaggtaaactatctaccgctttccgagttaattgctgcacctgttcagcagtcatatcagtcaagattgtaatcttaccctcagacatagctgttctgtccataggttccataggcaaatgcagcatcgcagtctgaccgccgccttttataacatgcaaagcgtcactgctgaaatctttatagggaagaatagcgtaactgaaaggcgcattcaaattgaccagctttctcaccggtgccagatcgtaaccacaatcgtcaataatgacagccaattttccatgatatttctgagcagtttttttgtcatctttcttcgtactttcgtcttctttgatatctttatcttctttagtcagatttaagttatgataaaagtaaaccgtatcggtgataaaattcattttaccagttcctgctttagctgaaatagcaatttccatacgtacagcttcccaaccattataagtagcctcacgctgattgagaacaatcattttcgtaccggaaatcttttcgccaagccaggctgccgcaccttctaatccagtacttggcggaactccaatagccagctgccgcttattccagacaacttctccacctgtttctttcatacgttcgtgctgatcttcacgaccattatcagttaactgccagttatccttcgataataaaatatcatcgactgccctatgcgcttctttggactcttctcgcaaatcaaccgaagaagaaccagtcaagcctttatcaagcacatctttttctccgtctctgctcgccgcataataaatgcctccagcaacagctatagctaataatactaaaatcaaagtcagtacaaaacctcctcctgaccccttttttctattagtccttcttgccatagtagcctcctctatgcccgcggatgcgctttttcataaatatcgcgcaggcgtttatttgttaaatgcgtatatatctgtgtcgtagaaatatccgaatgccctaaaagctcctggacagaccgcagatcagcaccattgtcaagtaaatgtgttgcaaaggaatgcctcagcatatgtggtgtaagctccttatttaatcctgcctgatgcccataaccgcgaatgatttgccaaaacctctgccttgtcatttcatttccgctcatacttaaaaataaattctttacattaggatttttagtatgaagcagtttgggccttaccacatttagatatttatccaaatattcaactgctatgctgccaatgggtattaaccgctctttagatcctttaccgaaagcgatgatatacttcatttgcagattaacgccgctgacaggcaaacccaataattcagaaacacgcattcccgttgcataaagcacttccagcatcgttctgtcacgatagccttcatccgttctcaaatcaggctgttccaaaagcttcaaaacctcttcctgatttaaaacttttggcagcttgataccttttgttccagcttctacaacttccgcaggatcaatctccaaatacccttctgctgtcataaaacgataaaaagattttatagcagcaagttttctggcaatcgttgctgcggctaaacctttatttttcaaacctgtcatatagcgaataacctgctcacgcgatacagttgccaaggcgtcattatcctttaatcctaaagcttctttaaacaaacgcaaatcacgctcataagctaatcttgtatttgacgctaagcctaattcaactgtcagatattcaaaaaacaaatttaatttatcgttcatatttcatcctcaaaaaagaaaaacaacgctcaagcgctgtttttcaaaacattattgttcgcgcttttctggctgcataattgtaatattagcagccggcgaaatagtcgatatagcgtgcttataaacaagctgttgtttgccttcattttcaataataacagtaaagttatcaaaacctcttaccagacctctgatttggaaaccattaatcaggtaaataatgacgccaaggttttccttacgcacatgatttaaaaaactgtcctgtaaattcattgctggctttgatccactattattcatagctttcccctccaaaataatttctatctattgttataattttaccgcagtttaaacttttccacaagcgtttgctgcatctcgtcaataatcttttcatacacaggctctttttccaaatcaaaccatttaatatacggcatctgacgataccaggtaaattggcgtttagcaaaattacgtgtcgcctgtttcaatttctcaactgctgccaatttatccatctggccttgtagataccagactatttgtctgtaaccaatgctgcgcatcgactgagcatccaatgatagcccactgtcgagtaaagatttagtttcctctaccagaccctctgccatcattttatcaactctgacattgatccgcgcatataaactttctcgttccattcgcagaccaaaaacaacagtttcataaggccattcctccgacttcctatgagctattttttcaccactctgtgctgcttcaatagctctgataattcttctgcgatcatttatatgtaatcttgaagcggtctccaggtcaagttcctgcagtttttcatacaaggcgctgttgccgtgttcttcagcaaatgcttccaattcactgcgtagttcactgcattcttcaacagtattaaattcataattttcaagcagggccttgatataaagaccggtaccgccaacaattacaggtaatttaccgcgactattgatatcagcaattattttttccgctttttctttaaaatcaacaacgctgaaagcagcatccggcggcaaaatatcgattaaatgatgcggtactgccgccagttcttcagcagaaggtttagctgtaccaatatccattctttgatatacaagcatggaatcaccggaaattatctcgccattcagacgtttggctaaggctatcccgcaatggcttttgcctgttgcagtaggacctaaaatgactgcaactctcggtttcatgccgttacctccttcggataccatattttacacggctataacggccgcccagaatttccgtacaccctaaagcttccaataatttttgtccgcgttctttaaccactacacaaggagctaccctaagtgccgccttaacagtcgcttctgttaacggtttctcacaggaaataggcctcaatggctccatatttgaagaagcatttatcggtattcgaaacattgggtcaaaataaacaacatcaaagctgtcggctggcaaagtgtacaaatactcatctgcttccgcatataccgtttctattctgcgcatggcgttgtttaaatcaacatcttcagcctgataattctgcagaccttcgctgaccacaaaatgtaacaacggcgaagcctcaacagcacaaacagttcctgtccagcctgtaataaaactggcaacaacagcatcacttgccagccccatcgtacaatccagtactctcattcccggtttaagagccaatgcagcactaaagtgatcggactcgtgcttttttaaacgctgtacacgcaaaacggccatacttggatgaaaaaagaaagttccagaagcagtatatacctgcgggcctttatttgttgctactaaaagtgcttctacccgttcttgatctagtaaaaaccccaaagaccccctactgccacgttccacatattttacaccaaattttgctgcccatgtttgcgcaagtttttctaaggcaacattttcactgcgtccaactgttactgcaaatttaaacgttttctgcatgtttaagttcgcttaaacatcttgtataactcggccgaatttatttcaaccatacacggtctgccgtgaggacaagtaaaaggatgctctgtattgcaaagatcaataatcagttgtcgcatttggcgcatattcagcacctcaccggctttaattgctgctttgcaagcagtcatatgtaaaatattctgacgcaaatcacttggattaatcgttcttaattcactcagcatttgagtaatttcacgcacaaagtcctcggcatcatcagccttaatatctgaaggcaagcttgaaacgcgcagcatagattcgcctgcagcctcaatatcgacacccaaacgcagaaattcttcccgatgttcctctatcaaatttacatcctgggcagtaacatcgatatataaaggaatcaacatctgctgggccggaatatcattatgggacgcaacaagcttatcgtataaaatgcgctcatgcgcggcatgctggtcaaccaaaaacaaagaatcatcagattgggcaacaataaaagttctgtcaatctgtcccaatggccaaatcgtatcaacaccactatcggtatcagtgaagtcgataatattagaagcaatgttatcttgcttgtcaaaaacatcacgagtttcactgatcgtataaacaggctccgtttttggaggcctgtatgtgtattcaggttctttccaaacgctttgctgttgtgacttgtaagccgagtaaacctcagcctttgctgtactgatatttgtctcagttgtttttaaggctggcaactctatctcaggcactttagtttcagcggctggtgtttcaacaactatcgatggttctgttgctgccacaactgcttcagcagacttgaatacctgcagttcagaatcatccaataatgtcaggtcctgaggtttagcgctcataggtcttgtcagtgcatcagtcaaagctttatacatcgctttataaacagtactgtcatcgctgaacttaatttcactcttctgaggatgtacgttaacatcaatactttcagtatcgacggtaatattcaaaatagcaaaagggaaaccgcttttcggaatctgagactgataggcatgatcaatcgccttggcgatcattctgttagtaatgatacgtccgtttaccagcaacgtctgccattgacgcgtgccttttagtaaagtaggtttaccaataaaacctcttaccttaacttcgctgtcagcaaaatcaacggtcaaaagctcctcactaacatttttaccatatagtgccttaacagtatcaactaaatctccgttacccggcgtactcaaaacctctttatcattgctgacaagcttaaaccgcacatcagggcgtgataaagccaattttgttatcaattcactgatataacggctttcagtctgtacagtacgtaaaaatttacgcctggccggaacattaaaaaataaattttcaacaatgatcgtcgtacccgtgtgcccaccagtagcaatacattctgcctgatcgccgccttcaatttttattgaagtagcaaactcctcggtaacaggacgtgtcagcagctggaagttactaacagaagcaatactcggcaacgcttcaccgcgaaatcctaaagtgttcaaatgcagcaggtcttcagcaactctgattttgcttgtagcgtgccttaaaactgctaattttgcattttcttccgacataccgctgccattatcgacaacacgaatatattctgtaccaccgccaaaaatagtgacctcgatgttatctgcacctgcatccaaagagttttctacaagctcctttactacagaagcaggtttttcaacaacttcaccggcagcgatctgattcgctgtattttgatctaataactgcactttttgttcgttcataattcaccgccttccctttttgcttcatcctgcaatttatacaaagcattcaaggcttcgattggcgtcatcgccataacatccatttttaaaatctgctgctgcagactgctggcaaacaatgatcccataggtgctgtttctttttcttccctgggtgttatctgaacgctgcaggcagtttcacaattatcatattcttccagaatatcctgggccctgtcaatgacctttttaggcagtcctgccagccttgccacatgtacgccataactgcggtcagtaccgccgggcacgattctgcgcaaaaagacaatatcattaccacgttctttaactgccacagaatagttttttactccgttcatcacgtcttccaacgcgatcaactgatgataatgtgtagcaaataatgtttttgcttttattttctcatgaataaactccatgacagcacgtgcaatactcataccgtcaaaagtacttgtaccacgtccaacctcatccaaaataatcaaactgtctttagttgcgtatctgagaatctgtgcaacttcattcatttctaccatgaatgtactttgaccagtcgccaaatcgtcactggcaccgacacgggtaaaaatcttatctaccgggcaaatagttgcctgacgtgcgggaataaagctgcccatctgtgtcatcaagaccagcagagcaacttggcgcatataggtcgatttacctgccatattcggtccggtaataataatcatacgttcatcattattattgatggttgtattattaggaacgaaaatctcgcgatccagcaaacgctctacaacaggatgacgaccgtcataaatctttatttcactgcgattattcagttccggacacacatagttgtatttaaatgctacttccgccaacgatactaaaacatcaatattggccaaagcacgagcagttttctgcatttgaacaatctgagaccttattttttcacgcagctgtgtaaaaatataatattcaagctgttcgattttttctttagcgcttaaaattttattctcaaaatcttttaattccgggacaatataccgttcagcatttacaagtgtttgcttacgtacaaaataatccggtacatttgcgctttggcctttagatacctcgatataataaccaaaaactttattataaccaacctttaatgttttgataccagtttcttctttaatcttaagttcaaaattctgcatccatgttttgttatcactggcaattgaatgcagttcatctaactctaaatcaaagccgctgcggatcatgcccccttcacgtacagaaaagggcggctcatcaacaattgctgccagcaaagtagtaaacagctcctgatgcaaatgtacatcctcgcataactgctgcaaaagtttactgttacaatatcttagtaagctttttatttctggaagcaccgccagcgaagaacgcaatgaaaccagatcacgcgcattagcactgccaacttcgatacgtgaaactatacgttccaaatcaaaaattgcctttaatttttcctgcagattaccgcgcatctgtacatttgtcagcaattctcctatcgcttcctgccttgaccttatctgtgataaatcaagtaaaggacattctatccaattccggagtttacgagcacccatggaagtagaggtaaaatcaagcacatctaataatgtacctcgtttagaaccatcacgcatattctttataagttctaaatttctaacagctgttgcatccaaattcataaactgctctttagctatgcgtgataagctgttaatatgcgacaaatcagctttaacggtcacatgcagataacgcagtaaatgttctactgtatcatgtactaaagtatcggcaacatcatcactgccaaaatgctgcgcaaaatactgcggtgcaccttcttcttcctgatatacagaaacagcacactctggaactttacttttgatccaaactgctaaattttcccagtttacaataccgctatacgcaactaactctgccggttgaatgcgaaacaattgttcctgtattgccattaaacgctcttcaccagcagcactgaaccattggcattcaccggtagaaatatcggcagcagcaagacataattcactgccatcctcctgcaggaagactaaatatctgttatgcttatcatctaaaagctgttcactcaaaacagtgcccggtgtaatgatcttaacaaccttgcgttcaactatccctttagccgctttagggtcttccacctgctcacaaattgcgatgcggtaaccttttttgatcagttttgcaatataattatcgacagaatgataaggcacaccacacatcggtatcttttcttccataccgccggcacgcccagtcaaagtaatatttaattctctggaggcagtcagcgcatcctcaaaaaacatttcataaaaatcgcctaaacggaaaaacagcaattcatcctcatgctgacgctttacttcaaggtactgctgcaccatcggcgtataagcagttgtcattctaccgccttccctttcaaaagccaggtctgcgcagtttcaatttgcacctgcactttatcccccagctcaaaatcacgaccttcgactggccataaaaccagcttatttgtacgcgttcttccgctccatactttattattattattacttgggccttcagctaaaacttccagtgttttgccaaccatggcttcattacgctgcaagcttgaaatattctgggcttccatcaataaattcagcctagctttttttatctctaacggaacctgttcttccatcgccgcagccggtgttccagaacgcttggaataaataaaggtgaacgcagcatcaaaaccaacttcttttactaaattcaacgtatcactaaaatcagcttctgtttcacccggaaaaccgacaatgatatccgttgtaatagcagcttcaggcacataacgtctgatcatggctacaagctctaaatatttttctcgtgtataaccgcggttcattgctttcaaaattttattgctgccagattgaaacgggatatgaaagttttcgcaaatatgctcacattcggcaactgctttgataacatcttcgtgcatatcacgcggatgactcgtcatatagcgaatccgttccactccagggatttcatttacacggcgcagtaatttagcaaactggtctttcacagcaaaatctttcccataagaatttacattttgccctaacaacgtaaattctttataccccttagcaacagcctgcctaacctcgtctacaatattttctatactgcggctgcgttcacgcccacgtacataaggaacaatgcaatacgtacaaaaattattgcagccatacataataggaatccaggctgaaaaaccgctttgacgaatacgctcaccctcaaattcgctttcttttacttctaaactattataaacacgctcacccttttcagacaaatactcagcaagtatttctttaaacccgttgacatgagccgtgccgatcaacaaatcgatttgcggatgtttttttataagcttctcaccatctttttgtgccatacacccagcaacacaaactatctgccctggatgattagctttgacccctttcaattcaccaattttccctaaaatacgcttttccgcactctcacgcacacaacaggtatttactaccacaacatctgcatcatgaaaatcctcagcagctttataaccaagctcctgcagctgcccagcataatgctcagcgtcactttcgttcatctggcagccataatttaaaattgcataagtttttgcagtcactgaatacacctcatattaaaattgaaactgcatatgggcagcctctcaaaattatctatattatattattatacctttttcggttagcagtggcaaattttaacaattaaaattttaaccaaaaaagcagagcatatgctctgctttacaacattctacttctataccaggccacagtttcatccaacgcttctttaaaagcatattgcggagtccagtccaattcattttttattttttcacaatccataggatatcttaaatcatgccctgctctatcttctgtaaattcaattgcattttcatctttggctaaaattttcagtactaattttataaaggtcagattagacatctcagtgccggctgcaacattataaatatggcctgattttccatgtctgatgattttatcaacagcaacacaatgatccagcacatataaccagtcacgtttatttagtcccgaaccataaacaggtaccttttgaccatgttctgctaaagatatgattttaggcaaaagtttttcacaatgctgccacttgccgtagttattactactgcgactaacagtaacatttaaattatacgttctggcatatgccaagcataacaaatctgctgatgcctttgaggctgcataaggactggaaggctgtaatggcgactcttctgtgaacccatgccagtcataatcaagcggtttatccccatatacttcatctgtcgatatctgatggaatctttctactgcaaatttaacacaggcatctaacaacacacctgtaccttcgacattagttttagtaaaaatagccggagaaataatagaagtatcgacatggctctcagctgcaaaatttattacagcatcgaacttgtactgcgcaaaacaactttcaacaaattgctcatcacaaatatcgccctggatgaaagtgaaattatttaatttaacaacttctgccagagcagccatattagcagcataagtcagcttgtccaaacatacaatttcatcactcggatactgctgtaaatgccaatttatgtaattgctgccaataaatccggcaccgccggtaatcaataaacgcataagtacctctttaaataatcacaactgat

SEQ ID NO: 9977 - DNA, 64156 bp, Unknown
  gut microbiota DNA sequence
tgaatcgccgaaaagaagtaaaaacacacagcgaactcaaaagtttgtactcttctatatagttttgaaggcttaaagaccttctgaaacaatctggtggcgatagctaaggggatccacctgttctcatcccgaacacagtagttaagcccttaaacgtcgaaagtacttggctggaagcggcctgggaggatagaaagctgccggttaaaaaataaccataccatacggtatggttatttttttatgttaggtaaatactatctggccagaccttgccctgggacacatggcaggcaaaaccggaagtagcatgcccgtgtgtattggaaaactgtctgttaaaaaataagcattatatatgattcctgaaataatatagtttgcaaatactaaaaatcttattcaaagtaccaatattttagattattatgaaaaattacaaaaatgtaaaaacgatacattaagtttacaaaaataaatatcttttactaaaaatataaagtttttattgacaatcgaaatgccggatagtaagctataaaagcactttgttctttataaatgaactttattatgtgggggaagatattatgatgaagatgagtaattttagatggaaagttgcctggttgatttttatcgtcagttttgtttcatatatggatagagtaaatctgtctgttgctactcctgttattatgaaagaatatggttttgataaaatagatatgggacttattcaatcatttttctttgccggttatgctttgatgcaggttccaggtggtatgatggctgaaaagtttggacaccggattacaggaagtctggctgtaatttggtggtctgtatttactgctttgactgctgtggcaaagggaaaattttcttttgctgcagtaagatttttgttcggtatgggtgaagggcctatttatcctgcttttgcgattgctattttcagatggtttaataaaaaggaaaaaggcaacgccagctcatttttgttgaacggttcttttttggggccagtaatagggccggctttgactgttgcattgatgtctacagttggttggaaaatggtttttttgatttttggcattgtggggatcttaatggcttgggtatggcataaatatgttcctgaaaatcctgcagaaagcccctatgttaatgaagctgaattagctcatattaacgaaggacgtactgatgttccaattgtaaaaaaagctgctccgtggggtaaattatttacttctgtacagttttgggctattggtgtgcagtatttcatcaccgattatattatgttcgtatttttggcatggctgccgctttatttaatggaggcacacggtttctcacttgcaaaaatgggcatatgggcagcaatgccgtggctgactttgattatcattaccttcagcagcggttatttctgtgataaagctattgccaaaggtgcttcacaatattggatacgtattttatgtggttctgctggaattataatttgttccctggctttgtatattgctacaagaaccgctgatcctatgcaaaacgtaatgtggctatctttatcactggggtcgctgggattgactttcaatgcctcctgggcctgtgcgatcaatttagggggagagtttgccggttctatttccgggtggatgaacttctggggaaatattggtggcgtcatagctccaactttaactgcctggatcgcgaccagctacggttgggatgctgcactgatcgcaacagcgttatcgggtgttgttggcgtattggcgtggtttttagtccgtcctgataaagctattgtataattaattctactgtaaagtacttgcaaagatgagtaaactttgctataatgcctaagtaatcaaataacagacagttcgtgaccatcctgtctcaaaataaaactacgggtgttctgcttaaagcagaactgttttaacatggatgggacgaaaattttgattttcgtccttttttatgtagttccgttcttggtcacagcaagaaaggagcatagtaatatgaaaaatctcactaaaacgcaaaaattgactatttccgccttatgtatggctttatatctggttgttatgatgtgtacgcaaagctttgccttcggacagtatcaggtacgcattgcgacggctttatatggtttgagcgctatctttcctttcctgataattccatttggtttggtaaatgtattggcaaatactctgatgggtggtttgggacctttggatatgttaggcggcggtttggttggtattatgacaagtctgacaatagtttatgctaaacgccatgatttaggtaattgggctgtgatgctggcaattactttagtaccggggttaggagtgccagtctggctttctgtattgctggatctgccttactggctgttagcgtctactgttttagtaggccagtttatctccggtgtcgtgggtatggtattggtgacagctttagaacgctgcgaaatatttaattttgcttcagcaaaaaaataaggaggatttatgacttctggaagagaacaaaaagaattgacaggcgtgagccttttaggcaataaaactaagtatcctacggactatgctcctgaagtactggaagcttttattaataaacatcccggcaatgattattttgtaaaatttaactgcccggaatttacaagcctgtgcccgatgacaggacagccggattttgctgcgatctatatttcctatgtgcctgatcagaaactagtagaaagtaaatcgttaaagctgtatttattcagctttcgcaatcatggcgattttcacgaagattgtgtaaatattattatgaaagacctgatcaagctgatggaaccgaaatatatagaagtttggggtaaatttactccgcgcggaggtttggcgatcgatccatatgccaactatggcaaaccgggcacagagtgggaagcagctgctaaaaagcgtttgatgatgcatgatatgtatcctgaaaatgtaagttatcgttaataagattttactttaaagccgaggactgttcttcggctttttatttttaagataaaatttaataaataaattatgatttgttgctatttttaacacaacaccactttttttcttttataccttgtgctacaatagactaaatgaagatttctgaaaatttatttttagagctagtgggactaaaaatggaccacgagggacaaaatgcgctgggagatcactatggacagtattattaatttacaaaaaaaaatcgttcccgagcttacaaatcttttagttcagagataccagatattaaggcaggtgagccatgagtatcctatcggacgcagggcgttggctgccaggctgggtttgagtgaaagagtattgcgggcacaggtcgattttttgaaaaacggtggtttactggcattttcttctgccggaatgtcggtgactgaagagggcgcggatattctgaaagagcttgctgattatgtccgtaaattgcaggatctgaactctttggaacagtttttatgtgaacgcctggatattgggcgtgtagtcatcattccaggagactctgaccaggaagaggtggtcaaacgtgaaatcggccgtgctgcagcgaggattcttggaaatctgctgaatgacggcaaagaacatatcgttgccgtaagcggtggtacaactatggctgccctggctgctaatgtaagcggcaatgagcctaaaacagttgtagtaccagcccgcggcggtttgggtgataatgttgaattacaggctaatactatagccacagtcctggctcagcggctgggagcatcttacaggcagctgtatgtcccggacagcgtcagtgaagagatactgaatagtattttagcagaggatattggggtcaaatctgtggttgatattatcaaacaggccgatatcctggtgcatggtgtaggacaggcttcagtaatggcacggcaccgcaggctgccgccggaattcataaaaaaactgctggatgacggcgccgtaggcgaagcgttcgggcagtactgcgctttagatggcagacagatctatatgacaaacaacgccggactgatgctgcaggatctgccaaagatcggaactgttatcggcgtagccggaggacggtctaaagcagcagctatcttgtcagtaatcagggcgtcgcgtcaggatatactgataactgatgaagcagcagctcacgacatagtgagaatgttggaaaatgattaaggttacaaggcacattagtgcaaacatataatttgctcaaagcataaaaggaggatttttatcatgacaaaaattggtattaatggttttggccgtatcggccgcgaggttttccgtgttgcttttactaatctggaggtagaagtagttgccgttaatgacttgactgatgctgcaactttggctcatcttttgaaatatgactctgtacatggcactttcccgcatgaagtttctgttgacggtgataatatcgttgttgacggtaaaaaaatcaaagttatcgctcaaacagatcctgctaagctaccttggggtgaattgggagttgagatcgtagttgaatctactggacgctttactgaaggtgaaaaagcaaaagcgcacttgactgccggcgctaaaaaagtaattatttccgcacctgctaaaggcgaggatatcactatcgttatgggtgttaatgagaaaaaatacaacgctgcggagcatcatatcatttcaaatgcttcctgcactactaactgcctggctccgtttaccaaagtgcttttggaaaactttggtattgaaagcggtttgatgactactgtccattcctatacaaatgatcagaaaatccttgatttaccgcataaggatctgcgtcgtgcccgtgctgcggcgatgtccattattcctactactaccggagctgcgaaagcagtttctctggtgcttcctgaagtcaaaggcaaattgaatggctttgctatgcgtgtgccgacaccaaatgtttccattactgatttgactgttgttttggaaaaagatactactgctgaagaaataaatgccgctttgaaaaaagcagctgagggtgaattaaaaggcattatgggttataatgagctgcctttggtttccagagattacaatggctgtccgttgagttctatcgttgatggtttgtctacgatgatggtcggcaaaagaatggcgaaagttgtcagctggtatgataacgaatggggttattccaatcgtgtggtagatcttgctgcctacattgctaaacaaggcctgtaattaaaggagtatatcattctaatggataaaaaaaacctgtgtgatttagacgttgctggtcaaaaagttctggtacgtgtcgactataacgtgccgatggacgaaaccggtaagattaccgatgataccagaattcgtgcttcgttagaaactatcaaatatttactggagcataaagctgcggtaattttgatggcgcatttaggccgtcctaaaggacaagttaatatcaaatacagtctggcgcctgttgccaagcatttggcaaagctgctgaatatgcctgttgcttttgcaggtgactgcatcggtgaagaagctgaaaaagcagtacagaagcttaaacccggtaagattttgatgctggaaaacctgcgcttccataaagaagaagaaaaaaatgatatggattttgccgaaaaactggcatctttagcagatctgtatgttaatgacggctttggtgtttctcatagagcccatgcttcggtggaaggggttacgcattttctgccttcagcagcaggctttttactggaaaaagaaattcgctttgtcggacaggctgtggaaaatccactgcatccctttgttgctatcattggcggtgccaaggtttccgacaagatcggcgtgatcgaaaatcttttggaaaaagtcgataccctgctgatcggcggcggtatggccaatacttttttagctgctcaagggcataaaatgggcaaatctttagttgaagatgataagatcgctttagcaaaagaactgctggctaaggccaaagcacgtaaagtaaaattgctgctgccggtagatctggtaatggcagagacttttgctgctgatgccagccataaagttgaaaaagtagctaagctggatcaaaaatatatggctttggatattggccctgcgaccagcactttgtatcaggatgcgctgcaggatgctaaaatgatcgtgtggaacgggcccatgggtgtttttgaaatggatgccttctgcaaaggtactgaagctgtcgctcaggctgttgctaaaagtagagctatgagcattgtcggcggtggtgattctgtggctgccattgaaaagctggggctggctaaaaaaattacgcatatctccactggcggaggcgcttcgctggaatatctggaaggcaaagtcctgccaggtgttgcggctttagatgatgtacgccgtaaaattgtggccggcaactggaaaatgcataaaaatgtggatgaagcagttgaactggctgaagatatcgtcagtgatactaatgggacgcttaacgaagtagttgtttttccgccgtttacagcactggaaagcgttgctgaagccattgacggtaaacatgtaggctacggagctcaagacctgcattgggaagatgaaggcgcttatacaggtgctgtttccggtaaaatgattgctgatatctgcgctgaatatgttttgatcggtcattctgaacgccgcaccatgttcggtgataatgaagtggctgttgctaaaaagatgcgagctgcatacagaaatggtttgaaaccgatgttatgcgtaggtgaaaatgcccaggagcgcgcagaaggaaagacttcacgtaaaatcagcatgcagctgaaaagtgccttaaagggcattactcctgatgaagcggaagttttggttgttgcctatgaaccattgtgggctattggcagcggtcaggctgcaactgctaaagatgctcaggaagtatgcctgctgatcagaaataaactggaaaaactattttctgcagatatcgcgcgtaaggttcgtgttttatatggcggcagcgttaatgctaaaaatgccgcagattttgcaatcagcggtatcgacggagttcttgtaggtggggcgagcctggatgcgcaagcgttttctgctatcgcacgcagtatataaggggtgacgaaaatggcaaaacggccgctattgctgatgattttagatggctggggtattgctccggcagggcagtataatgcagctgctttggcaaagacacctaatttggatgctttgttcgacaaatatccgcatacgcgcttatcctgttctggtgcagccgtaggcctgccagacgggcagatgggtaattccgaagtcggtcacttgaatatcggggcaggacgtattgtctatcaggagctgacaaggatcactaaagccataaaagacggtgacttttttgaaaacactgttttgagtaaagctatgcagaccgtaaaagccaacggcagtgcgctgcacctgctgggtcttgtttctgacggtggagtgcacagtcatatcagtcatttgtttgctctattagaaatggctaaacggcagggcctgaacaaggtttatgtacatgcttttttagacggacgcgatgttggaccgcagactgccgatgtttatctggcagaacttgacgcggagacgaagcgtatcggcgtgggtaaaatcgctacagtagcagggcgttattacgctatggaccgcgataaacgctgggaacgtgtgcagaaagcttatgacgctatggttttgcatgacggcactgtttgtactgatgcggtcagcggtgtgcgtgcttcttatgcgggcggggtcactgatgaatttgtagttccgttcatagctgcacctgaagcagattcctgcgtcaaagccggtgacggcatgatttttttcaatttccgtcccgacagggcaaggcagctgaccagagcatttgtagatgaagaatttccttattttgcgcgtcctcagacagcccgtccggtaaattttgtttgtatgacgcagtatgacgaaactataaaagctcccgttgcctttgctccggaaacgctggaagatacgctgggcaaagtactggctgaccacaagcttcagcagctgcggatcgccgaaacggaaaaatatgctcatgtgacctttttctttaatggcggcgaggaagaaccgaatatcggtgaagacagagttctgattccgtcaccgaaagtggctacctatgatctgcagccggaaatgagcgccgagcttgtgacagataagctggcagagcttctggatacagataagtacgacatgataatattgaattttgccaatcccgatatggtagggcatacaggcgtgctgaatgctgctgtcaaggcaatggaaactgtcgatgcctgtgtagggcgtattgttgaaaaggtattgtcactgcatggaacagcctgtattacggctgatcatggcaatctggaaaagatgcttgacgaaacgacaggacagccttatacggctcacacaacgaatcaggttccttttttggtagtcagtgatgaaaaacatactttacacgaaggcattttggctgatattgcgccgacgctgctggaactgctgaaaatcaagcagcctgctgcgatgacagggaaaagtctgttaacagataaaaataaatgatgaggtgaagttagagtggcaatgattactgaagtatatgcaagagaaattttggattcccgcggcaatccgactatcgaagtagaggtttgcctggaagacggttccgttggacgcgctgctgttccttcaggagcgtctaccggcgcgcatgaagcggtagagctgcgtgacggtgataaaaaccgctatctgggcaaaggcgtgactaaagcagtcgataatgtcaacgacgttattgctgaagctttgattggactggaagcaacccgtcaggtagaaatagacgagatgctgatccgtttggacgggaccccaaataaaggaaaattaggcgccaacgctattttaggtgtctccatggctgtagccaaggctgccgctgcttctgtagggttgccgctgtatctgtatctgggcggtgtttccgcacaggagctgccggtaccgatgatgaatatcctgaacggcggccagcatgctgataataacgtcgatattcaggaatttatgatcatgccggtcggtgctgcaagcttcagcgaggctttgcgcatgaacgctgaaatctatcatggtttaaaggccctgctgaacgctaaaggactgggaacaggcctgggtgatgaaggtggttttgcgccgaatctgaaatccaatgaagaggcgatcgaagtcatccttgaagcagtgaaaaaagcaggctataaaccgggcgaagatatcatgatcgctttagacgttgctgccagcgaattttataaagatggaaaatatcagatggaaggcgaaggtttggtaaaaacctccaatcaaatggtagattatctggctgctttgtgcgaaaaatacccgatcgtttcaatcgaagacggtttggcggaagacgactggaagggctggaaagcgcttacgaagaaattaggcacgaaagttcagctggttggcgacgatctgtttgttaccaatgaagaacgtttgcttgaaggtatcaaaaatgatactgctaacgctattttgatcaaagtcaatcagataggtactttgacagagaccttcaatgctattgaaactgctaaacgggcaggctatacctgcattatttcgcatcgcagcggtgaaaccgaagatactacattggcagatattgccgttgctgtcaatgccggacagatcaaaacaggtgctccggcacgtactgaccgcgtggccaaatacaaccagctgctccgtatcgaggaagacctcggcggcgctgccaagtataaaggcaaagctgtattttacaacatcaataaataatcggagtaacggttattttgaagcagggcagataccggacgcgtatttgccctgctttttactaaattttgtacaattttttatattttaccgttgtaagctgtataacattatgatagaatagttaggtactaagtaaaagaggaggtaagctttgtgattgcaactgtcttaatggtattagacgtaatcgtctgtatcgccttgatagcgtctgtgttaatgcagtccgggaagggctcaggcttgtcagatgcgttcggcggaggcggtggtggtgccttcttcggcaagggtaatgatgttgatactttaatggctaaagttacgattggtttgggtactgcttttggtatcatcacgcttgctctggcaaaaatcaacggttaatttggttaaaaagaacgctctgcgttcttaatttttaaaaactcaaaagaaacagaaaggggattaatgttttgagtacttatttaattttatccatagtcgtcggtcttgttgccctcggcgtggcagtaatgctcagtaacgctatcagcgctgctaatgccggtactgcccgtatgaaggagatcgctggctatatccatgaaggtgcaatggcatttctgtacagagaatacaaatatcttgctatcttcatcgttgttgttgctgcaattattgctacattcttatccgtaagcactgcgctctgctttatcggcggtgctgtattctccatctgcgcaggttatctgggcatgaacgtggctactaaagctaacgttcgtacagctgaagctgcccgtcatggcatgagcgaagctctgaaaatcgctttctccggcggcgctgtaatgggcctgggtgttgtaggccttggcattgccggcctgtctgtagcttattttgtttttgaccgtaacattgatattgttaccggttttggtctgggcgcaagctcgatcgcattgtttgcccgtgttggcggcggtatttatactaaagctgctgacgttggtgctgaccttgttggtaaagttgaagccggtatcccggaagacgatccgcgtaaccctgctactatcgctgataacgtaggcgataacgtaggcgacgttgccggtatgggtgccgacttgtttgaatcctatgtaggcgcaattatctccgccttgactctgggtgcagttgcatatcccggcggtgaaggtgtcgaatttgttttcatgctggctgttgccggtatccttgcttctatcatcggtgttatgtttgcccgttccagcaaatctcaaaaccctcaggctgcactgaacagcggtacttacatcggtggtgctatcgttatcgctgctgctgcttatctttccaacagcctgtttggttctctggatgcattctgggctattgcagcaggtctgcttgttggtatgatcattggcaagatcaccgagatctatacctctgctgatttcgggagtgttaagaaaatcgctcaacaatccgaaaccggtccggcaaccactattattgccggtttggcagttggtatgtattctactttctggcctatgcttttcatctgcatcggcgtaatcgtatcattctttgtaatgggcggcgctactaacggcggcatgggcctgttcggtatctctctggctgctgtaggtatgctctccaccaccggtttgaccgttgctgttgacgcttatggcccgatcgccgacaatgccggcggtattgctgaaatgtccgagcttcctcctgaagttcgtgaaatcactgataaacttgactcagttggcaacactactgctgctatcggcaaaggctttgctatcggttctgctgcacttactgcactggctctgttctctgcttatgcgcataccgttaacctcactaccattgacttgctcaaccctgtaactttggttggcctgttcatcggcgcaactctgccgttcgttttcggagctatgaccatggaatctgttggtaaagccgcttacgaaatgatcgaagaagttcgtcgtcaattccgtgagatccctggtttgctggaaggcaaagctaaagctgactatcgtaaatgcgtagatatctctactgctgctgccttgcacgaaatgattctgccgggcgtcttggcaatcgttgctccgctgctgatcggtttcctctttggtaccgaagcattgggtggtatgattggcggctctttggcagccggtgtgctggtagctattttgatggctaacgcaggcggtgcctgggataatgctaaaaaatacatcgaatccggtgttcatggcggtaaaggcagtgaagctcacaaagcagctgttaccggcgacaccgtaggcgatccgttcaaagatacttccggacctgcaatgaacatcctcatcaaattgatgactattgtttccttggtatttgctccggttctggctgctcatggcggcattcttctgaacttctttaaataagaattgtaagttgtttgtaaaatcccacatcttcggatgtgggattttttttcatatggtataataatatagtataagtaagattaggagcgtaattacagtgcagtcattcagtggtaatgaagaatttttctttcaaggcggcaaacagggtgtagtattggttcacggttatacgggagctccgggagagatgcgcctgctgggagaatatctgtatcagcaggggctgacagtactgggcgtgcgtttagcagggcatggtactacgccgcaggatctgaacgagaccaaatggcaggactggtataaggctgtaagcgatggtgtgtatcgcctgcaggctggctgcgatagagtttcaatagtgggactgtccatgggaggactgctgactattaaagctgcggctgaattgccagtagcgaaagcggctatcctggcagcgccgatttacgtttgtgacagaagggctccttatctgccgttactgcgtttttttatccgttacctgaaaaaacgtcagcgccagtatcaggtgccggcaagctacagcgtttgttaccatatgatgccggtcaagccgctgagcagcctgtttgagctggtcgatttgtgcaaaaaaaagtatttgcagtcaataaaaataccctgcctggtgatgcagtcaaaagtagagcatacggtaaaacctgccagcgctcaatatatttatgatcatctgggcacagctgataaaaaacttgtttggtatcatcattccggacatatactgacccttgataatgaacgggatgatgtttttcaaaaaatttatgaatttttgatggagtaagaaaatgcaggaaaaagaatatacctggtgctttgcctgcggcaaagataatcctatcggtttaaaaatggaatttacaatggatgccgaggaatgtgtggcttattttacacccagacaggagcatcaaagctatgacgggagaatgcatggcggtctgatcagcgtcttactggatgagatcatgggccattacctgttcgtcacagaaggaaaacctgcctatacggcaaaaatggaactgcgttaccggcagcccgttatgattggtgaaacggtaaaatgtgtaggccggcgtttgaaacaaaaaggccgtctggtagaaatgcagggccaaataattacgaaagatggcatcgtagctgctgaagcagtggcaaaaatgatgcttgaggaaaataatgcaagcgaaaagcagtaaaacaacaatattagattttatgcggagcagttcgtatgcaccgcagacagcagaagcactgatcgaaacgatccccattagcggaaatcttgatcacttctggaaagacctgctggaactggaagaaaacggcgagattattaaaacccgtttcgggacctacggcctgcctgaaaaaatgggcttggtcgttggcagattccaactgaccagcaagggatttgggttcgtgatacctgataacaaaggcgaacgtcccgatgtattcattccaccccgagctttaggcggggcaatgaacaatgaccgtgtaatggcacgtgtggaaagctccagcggcggcaataagccggagggagagataattcgtatcatcactcatgcgaataataagattgtcggtatttttcatcaaagcggcgattttggctttgtaacacccgacgataaacgtatcgggcaggatatttatattatgaaacgacatttcggcggggccaagaccaaccagaaggtagtggcagaaatcaccgaatggccggttgaacggcgcaacgccgaaggcaagatcattgagattttgggcaacgtaggcgatgtggggctggagattctttcgatcatcaagcagaatgatctgccgctggaatttccgccgcaggtcatcgaagcctcgaaacgtgtgcctaaaagcatcaagcaaagcgaattggaaggcagacgtgacttgcgcgatctgccgatcgtgactgttgacggtgacgatgctaaagatctggacgatgctgtttatgtgaaacagcttggcaaagatgaatttttattgggtgtacatatcgccgatgtcagctattatgtaaaagaaaacgctgttttggataaagaagcacgtgagcgcggcaccagtgtctatctggtagacagggtgctgcctatgctgcccgagcgtttatccaacggtatttgcagtcttaatgcaggcgaagaccgcttaacgatgtcctgtgagatgcatatcgaccgtaagggccgcattttaagctacgagatattcccatcggtcattcatgtccgccaccgtctcagctaccgtatcgtgcgtgagatactggtgaacggtgacgaaggactggcgcagaagtacgaagatgtagtaccaatgctgaaaatgatggaagagctgtgcctggtgctgcgtaaaaagcgtacgacacgcggtgctattgactttgatctgccggaacaaaaggtcattctggacgaacagggccgaccagtggagatcgtgcagcggatccgcagcatagctgaatctattatcgaagaatttatgctggcagccaacgaaactgttgcgcgccatatgtttaaccaaaagtggccgtttatctaccgtgtccacgacttgcccaacgaagaaaaaatgaaagacctggccaagcttctggccaactttaacgttaagctcaaggtcagcgaagaaacgaaaccgggcgaagtgcagaaagctttggcggaaatggctggcaagcctgaggaacggctggtatcgacagtagctttacgttcgctgaaacaggctgtttatcagaccgagaatattgggcactttggcttggcggcagagtattacacgcatttcacatcgccgatcaggcgttatcctgacttgatagtgcatcgtctgctgcatgaatgggtgagcgacccggcaatgaatgcccaaaaaagcgaaaagctggaactgaaccttgacgcgatcgccgaacattcctcgatccgtgaacgtgcggctgcagaagcagaacgtgctacggtcgatttgaaaaaagcggaatatatggccggccatatcggcgaagaattcgacggagttatttccggcgtcactgccttcggaatgtttatcgaactggagaacggtgttgaagggctggtacatatttccagcctgatggacgattattatgagttctatgaagacagatacgccctgctgggctcgcatacacggaaggtctaccgtttgggtgacccggtgcggatcgaggtcttacaggtcaatattgccgacaggaacatcgactttattatggccggtgagaacgatgctgtgcgcgacaggatcaaggcccagcttttagggcagcgcagccatgcttcggcacgcagcgcgatagaaaaaagcggcggcaaaaaacagggtaaaagcggcagtcgcaaaaagccgctggagaaacgcggcaaaggcggcgttggcggcaataaatatgtcaatcacgcgaaaagcaagaaaaaaggccgcaagaaaaaataaccacaaccaggtgaacaataatggcagaaaagaaaatcaaaatcatcgcggaaaacagaaaagccagacatgattttacgatccatgaaacctacgaagccggtattgagctgacaggtacggaagtaaaatcactgcgggcaggcaaagccaatatgaaagacagctacgcccagatcaccaaaacggccgaggtctatgtttataacctgcatattagcccttatgatcagggtaaccgtttcaaccatgagcctttgcgcaaccgcaggctgctgctgcaccgcgaggaaatacgccgcctgatcggcaaggtcaaagaaaaaggctacgctttggtgcctttaaaaatgtattttactcacgggctggtaaaaatggagctggcgctggcgactggcaaaaagctgtatgataaacggcaggacctggctaataaagacgccaggcgggaaatggaacgcgcaatgaaagagcgtaaccgttaaaagttgcatattcttcacaggacgtcgcttgcaagtagcaggcgcctgtgttagaataattagagccttacaggccatatttataaacggggatgtactggtttcgacgggggtaggtgtggtatgataagcgagccgtggttccgttagcacgttaaacggcggacgtttaaagtaaacgcaaaaactgattacgctttagcagcttaatgctaacgtctttccgatcctcctcccatgggaacggaaaagacgcaaacagtgggatacccgtaagccaattctcggaggcggacaggggaaactcatcgagatagcgaccgcgaagcctgccgcttggcgtcaaggaagcaaaatctaaattagcggctgcgctcggagaaagtcatattgcaatattttcggacaggggttcgactcccctcatctccaccaattgcactaatttaaaacttatcataaaatacgaccctggcgacaagccgaaggtcgtatttttttatgccgtgacagttgtaaaaacaacggtaaatatttgagtgtaactaatgtttttaaaagtatcatttgtaaaatttaaaattatttaaaatatactaaatgttgaaaaagttttactatagttgactttgttatacaaaatgctataattgtattaagaaaataggaggtgttttatgaaattatctaaaaaattatttacagcaggaattgtcgctgcactgaccttgagcgttgccgcatcggctttggcggcagaattgactgttaaagcgaaaaaaatcaacgaaggccaggtgaaaatatccacaccggtcatcaccggatctgaaggcggcgtaaagatggatacgctgttgacgcaaatgactaccaaaaatactgtagctgagatctataaatatttatccagcgacagccagaaaatcactttagacaactatcttgatttcactaacggttctcctgatcctgtcaaagaaggctttgcacttgtaaaaggcagcgctttccttgtaaatgcaggttttgataaagaacaaaaggcactgggcaaaacacaggctgctgaaaaatacagattggatatcgactatactgcttatacagtcgattccgaaattttatcgttggaacaatacgccagcgcttataccggcggtgcgcatgacaacgaatctatcacaacgctgaccgttaacccgaaaacaggcaggatctataccctggccgatatgttcgttcccggcagcgactataaagcacgtttggaaatgctgatcgctatccagcaaaaaggcgataacagattgctcgaacaaatgaaaaaaccaaccgttgcttatcaaaaagttattatttccggtaacgaaaaattctatctgaattctgatcttgataactggggcatttatgttgtttacaacccgggtgaagttgcaccgatggcagccggtatccaaaaatactatctgcctatcgatacgatctcagatattatcagctatcaactgaaataagtaaaataaaaacagacacgcttatgcgtgtctgtttttttatgttcttttatttagctttaggcagctgagtcagcagctgcagttgactgccgtcatcaaagctgacgctgctgatggtgacctgccattttacagtcttcagatcactgcgcagcaagcggacagtttccggtttgaactggttaaggctgaacagttttttcaaactgctgctgccctgcggggccaaagtcaggtaatcgttgaaacggcagcgctggagcagcataccgtcgttatcgaaaacctcgacagatccctgcagtccggtaatagttttggcagagatattatttaaggtaaacgtgttttgcatggtataagaagggaaccagccgccgctggaatcgatagagatagttccggggacggaggtaacagcggcgtcaagctcggcctggaccttgctgttaagctgtttgagctttgcggcagtagcctgttcgcgctctttcagcagctccttgaggttggtgatttccgtcaggcgccagctgccgtcgtccaattcgtacattttgacatgcaggataaaattatgttctaattgtttatcgtacagcttgacggcaacatcggcagttttgccgacctgctcgctactttcgacaccttcgtagcgcatcgtgccgaagccggtacgttccttaagctgctcggccagctgctgaccttctgttttcgggctgggtgcaggagttggtgctggggcagtgtcgtcgatatcactggtttcctctgtattgtcttcgatcgaacccgtttccacataatgcttggtctgctcggtcatgattgggacaactacacttttcaggctttggacgataccgagtaaaaatggattggcctctttgggatcgccaaaggcataatagactacatcgtcatacgcgtgggcatacagtgaattcaaatcaacatgcttttcgaattttgtcagatcatgctgctgtacagcctcgtggatttgagtaaatgtatattgcggcgtacgcatccagtaaaaaaaatacaaggcggcgccgataacgatcaaagcggcagtgataagtatatattttttattgttttcactcatggcaaactccttattaatgctggtataatcattttaaagataataacagggcttgtcaattaaataaaaacaatagtcagcctgctgaaaaacttaacggcgcttccaataagggcaagcgccgttaaaaatattttagtttttaaagtcttccggctttaccaaaccacgctccaaaaggaaggtgcgggcaacctctgcccggtcacggcctttttcgaccacttcatagttcagcttctgcatcgtagcgtcgtcaatggcgctgttcagtacagacaatgcctgagctatctcaggatattcggcattggttttgccgttgacgaaaggcagcatataatatggcggaaagaaatttttatcgtcttccagcagtactaaatcatatttctgcagcagtccgtccgtcgaaaaagctgttatcacatctacattatcagacgtgatcgcagtatacatcagcgtcccggagaaattattgaccgatttaaaggtcataccgtaagttttttcgatgcctggcaaaccgtcgtcacgggctgcaaattccggcgaacagccgaaacgcagattatgactgacacgggtcagatcggtcatcgtcttgagatggtatttagcggctgtcgcctgtgttaccgctaaaacgtaagtattgttaaaaccgaagctttccagcagctcgatctgatgcgtgtcccgcatctgctgtttcaccagcgtatacatctcatcaggtgtaaaaccggggcgcagcttatttttcaaaatcgtgctgtaaccggtgccggtatattcgggatacaggtcgatctctcctgaacgcagggcctcaaaagcgatcatcgtgccgcctaaagccagcttgcgttcaaccttaaggtcggttttagcttcgatcaggtcggacagcatattaccgatgatcacgctttccgtcgcgtccttagagccgatgcggagatcatgcttatttaaaaactcgtggctcagcagatagccgctgctgataataacgatcataccggcaactgccaggatgcgtttatgatgctgcttggtacgttccaggctttccttggacattttttttgaagccgggcgcagtgaaacaggtgtgaccgcagtttcgaccttgctcatcaaaaaatccattaaaagcgccagacagcaggcagggatcgcgccggccagaatcatattcgggttgtcggtctggataccgctgataaccagcgtgccaagaccgccggcgccgatataagccgcaatcgtcatcagccctaccgcagtaacgctggaaatacgtatgcctgccatgatcacaggcagagcaagcggcaggcgcaccttaaacaacacctgcatatccgtcataccgataccctttgccgcttccagcgtgtcggcgctgatattgcgcagaccggtacaggtatttttcaaaatgggcagcagtgaatacaaaactaccattgctacagcagtaactgcgccgatacccatataagggaccagaaaacctaacagcgccagactgggaatagcctgggccagattagcaaaacccattaccggccgcagcaaacgctcgcgctcggaaatgtaaatgcccaatggtacgccgatacaaacggctatggcgaccgaaagcaaagtcagctggatatggctgagcagtaaaagtcctatatattgctgctggtcctgtacatatgctaataatccactcatgcttcgccctcctcaaagtcaataaattgctgactcatcgtcgtgacgaggctggaattagtgataagtcccagcagccgcttattttcatctacaacaggaacattggaaatattattgctgtttacctttttaagcagggccacaatgttctcgttggggtctgctgtcgcctgtgccggtttcattaccgtatacaccggctcgctcttatccggcgccgcatgaatagaacgggcgcggatgatccccaataaatgttcgttttcatcaacgaccaaaaggctgtcgacgttttcgatacgcattttctcgatacatttcagcatcggcacatcggggtaggtgatcttcggcgtgcgtatcataatatctttggccttgatcagttcggggctgctccaaatgcgcttagaacctacaaactcgctgacaaaaccgtcggcggggttcttcaggatattttccggggtatcatattgcagtatatcgccggaatgtaaaatacagatacggtcagcgatcttcaccgcttcgtccatatcatgggtaacaaacacaatagtcttgcgcagcttcgcctgcagattgacaagctcgtcctgcagctggctgcgtgtgataggatctaatgccgaaaacggctcgtccatcaaaatgatgccggggtccatggcaaaagcacgggctacgccgatacgctgctgctggccgccggagagatgattagggtaccggtcaagaaattcctgcggcagtcctaccatttccatcagttttactgtacgttcaacgatctcatcctgcggcagcttggccagatgcggaacgatctcgatattttcgcgtaccgtcatatgtacgaacaggcctgtctgttggataacgtaacccatatttctgcgcagttcgatcgggtcctgtgcaataatatccgttccgttgatcagtatctgtcctgacgtagggtcgatcagacggttgatcatcttcagcagcgtagttttaccgcatccggaaggtccgataagtacgaccagttcaccttcgttgatcgaaagattgatattttctaaaacattgtgctgtttgtaagctttacttacattgataaattgaatcaatagggttgcctccttgtctatgttttgaaattatgcctgcgtctaaagtgaagttccacttgatgctcatctcctttcatatatatagtaaattcatatattcgctgtaagctgtgaatattcctgcaaggtaatataataacagaaaatttaatttattatccttattaataagaaaaataaatattaagctatagcaataatagtatcgcaataagtgatagaatttatggaccgctgccgcagatacaaaaaacgtgttataataacagcaaaagcaaaggagtgagagtatgatttttatatgttatcccaaatgcagcacttgccggaaagccgaaaaatacttacaggatcataacatcgaatacacaaaacgcgatattaaaacagataatcctactgctggcgagctgcgctcctggcagaaaaacagcggtctgccgctgaaaaagttttttaataccagcggcctgcaatataaagcactgggtctgaaggataagctgccgcagctgaacgaagaagaacagctgcagctgttggctgctgacggaatgctggtcaaacgcccgcttttgctgacggacggtaacgtactggtcggttttaaagaaacggaatgggcagaaaagctgctgtaaaagctatacctttcatagattaaaaagacctgacaggagaatataatttatagaaaatagtttgtaaactatagataatattttgaaagtataaaaagtttagagaaaacagtgcgagtgtaacttctgcaacacaaaagcggttgaaaaaatgtaaaaaagcctgtataatcagggtagagaaagcaaagatgaactccgataagccgatgacggcatatatcggagttttttgtttatctgcagttttttgtacggatagctgtattaggattctgacgcttttttatgcagggcgttgagcccccggcattttttaatacataagtttaaagcaaagggtgtgaaattatggaagcggacaaaaaaacaacaaccgaagaattaggattcttcaaaaagtatggcttttatctggcacttgctgttctggcggtgatagttatgctgccaaacccggaaggactttccgtagcaggccagagaatgatcggcattatggttttttcggtcatagtctgggcgacaacggcgatctcgtacccggtcagcgccggcgtcattatgacgttgatggcgttgttgatcggctttgcccccaaccccgaaacaggtaaactgttcggtacggcggcagggctcggtatcgggctgaagggctttgcttcaacagcgttctgtttggtagcggcagccatgttcctggccgtagccatgactaaaacagggcttgataaacgtatcgcgctggtgatcctttccaagctgggcgcaaaatcgaaccgcgtcgttatcggcgtcatcctctgcggcttcatcctcagcttttttgtacccagtactacggcgcgcgtagcctgcctcgtaccgatcgttatgggtatgatcaaagcgtttgacgtaccgctgaaaagtaaattcgcaggtatgctgatgattactgtagcccaggtcgacagcgtctggaacgtcggcatcaaaaccgccgccgcgcagaatatggtggccgtaaactttatcagcagccagctgggagtcgatatttcctggctagactggtttgtcgccgcagctccgttctcactgctgatgtccatttgcctgtataagctgatgatgcacctgatgccgccggaaatcgacgaaatcaagggcggtaaagaaacagttgccaggctgctgaaagaaatgggcaaggtcagtgtcgatgaaatgaagctgctggttatctccatcttcctgctgatcttctggactaccgaaaagaaactgcacccgatcgacacatcgacaacaacgatggtcgccgttaccttgctgctgctgcccaagatcggcgttatgagctggaacgacgttgttcataaagtaaactggggcacagtgcttttatttggcgtcggtatttcactgggcactgccttgctttctactaaagccgctacctggatggccaatgagatagtagttggcttcgggctcgaaaattcgaccacgatcatggtcctggcgatcatgtccctgttcctcatcgttatccatatgggctttgccagtgcgacaggccttgctgcagcgatcatacctatcatcatttccgtcctgcagcatcttaagacccctggcgtcaacatcgtcggtatgacgatgatcctgcaatatgtcgtcagcttcggttttatcctgccggtcaacgcgccgcagaatatgatcgcctacggcaccgacacctttgaggtacatgactttgtcagggcaggtatcccgcttacgatcattgcttttgcgctgatcatgattctgggcgcaacctactggaaatggctgggactggtctgagatacagttgttttgcagattataaagataaaaaacatatgtaaataaagtaaacggtactcttttcagagtaccgtttttttgctgactctcgcatagagcagcacttgtttgccggatatgcttctgacaaataaagtacagggatacctgcttttaccaaagtgcgaaaataaactgttagaaaaagattattgattaattaaagtaattttaattaaaattttatcgtttgcttgtgtgttcattcgagcctagaatagtggctatgttagatgcttctaacagcattatatatttggagatggatcaagatgagaacacaaagcaattatatgggaaaagcaaagcttcagaaaaaagttttaacaactattatgacaggatttttatttgccggtatcagcaacacagcgctggcagacaatgtttctgtgccggacagcaaaaccgacgcgcagaccattggcgcaggcaatacagccgcaggcgatggctggagcgtagaagtaggcagcgacaataataaatcagtctacagcgttggcgataaaaacgccatcagcctgcgcgataacgccgttatccatatcaaggagaacgccgttgtcaccaacgaagctaccaggaacatcggcaattttggcactggcgccaatactatcgaagtccgttccggttctaagatcactgttgacggcacagtgcaaaagtatggtccgcagaatatgggcgaagcgatcaacgtgcatggcggcggcaatacgatcgttgtcaacgggtcagtcattgctgaaaaaagtgcggctatctggtttcaggactggaccggcaccggcaacgacagcaggaacagcgtcatcaataatggcctgatccagcgcacagacggcggcaacgtcatcggcacttccggcggtaacggcatcgactttaccaacaacggtaccgtcaacggcagcctgttttttgccaaaggcgatgataacctgacttttatgcccggctccaatgttacaggtaatatcgatggcggcggcggtaacaataagcttaccttagacggcggcagtgataaagtaggcggcacactggacggcgctatcaaaaattttacgagcctgactaaaacaggtaccggcctgtgggagataaccggcccaatgcagggcttcgacacagtagacgtgcagcagggcggcctggggctgagcggcaacaatgacggcttcacaggcaagatcacagtcaggaaggacgcctctttaagcgccaaagctgaaagcctgccggtcaatcatccggtcaacggcaatgtggggaatatcgaccttaccaacggcgggacgctgatttttgaacaggatgataatggcagctatcaggggcagatcatcggcaatggctcggtgataaaaacaggcagcggcatcgtgacattgcggccggatgccggagccaatacctacagcggtgtcactaccattgatggaggcgggctggcgatttcctcgcaggacgccttgggcactaacagtgatttgaccatcaataacggcagcctgaccgcagaagccgatctgactatcgataaacgaatcaatcttgcctcggcagaagctaacaaaacggcggtcattgacaccaacggacataacgtgattgcggcaggcgtgctgaacggcgtcgttgacagcggtacttttattaaaatcggcgccggtacgctgactgcggccaataacgacaacagctttgccggaaacgtcgaagttgccggaggcgcgctgcagatagacggcagcggcagcaaaaactttaccggcaagatccgcgtactgcacgaggcctttctgcagggctccggtaaagtagccggcgacgtagtcaacgcaggctggctggcgccgggcagctataccgataagttcggcacctttaccgttggcggcaactatacaggccagccaggcggcaagctcagtatctattccgttctgggcggcgatgcttcgcctacaagcaagctggtagtcgaaggcgataccgaaggctcacctaccaatatcagggtcatcaatcaaaacggcagcggcggctataccgataaaggtatccttattgtcgacgtccagggtaagtctgatcccaatgccttcacactggcctatgactataagcagccagacggtaccgctgctgtcgccgctggcaaatacctctatcacctgcaatatgatccggaagacggcgactggtatttaaaaacattgctgaacaaagacgacacacccgtcgtcaacccttccgtacccctttatgaagcctatccggagatcatgctgggctatatgaaagtcaataccctggaagaacgtgtcggcaaccgtaagtggcatatcatagaggacggcgaaccgcagcagcatttgcagtatcaggaaggcacctggttcaagaccgaaggactgagcggtaaatataaagccgaccgcagcaccgctgccccggacagcagctatgatgtcgattcgtggaaaatgaagatgggctacgacaaaataatctcccgtcaggacgcggcaacaacagttgtcggcggtttgaacctgcaaatggggcaggcgcgggccaggatcaaatcagcagtcggtaacggcaaaatcaaaagcgacggcaaaggcctgggcggtactatgacctggtataaagacaacggcgtttacgtcgatacacaggcgcaggcagtctggttcgacagcgatatctcctccagctcctcggctgcagcgcagcagatcgaaggcaacaaaggctttggttacggtctgagcgtggaaacaggcaaacggatcgccctgaaacgcccgcattggtcatggacaccgcaaatgcagcttgcttacagcaatgttgatttcgattccttcagcgacgtcaacggactggcagtaaaacgcggcagcgccgacagcctgcagggacggtttggcgcagcactgaactatgaaaaaagctataaaaacgaaaatgacgaaaattatcgcagtgtaaaagcctatggactgctcaatgtctatcatgaatttcacgacggtactaacgttttgatcgccggcgacaactttgccagcaaaaatgaccctacctggctgggactggcagtaggaggcacttataactatggcagaaattcgcagtactctctgtacggcgagctgggcatcagcaccagcgccaaaaacttcggcgacagccatgtacttcgtggtgaagtcggtttcagatatcgtttttaaatataactgcctgctgcaaacaggcaaaaataaaagacgcagctataaaagctgcgtctttttatgttacgcaccgttaagctggcacaatgacgtcacaatcaaatgtcgatccccaaagcctctttaacgagcaggccgataacaaaggaaaaagcggcaacgctaaggctgataagcgccatctcccagaaacgctttttaaaatccaggtccttggcgaccgaaatataataagtaaacaccaggattatcagcaccacagtcaccagcatcgtgcccaaagcgtgcagataatgctcgtcatcaaaaacaagatagggcagtaccagcagcgccacggtaatgcagtaagcaatgccggtataaacgcaggacttaaaagcatcctcgcgtccttcgctgcgggccgaaagaaattcagacgaagccatcgacaaagttgccgaaaccccggtgatcagccccgataacgcgatcagcttggtattctgcagcgctaaagtcagccctgccaaagtacctgtcagctcgaccagcgcatcgttcagccccagcatcatcgagcccacatactgcagccgttcttcgtccaatatcgccagcagcagctgctcgtgccggtcctcgtcctcggctatcttctgcgcctgcggtatctcagcggctatatcctcataattataggcagcgtcgccctcgttgccctccatcagcttcagggcaaaagtataaccaaagatcaccgacagaaaagtataccaccagaccttccattgtatgggctgcaccttttctttagtaaaagtctcccagatctggtagtggcggtgctcctcattggctattttcagcagcgtcgccttgttctccgggtttttgacaaagcctgcgaccttggtataaatatggtactccgtcagctcgttctgctgcatttgcagcacccgttttttgatctccgggctcaaaggttttatctcaggcatcctaatcaactccgtataaatttattcattgaataacattatactgcaatcagctgcagttgacaaagtaggcggacgatttgcagataaaaaatctaaatatattaataaaaacacctgcagaagcttaaaagctgtgccggatgtaagctgatgatgctttcgctgtccgtaaatattcaagttcataaccgaaaaaacagacaggctgaaatcatagtttcagactgtctgttttcttattgacctgccgccagggtaaacttcttttccagatgctcgatcagctcacgcacccggcgcttgctgttcgccgggtcaaacaaatcaggctcgtgacagtctgcccggtgctcctgcgtgcgccgccgtgccagcagcagccttttttgagcgtcatgaacagcttcgtccatatcgtgcagccgcggaaaataacgctctccggccagctttttgacgcagcctgtaaacaggcccgcctctaaagctccataacgctcgacccacagctgcagccaaaattcctcctgggaagggccggcaagcggtgaatgcaggccggctgccttaaacgtcaccaaagcacgctgcataaaaacatagggccgttccatcagcgcagtccttcctgcctaaggccgaaagcccggcgcagagtatccagcgctgcctttttagagcagtacacgctctggctggtcacacccagtgttgccgcaacctcgcgctggcttttgccccgcaggaacacctcgctgatcacaagccgctgcatctgcggcagccgtgccaccagctccagcaagcaggcgctgcgctcatccctgctgatgctttccttataacattcgctggccagggcatccaggctcgtgcagccctcctcgtccaaagttgccagctccgcatcgaaccggttcttcttcttttgcacctggatattgagctgacggcggatcgtatattttacgtgtgtggcaaaaaagtggaaattgtgctgcttaaagcttttgatagcatcattgacagccatcaaagccaggacctccgtatcgtcctgctccagataatgtacataataactgttatatttaaacgcccgtaccatcggcgtaaaacccagcaaaaggctgttgaccgccatgctgtcgccgcgctgtgcctgcggcaccaaaacagcaaaatcaagcttctgtatatttgactcatgttccatctgtgatctatctcccctcagtaccggctgcgccggtttttaaatctaaagcagccaaagcaaaatccttggccgtcagcccttccagacattcgctgcatacttcgccgcagcagtccacagcaagatactcgtcaccttcaaaaataggattgccgcataaactgcaggtatatacctccagcagctctgcattctccggggccgccagccagtcgttttcgacagcggccaaacgcttctcactgctcctgcagtcataatccatcattgccgccgcctttcacaaataccaataaattcaaaatgatacgcctccttagatcgttaaaacaccgccgtcactttactgtactttcttagtaagcactactgatacaaacttgattaacacttaaacataagagcctgtaaaaccttagagagaggtagaaacttattaagaaaaagaaaatactaaaagaaaaagacggttttgttttacacttactaaatacatagccaaaaataaaaaaatcaggttcgcgcgaaaaaaataattttttttttcggcagcaagcctgattttttctaaaaaagatatgtacttagtaagtgtaagcagtagaacggcggtccctgtacctgctgctgctttcgatatcaggaaaggagggacagcaatgctggcagaacagccgcagattatctcacttacgcagcttgccgttgtggcaggctgcagccgcgatcatatcacgcagctctacctgcactggacggcaggccgctacgggcaggtctatgacgactaccacctcaatatcgacgccgacggcacagtctaccgcaccagcagcagcctgtcgcagtacaaaagccacacctggcgccgcaacagcggcagtatcgccgtcgccctgtgctgcgggctgggggcgcaggccaaccacggctatgatgccgacctggggcagtttgcccctacggcagtgcagaccgaaaaaatggcgcagacagtggcgctgctcgtaacggcgctgggcctgcagcttactatcgataccgtaatgacccactgcgaagcagcgctgctggatggctacggcccttacagcggcgacgccgaaacacgctgggacttgtggtatatgcgcgattcacccggcgacggacagatgaagccgggtggggacatactgcgcggcaaagctcgctggtatttagaacacagtaaaatttaaaaaacaaaaggagtatagaaaatgagcacgactaaaacagcaacatcctacaaactatccctgggcgtcgaaaacggcgtcaatgcgctgggggcagcgcaggtcaaatccgtatctgtcggcagcgtcaagctggacgccgccgacgacaaatgccttgctgtggccaatgccatgaacgagctgatgagccacgaagtggtcaacgtctacgttacggaaaaggccgagctggctcaggcggaatgatattgtagatcatccgcctggcagtaaatgttttttgactttttgatttaaagtttagatttttttattagctctttctcttagaagaaaggggatacgtttcttttagcggcataagtttttgctatgcagctttcttcaagaagcaagctgcatagcaaaactctaaaaacaaagtctaaaaatacgaaaaacagcaaaaaaataaccctgcttcaaaaaaacgcatataacccgattttaaagcaaaatccctgaaaaaacacaaaaaaataaagtaggccgaaaacctacaaaaaaggagcacacaccatggaaaaaaccttagaactcatcttcaccaaaagcgacggagctaaaaaaaccttaagcatcgccgaccctcgcgaaggactcacccttgccgaagccaaaacggcagccgacaagatcatagccgccaacgtactgaccagcggcggcctggaactgacagaatttacagaagcccgcatcaaaacagttactattgatgtgcttgcttagtggaagcccaggaattatttacagcgataggtaattttggcttcccgatagtattgagctggtacctgctgctgcgtatggaacagcggctggacaagctgggcgactgcctgcacgagctgagcagcgccattgtcaaggaacagaaaaaaacggaataaaggcttgaacacagctatagcgcgacgtgcgatagccggaaccataaaaaatgataaaaaagataaggcgatgcaaacctaaaggtaagcgtcgccttatcttttatgttttgtattatacacctaaaaattatcagttgcaagaccattgaacaaattttttaaaaaagcgaacaaaaatgtcttgcggggggggacgaacgtggtaatatagtaaatagttaaaaatattaactgtaataggaaaatttgaatcaaaagataatagttttattttattagcgttactgctaagcttggcaattgcttgagaattaataaagatgaaagtagctctgctgcagtaaattatcaggtcagcaaattttactgcaggttatgaagctaacaggaatgatagctaataggcaatcacaattacaacactatggaaataggttgtctaatgaagtgataaagcaaaaagaaaggtgtgaaaaagatggaaggaatggatcctttaaggattggggagactatcaagatcaaaaggatacaaaaaaggattactcaaactaatcttgccaagaagcttaagatatctcaaacgcatctgagcaatgctgaaaacggcagagtgatgctgagtttgaaagcactgttaaagctgcgagatatttttgaatgtactttggatgaattggttgatcctgaccgatttgagaaaaagaaggaacgggtaataaagatacaaactcgtacgctgcagcgagtagctttagggagatgtttaagatgcatatcgaaagctgggaggaatcgatacacaaagataacagggcaggattaggagggctgacagtcaagtgtccgatctgcggccgtgaatttggctgcaataaaacatatcatgtctatacagctttggtaggaagaaagcggcaatattactgcagctattcctgttataaacaaaggcctaatccaaaggaaaaaagatgaatgggaggaaatgtatcatggaaaagatggatttaagtaaaaaggtgttggcgtctttactgacaatgtcgtgtgtatatctgggggggacatccgcgctcccgatggcagaggcggcagaaaatgaccccaataatacggtcggacaagttattactgtcggtggcagcctgactggcggtgatatttttaattttacgtctgagaacattgcaaattctacagcattgcgattttatggagagaatcttgatattcctatgactggcagcggcgtttatacgatcaacggtaatggtgggataatcagtcaggcttatggcatggttttcggcagcagtgaagatgttgagaccggaggctggggtggcccatccaaaagttttgtaagagcaacgggtattataaacggtgactggcagctgaatatcaagtctgatgcaggagaatccagaggtattattattgatggaggaactaaatatataaatcccgggtcttttgattctattaacgatgctagtgatataactttcaatggcaaggtgaatattgatattgaaggtcagggtataaagtctatttacttaaatggcggagctaaaggcacttttaaggacgatgtgaatataaaaggtactagtaatggcaacaatgcgctgtatggtatctatcttaataactatacagataacatgggaagtgtttcttttgagaaagatttgaagttgcaactctatcataacagtactcaacagggcagtaatcttggttacggcatcaatgtgttcggcaaacataatacgcttacagtccaaggcaaaactaccattgatattggttcagcaggacaaataagttatgccattcaggtaaacggccagaattcgtctgctatctttagtgatactgagattacaatgacgggaggttctatacagcgcggggtaaatgctgcttatggcagtattgattttacaggcgataccaagattaccttgaacaatcattctgcgagtagtggaacaatgaaagctacggcagtaaatgcacaggacagcggtgtcgtaaatattaatagtgctaaagataaaacagtacaggtcaagggacattttgtttcaacatctaagggtgttattaatgctgtttttaataatgcgaattcctggtgggaaggcgatgcccagctgaatgccagtggcaatgcgatcaatttagagttggctaatggtgcagtttggtatcccggctgcgatagtactatttataacaaaggtatgaatttgaatctgcatgacggtggcattgttgatatgacgaagactgctgatcaatatgctgatttaactattggcagtgttaatggtactggtggtttgttcaggttggaaacagatgttgtgaatatgcaaagtgacaaggtaaatattcttgccagtacagatgcaggcacgcacagcatcgatattattgatgttaacgaagtgacgatggatcagattgctgctgatgcaggtaaagggcttttgctggcaactgcgccggatgcgattaaatttacggctaacgaacgtgaacaatcgttattttatgtgaagtataacttaaaagacgaagtgcttggcaccgggatgacagaatggaaactggatggttttgaaatagtgccagtagaaccggataatccggataaccctgacattaaacctactaccagcgtggataccatactttctgctaatgcgctgaactaccacacctggcgtacggaaaacgacaagctgctccaacgcatgggcgagctgagacataatggcgaggaagaacagggagcctggtttcgcgtgaagggcagcaagatcagccgtgatagtaagtttggttttgagaacaaatacactgcttatgagctgggctacgatcaggtaactaaacgtactgccgacaaaacacgttatcagggcgttggtttaagctatactgacggcagcagcagctacagccgtggcagcggtgacaacagcagcaagtcgatcagcttctacagcactgatatcggcagcaagggtcattatctggatttagtatttaaaatcagcaatatggataatgattttacagtttatgataccaaccgcaacaagatcactggtgattttaataataccggcgtatcgctgagcgccgaatacggccgtaaaaatgatttacaaaacagctggtatatcgagccgcaggcccagtttactttaggctatctgggtggcgataactacactgccagcaatggtatcaatgtagatcaaagtggcatcaaaagcgccgtaggccgcatcggtttcaatatcggtaaggaagtggggaataaaggtgtagtttatgttaaagccaacctgctgcacgagtttggcggcggttacgatgtgaccatgactgacagcacaggccgggtgaaagttagtgacagctttgacgatacctggttcgagtacggtctcggtgcggcagtgacaatgggttctaacagccagctttatgtggatgtagaacgcagcagcggcagtgattttaagaaagactggacctggaatgccggtgtaaggtggaatttctaaagactagcccttatttgggttagtctccaataaggaaggatgaaatttatgaacaataaggatttaagcaagaaggtgttggcgtctttgctgacaatgtcgtgtgtatatctgggggggacatccgtgctgcctctggttgaagctgcggcattggtaaccagtgccgatcaaaatataactttgcctgcagatggagataagaggcaggaatttattgatctgaataagccttacagcggcgagaagcagatcgtttatttgctgaatgcgcagggtgatcctgaacgcaaggcgattttcagcggtgcagggactgttatcaaaatgcagggaataaatagtaagcaggtcacggcattgactgcttatgacggggcgaacgtggagtttaacgccgatagtactgatttgagtgctagcagtagcaaagcaggagtgagcgcgatcgctgtggttaatacgtcgggagataattatggtagcgtgatcagattcaacagtgcagaaacgaggatcaacgccgatgctgtcggcacggctactggtgtgtatacggaaaagtacagtgcgacgcagttcagcgcaaataccgtcagcaatattaacgccgtatcacaaaagaatgatgcttatgctttgctcaacggaggcaaaacgattatcaacggcactgtaaatttaagagctgcaactgatatcggcgatgctatgggtcttgttgggcgttatgaaactgacggctttgagtttcagcgtgttggcggcagtgtgacgactgatgccaacagtgctgtaaatatcgaggctgaatcggcacagggcagaacggtgggggtattggcagagaggggcggttgggtaacgtttaacggtgctttgaatgttacagccaaggctgccgctaatgacggctttggcgtttgggccaataaagcaaacagtaagatgatgattgatggacagacggatattaaggtagaccgaggggccaacgacagtgattttaagcttgtcagggctttgcacgctgtgcagggcggcacgatagaggtcaatagcagcggtaagagtaatctggttactgtcgacggcgatttgtatgccgatggtaagggttatactgatggcagcgctatgtcgcttgagatagttgtcaatccctggacacattgggagcaggatacggatttacgttatatgcagggtaataaaccgacggttttgagtgctgatgtgccaactgacggaagttcttatatcaattttgtgatggataaggccggttcgtatttatacggagctgccaacggcaatgtgtatattacggccaagaaggatactgaatggcaggtgaccggtgacagtgactttatggcgcttaatgttaacgagggcctgatcgatctttcgcaccaggagcattattataagacgtcgaatccgtatcaaaaaatgtctatagatactttgtcgggaaataacggtaattttgttatcaatacagatattttgaatgatgccggtgtgacagtggtgaaagtcggaacggagatctatcatggcggtacgcttaacggtaatacgtacagttacactgctgctgatggcagtgaccaaacgataaatttaagtgatcctgtcatttatacacgttatggtgactttattcatgccgaaaacagtgcaggagctatgacgcatacggtgtatgttgatgatgatgcttttaaaaatgaggctgatgtgactggaaaatacttgaaatttgcccgcgtaactgatgatgtgacctttaacgcaggtacaaagcaggtttcggagctgttttcgtataagcctgtactgttacagacgcaggaagaagataaggcagctaacagtgaattagtatccaaagatgaatttgataatttgcaatgggtggattctaccaaccgtgactggtggataacaggctataacaaagtgactgccgatgatcccaaggtgccggtggccgctttggcagcagggtttgccggttggcgttactggaatgaaaacgacaccttacttaaacgaatgggcgagctgcgttattctactgacgctggtggagactggatccgtattatccgcagtaagcataatcgtgggggagaatatggtttcagcaatcatatgacaacagtacaactggggtacgataaacgcgaagtacgcacaaacggtatttggcgtaaaggtattgctttgagccgtggtgtgggcaaaagctcatataataaaggcaatggcgaaaacagcaacaatagtttggcattatatggtacatggctgggcaacaaggggcactatttggatcttatagccaagggtagcaggctgcatagcgaccacgaaacttacggcgagtttgcggacagcggcagcggcaaaaactgggcgacaagtataagcgctgaatacgggcgtaaaaaacagcttaacgaagctggctggtttgttgaaccgcaggcccaactgacttatgggcatttatggggcgattcatatactactaaaaatggtattgaagttgaaacagattcgataaacagtttagtggggcggctcggtttcgtattgagtcgtgaatttgacagaaatacggtcaaggcttcccgttattatgctaaggcttcgctgctgcacgaattttttggtgatgacagtgttactttacgtgacagtaaaaatgacgacaggctgacttttaacgacagtcagggtggtacttggttggaggttggtattggtacggacgtgctgttgagtgaacggactaatttttattttgatattgaaaaaactttcggcggtacggtaaaaacaccttaccgtattgaaggcggtttcaggtgggagttttaactgttgttatacataagtcataaaaatcagctgtgaaaaggagagtgttgaagatgaaaaagtttttagttatgttagtgatgctggtgggggtatttgctatgactggctgcggtagcagcagtcttgtcggcaatatcattaaagacgagggttctttggttaagatcatggatgaatttaaaaatctggatggactaaaaggtaaagagatacttatttttcaagatgttaatatgtataccggtgaaacaggaaacagagttgttattaatattttaaaaccgggtactgatgatgaagtggataactatgagtatcgcggcgggtggagtaaggcaaggcccgtacagctttccggcagtggcaaagctatcgacaattgtatacctttagagcagcttgattttgccaagattcctcaagtttataaaagcatggaagcccaaataaaagatatcgaaggcgctaaaatagatgattatatgagtttcagattttggcagggtaagtgggatatttctgtatctgctaaaagtccaagggctaagtattttgcagattttgacttagatggaaatttgaaaaaatttaagaaaaactgaaccatttcaatattaggattgctttcatggtgagaaaaatgctatattgacatagtacttttgaaattaataaactaaggagatgattattggtgcgttatgaaattatgcagccgggcgcttttgcctttttaaaggtacagctggaagcaggcgagagtattaaagcggaatctgatgctatgatggcgatgtcaggtaatatcaaagttgaaggtaaaatggagggcgggatgctgggcggcctggcacgtaaatttttaagcggcgaaagcttgttttttcagcatctgacagcacaggggcaagctggggaggctgttttagccccgccgataccgggagatgtttcagcctatgagttgacaggcaataccttatgtattacttctggcggttttttagcggcggaagagagtgtaaaaatagagactaagatgcagaatctgggtaaaggtcttttttccggcgccgggttatttgtcgttaaagcttcaggtacgggaaccttattcttcaattcgttcggggctatctatccgttagaattgcaggtgggcgaagagatggttgttgatacaggtcatttggtagcttgggatgctgatatgaattataaggtaacgaaagcaagttccgggatcatgtccagcctgacttcaggtgagatgttggtatgtaagtttaccgggccgggaaaagtttatacacaaagccgtaatcctggtagttttggctgctgggttggtggtattattccatcacagggctaataaaattacaatcaaagcacagaccattttggtctgtgctttttactatgaaaaaacagaaaacggcttgacgataattttcagaaaacttataatagatatagaatatattattagataatgattatcgaaaaaatggaggttgaggagaaatggcaaaatataaatgcagtgtctgcggttatatttatgacgaagaaaaagaggggcagccactgcttgacagtaaatgcccggtctgtggaatgacgatggtattgatggaggaaaacgacagcgaagctgctgcttctactgctctggaagccgctgcagctccggaggagctggcttatgatccggcatacgcccgttgtgacgccagttgccgttatatggacgatatccatgaaatggctgtaacaggtaagtcgatcatcggtgcgatgggtacgcagatgcctatgccgggctgggacgatatcctgctgctgggcaatcagctgaatccgccgccgctcaacgaccatgacgcggtcgatacgacgactgtgattggtaaaaatgccaaaaagccgttgattttgactaatccgatttttgtttcacatatgtctttcggagctttgtcaaaagagactaaagtggctttagccaagggcagcgctttagcaggtgcggcgatgtgcagtggtgaaggcggtattctgccggaagaaatggtagcggcgcataaatatatttttgaatatatccccaatttatacagtgtgacacgggaaaatctgcgtaatgctgatgcgatcgagatcaagatcggccagggtacgaagcccggtatgggcgggcatcttcccggcagcaaagtgacaccggaaatcgcggcgatcaggaataaacctttgggtgaagatgttatcagcccgtccaagtttcctgatatcaatactaaagaggatttgaaagcattggtgacgagtctgcgcgaggaatctgacggcaggcctataggtatcaagatcgcagccggtaagctggaacgtgatttggagttttgcgtttttgcagagcctgattttattacgatcgacggacgcggcggcgctacaggcgccagcccgaagctggttcgtgatgcgaccagtgttccgaccgtttatgctttgtatcgtgcccgcaagtatcttgatgctgtgggagctgatgatattgcgctggtgatcaccggcgggctgcgggtatcgtctgatttcgccaaggctttggctatgggtgcggatgctgtggcagtagcatcggctgctttgattgcggcagcctgccagcagtatcgtatctgtggtacgggtaaatgtcctgtaggtatcgctacgcaggatcaggagctgcgctccagatttaagatcgaagcatcggcgcagagggtagcaaactttttgaactgttctctggcagagctgaaaacatatgcccgtatcactggtcataagaatctgcatgatttgaatgcaggtgatttgtgtacgatcaatcgtgagatttctgactataccaatattcctcatgcctgatatttaaatatgttgtggaagcttctcccgtatgcattggcatgcggggtttctttttggcatcaatgctgaaatttataatatgaactttttgcaaactttaactgtaaatgcttgacttaaagttgactctagcctgtaaaatcgaattaaaggcaaaggcgttatggtaaaataccaaacgctgctttgggtaaaataaaagatgaggaggtatagtatgaaaaaaattgttgtggtgctgatgtcgatgctggcaatgctggtggcggcttgcggcggcagtaatgccgaagctatttctactgataatggagggaaaattatgcagagtgaaaataaaactaacagcagtaaggctttggtcgtgtattattcgcggtcaggtaataccgaggctcttgccagaatgatcggtaatgaaacaggtgcggatatgttcagggtgactactgtcacgccatatcctgaagcttatagggaaactactgaagttgccagagccgaacgtgataataacgcgcgtcctgcaattaacggacgtgtagaaaatatggcggattacgatgtcgtttatatcggcgtgcctaactggtggagcacgatgccgatgccgatgttcacttttttagagcagtatgatttgtccggcaaaactatcgtaccgttcgttactcatggcggcggtggcgtagctaattgtgtcagcgatctaaagaaagctgttcccggagctacagtgctggatgcattggtagtcagcggcggcagcgcgcaaaatgcccagagcgatgtcagtgcctggctgaaacgcttgggtttagtaaaataaaatatcatttcctgacagtaaaaacagagagtgctttttgagccctctctgttttgttatatccatatttaaatatattcttttttcaggtattctaaaaatttttcagaggctttggaaaaggtttgatattttttccagacaatatcaagcccaacttcaagtgttggttctaatgggcgaaagcaaagcgggctgtcgtcatatgatttgatgattctgtcgatgcttaatgcatagccgaccccttcttctaccataagggaagcgttatataaaagattataggtagcgacgatattcagattgtcgtaatttcctcccatccagccggctatctcatttttgaccatggcctggttggaaataatcagcggcaggcccagcaaatcatgaggcttgatagttttattttcagctaaagggctggctttggtcatccataaaccccagatatcagtgatcggtaattttataaaatcgtatttcttaaggtcagccggctcgataaacaagccaaaatcaagcagtccgctgtccagacgttcggaaacgtcttcggcttggccgctgaagatatgaaaatgtatatggtcatattcttggcgtattttactgattattttagccagcatccgcataccttcagtttctgcacagccaatataaatatcacctgtaatgttttcagcagaggcgttgatttcagctttggttttttccattagagcaacgatttcttctgctcttttgcgcaggatcataccatcttccgtcagcgttattttgcggttcccgcggataaaaagctgtttgccaagctctgcttccagttctttgagctgccttgaaagcggtggctgtgtcatatgtaaaaattcggctgcaccgctgatactttcttcgcgggctacggcaaggaaatactgcagggttctgatatccataaaatttcacctccaatataagtattataatagtttttaatatacttttcaagtatggcaaagcatttaatatatgtatttgatattcttggattctgtttttataattaagacaaaggagccgggtaagcagaattatcagtgaagctgaaaggctctgttttgaaacttattgtaaatggatcaatgattttaaggagttgagaagtatgaaaaagaaagttttggctgaccgttatttgaaaatgtttaagagtatcgctttaggggtgattttatcgacggctggtacaagcgctgtgtttgctgctgacaggcctgctgatgctgataatttttacaggagtgataaggtggaggtccagaaagtcacttttaaaaatcagtacaagatgaatattgccggtaatttgtatctgccgaaagatatggacaaaagtaaaaaacatgctgctatcatagtagggcatccagtgggggcagtaaaagagcaaagcgctgatctttacgctgttaagatggcagaacgcggttttgtaactatgtctgtcgatctggcgttttggggcggcagtgacggccagccacgcaatgctgttgcgcctgagctttatgctgaaaccttcagtgcggcggtagattacctgggtacagggccttttgctgatcgagaaaagattggcgcgatcgggatctgcggcagcggcagttttgctatcagcgccgctaaaatcgatccccgcctgaaagccgttgcaactattagtatgtatgatatgggtgcagctaaccgcaatggacttaatcattctctgacgcttgcacaaagaaaacagatcattgctgatgcggcggagcagcgttatgtggaattccagggtggcgcaactaaatacacaagcgggaccgtacatgagatcacggaaaagtccaatcctattgaacgcgaattctatgatttttaccgtacgccaagaggagaatttactcctgcaggttcttcgccgcttttaacgacacatccgacgctttccagtaatactaaatttatgaatttttatcccttcaatgatattgaaacaatttctccgcgtccgctgctctttattaccggtgatcaggcacattccaaagagtttagcgaagatgcatataaacgtgcggctgaaccgaaagaactgtattatgttgccggtgcaggccacgtagatctttatgacagggtagagcttattccgtttgataagctcgaaagcttcttcaaggctaatttaaaataatttactgcagcaaaagctgcagatctgattttctgaaagttttgtttttgtggattctcgggatgctgggggtccacatttttgttaacaggagaggttatgaaagaaaaaaataatttgctgatctttattttgacgataggtgtttttggtatcatcaatacagaaatgggtgtgctgggtattttgccgcttctggcagaaaaatttagtatcagtatcgcacaggccggtttgctggtcagtttgtttgctttggcagtggctgcagccggtccggtgatgccgctgctttttgcgggcatcgacaggaagcgggtgatgcttctggtattgagcgtatttgttttgggtaatcttatttctgtctttactgataatttcgcagttatgctgctggcaagagttgtgccggcgattttccatccggtttattgttcgcttgctttttctgttgcggctgcttcagtcagcccggaagcagctccccgggctgttgctaaggtcattgtgggagtatcggccgggatggtactgggagtaccggtcagcagctttattgccggcagtttttcgttaacggctgctatggcgggttttaccgtagtcaatacagcggcgttgattgcgacctggttgtatataccatcgctgcctgtggcagcaaggctttcgtatgggcagcagctgcgtgttttaaagaagccggtattatggttttctattgcagccgttatgtttatgaatggagctgtctttggagtttttggatatttttcaggctatctgaccaatatcactgctttttcgtggaatacggtaagcctgattttacttgtttatggtttgatgaatatcgtcgggaattttattgccggccgtatgcttagtgcaggcgcgtctgccgataagctggtcataatatttccagtcacattggggattgtctatgctgcattcttctggagcggtacctcggcgccggctatggctttgatcacgctgctttggggagttttgggaggtatgaatgcgaatatcaaccagtattggattactactgcggccccggaggcacctgattttgccaacggtctttttttgactgccgctaatttggggactgctttagggtcggcagtctgcgggatggtgattgcacatatgggaatgcagtatatgatgtggggcggcatcgtatttcttattttatgtttggcaatgattatccccagagtatatagatcagatgagtatgtttgcctgggagaaagcaaatagttgtgctgtaaaaataaaaagccggcattcttcgcaggaaagttcaaactttttgtaaatttatccattcagggactaaaatagcagctttaccacttgacttggagcggactttaacctgtataataaagcatagaagttttccaggctatgaataatatttagtataaaaactgagcttcgggaggagactgttcttttgagtgtaattctgtttatttccttgatcgattttgttttgagttctttggcgtgggtttattacagtcatgcattttcttttatgaggtcggcgccgtttatcgctttatatgtgctgctgatgcttaatactgttggcagccgtgttttgcctgaaagtttgccattgccgctgttaaagctttcggcctggctgagcggttattggatcgcgtttttgtactattcgctgctgttgatggttgtgcatggtatcgtatatgcagttttgcgtattttttcattcaagctgccgtttatgcagtttgccgctgcgggcgcaatagttctggtaatttttgttgcctggggcagctggcgtgcgtttagccctgttgtacgtacggaaaccgttgttaccgataagctgtcgtctgataagcagtataaaatagtgcttgtcagcgatatccatttgggacgcgagcttggctatgattacagtaagggcttagtagagctggtcaatgcgcagaagcccgatttagtactgattgccggtgacattatggatgagcggctgcaatatatcatcgaggaggattcactggccccgttaaaggagcttcaggcaccattaggggtatatggagcttatggaaaccatgattatcttgatcggcctgacgagctgagagctttgctggcaggcaataatatcagtatactgactgatgagagtacagtggttgatgataaattgaaaattaccggtttgcatgattatcgtgtttcaacaagtattgttccgttgcaggctctgagcgtcgataacgataagtattatagtatcctgatcgatcatcagccgcggcggatggatgctgccgctgaggccggttatgatatgtatctggctgggcatacccatacagggcagatgttcccgaacaggctggttacgcagcggatgtataagctggattatggtttggcccgatttggtgacctgactgctgttgtcagcaatggctacggattttggggaccgccggtgcggacggagctgaaaccggaaatagttgttataaatttacaggggaaataaataaaaaaccttcggcacagccgaaggtttttttgtttgtttttaaaggatttcttcacgtactaattgattgatcattttttgcttgcctaagacccaaagcaggtcgcctttttcaaaaacaagcgaaacattaggattggtcatagtgtaactgccgcgttccaggccgatgacaaggcagtgccagtcatcacggatattggtgtccttgagcgatttaccaaggataggcgagtgcttgtcgatagtgatagcgcacgataagaataccgaaacgttttctttatcgttgtcttcacgcagcataaattcgcgcatcgtgataagttcttccaccagagtcatacacagacgctgagtattgatggcggtgtcgaacagtttgaattgagaatcagtaccgatcatcaacaaagtagaatccttttgcagaatgtgatgaccgccgggcatatcgatgacttcttcaggagttgaaacctgcaggatgttgcagccataaagctcacggaatgcaagctgggtcagcgtttgacctatcataggtgagtcttcgcagattttatagcgtgcaagctgtaattcttcatcgaaccatccgtaaagatgttcttcgccagcttcagcaagggcttcacgatgtttgagcatatggcgctcgttcagattgacaagaaaacgtgattccatacgcagatattcgcccatcagccagtcggatgaggagatgaaataagcagcgcctgctgttgccagcgcggccagcagtgactgcagaccaagtagtttggcaaaaacaaagtagagaaatgctgctgcgatcaggatttttaaaaataacagcagtgttaaagggatgtgattagaacgtttcttaaaccataaagttgagaaaagttcaggatggttggttttattgacaagaactgcccgcaggaacggcgccataacgaccagagtcagcagcgctgtcagcagattgctgtagggagctgacatttttcctgacaggtaaggctgcagataataataagagcctaaagcgacagctgagagcatagtcgtaaaaatcaaaatgcggataaaatactcacgcagaaaatcgcgccagtcactgtctttaccgtcgttatcaggattttcttccgtatagcggtcaagccattccagagttctttgcggcaatagttttttagtgaactgataagcaggttctgctgccataacgaaaaacggggtagtaaaggttgtcattacagaaacagcaacaattattggatataaaaagtcgctgataactccgaggctcatgcccagagatgcgatgataaaggaaaattcaccgatctgagcaaggctgaaaccgcagtgcatagaagtattgaggttttggcctgaaagcagtacaccggcgccggaaagcagcagcttgccgactaaggtaacaataacgagtacaatgataggtaccgcgtattccagcagtaaagcagggtcaacaagcatacctactgatacaaagaagacagctccaaacagatctttgacaggtttgacgagatgttctattttttcggcacttggtgcttcggcgataagagaacccataataaaagcgcctaaggctgccgagaagcccatgtgggtagcaagtactaccataccaaggcaaaggccgatagaagcaaccagcagagtttcatcgttcatcaggcgctcagcccgtttaaagaaggacgggaccagatacataccaagaacgaaccataagaccaggaagaacagcaggcgcatgacgctttcgatcagctcgagcgtcgaaatgtcggcgctggcagcggctaaagttgaaagcaataccatcataatgatgccgacgatgtcctcaactatcagaataccaaaaaccatttctgtaaagcgctgacctttgagcttgaggtcttcaaaggctttgatgatgatggtagttgacgacatggccagcataccgcctaagaacaggctgtccatatgatcccagcccagcatatggcctgtgaaatagccaacgatcagcatcccgcctatttcaacgaaggtagctataaaagctgtgctgcctacgcttttcagcttataaaagctgaattcgagacccagtgcaaataaaagaaaaataacgcctatttcagaccaggcgttgatattagcggtgtctgatacagtggggaaaaagttgaaatgcggtccggtaataaaaccggcaataatataaccaagtactaaaggttgattgagttttttgaacaggatcgtcgtaatacctgcaactaagaggatcatcgctaaatcagcgactatcggcggtaaatgagccataggcagtcaccttctttcataaatttattatacggataccattttattcaaagctttgcggacaaatttaacaaaatgttgtataatattaaagctgttatattacacagctctttctatattatacaatatttccggtgacaaaaaagtgaattttaatacaaaatttgcatatggaggttttaattatgtacaaaaatctagttcttgtagatggtgaaatcatgccggcagaagaggcggcagtttcggtacacgacagggggcaccagtttggcgacggtgtatttgagatagtgcctgtttataatggccgttgttttgctttattacctcatatggataatttattcgaatctgttattaaggtgaaaatacctgccgtttacacgattgaagaattgattgaattccatgaagcactgatagctgaaagtggtattgaaaatggagaaatctatactcaaatcactcgcgggactgccgattatgggctggcgtttccggaaatgtcggtgccgcagctgacaatgacaatcgtggaaactgatcgggaagtattggtggcaaaacgtgagagcggcgtcaatattattacgactgaggataatcgctggcagttatgtaacgttaataccttaaacaggctgcctgaagttctggcacgtcaaaaagcacgtgaaagcaacgcttttgacactctttttattcgtgagaacggtaagataactgaaagcactgaaagcagctttatggtgatcaaagatgaaatgatatggacacatcctgataataacctggttcataaaaatattacccgcaggctgatcaaggaacgtctggcacctgatattgatatgcaggtcatcgaaaaagcttttgatatggagtttgtcctgaaagcagaagaagcatttttatgcggccctcgctgcgagattatgccggttactaaaatagaccgcaaattcatcggcagcggtgtaggtaaggtcgtgccgcagctgcaggctgcgtttaaagcttttgtagaacgtgaatgtccggcaaaataggagaatagaatgaaaaataataactgggtaagaggggcgatgctgctggccgtaggtctggtcctgcaggcattgcgtttagtgatccctatgccgcctatgtggactgtttttgtcgtcggtacattggtgaatatggttttggtgctggcggcccgtaccgttggtttatggccgtctgtaatgatcgcggtgctgctgccggtaatggcgtattttcaagggcagctgccgcttccgtttttgataccggtagtggctgtaggcaacttggtgatggtatatctgtgtgcccgcttctggggaaaggggatcatcatcgccgcgcctctttttaaaacatttattttatattgcagcagtttgttcgttttgtggctggttgcagtacctgaaaagctggcgttattcattttgtttattatgggctggccgcagatgatcacaggcattttagggcttgtacttgcatataagctgcataaacgtattttccccgatacagccgaatagaatcagcttgtggcttgctgaagttaatgttttaaagcagttgaaaatcgattttaagaagcggcaaaatgcagctggttgtttactaaaaaagtttgaagaaatgcttgacaattatatatagatacggtattattgttattgttccgttacggaacattgagtcgccgaagtggcggaattggcagacgcacttgactcaaaatcaagcgtggttaccccacgtgccggttcgagtccggccttcggcaccatattacaaaaaagaaacactctagtttaaactagagtgttatttttttgcgtggatatttttaatacaaagcagactcaatgtatttggaagataattgaatagctatcaggaatagcttagtttagaggcaatgccaaggcaaataagaaaagcaatgaaatagatgatcgctgctttacgccttgtttttggttcaagtacgctgagaggtaatacccagtgtggttttatcaggctcaggccgatacccaataaaactaaagataacactgtgaatgcgaaaaagattgtatccatgtcatcagctccttcttgaaaataaatgctgctgtggaaaatctatcgttataataacaaagatgaaaaaggcttcatcgtataataaagaagcagagcgagtagtggcagcatcttctactattagaatatcacgttcatctttgacagacaagggggatataatataagctgctatatttttataaaagggataactataaattttataaatattaaaaaatcgcagctgtttattgattttgtttataaaagttattataaagaagctgttttggaggcagaaaagaaattgttcaaaaggataatttttgatataaaaattttaaaaatttaatttaataaaagtgcgtctttatagaatcagtggtatattaaaaatagctaaaaacctatattaatggtattttagcgtttgttgaaaggggcataaaaatgaaagagaaagacttgcttgacttaggatataagaaatatgaaggcgaaacttatgacgtttattttaataaagatgtttgtaagcattccggtaattgtgtgaaagcaaaccatacggtatttcaattaaagcggaaaccgtgggttctaccggttgctaccgagcaggagtcagttataactgcgattaaaggctgcccttcgggagctttgaaatataagctgaaaaattctgatgagatcgagccgtgaatatgaggaggaagaacaatgtttgactatagactggaagaagatgccagcaggtttgcggtattttatgaaaatgaagaaatcggagagatttccttcgtaaaaacaggagagcatcttttgattattgatcatacctatgtagatgctaaatggaagggacatgcaattggtaatgctctggtgcagaaggttgtagattttgctgtcgctgacaaccggaaaatcattccgctgtgccctttcgccaaaaaagtatttgacagaacgccagaatatgaagcagtgtattctaaataaaaatttgttatatcctataaaaaaagcatcagcaggttgatcatcatctgccgatgcttttttgtttagtaatcgtgagactggtatttgattatgtgcaaattttatgtgctataatcagaataacttctaagaggtgttccgtaaataattacaagggaggattggagatggtcaataagactttggaaaaaatggaaaggtctgaactgatacagctgatcgaaatctattctaaaaactggctggctatggatggcgtttggtttcagtcagtagaacgtaaatttggtatggcagaggccatggaacatgactgtaatatttgggaggcttttacaaaaattgaggcacaaaaaatcaaagagtttttaaagttgccatccagacctggcatagatgggctgaaaagagctttacagctgagattatatgccaatatcaatgaagatgagataattgtcgatgggaatactttgatttacagaacgttagactgcagagtgcagaatgcgagaaagcgtaaggggatggaatttcatccctgcaaggcagtcggtgttattgaatatactggttttgccaagaccattgatgaccggtttgaatgcgaagcgcttagctgttatccggaaataactgatgagacctgtaattgttcgtggaaatttattttaaaagataactgatgattttatatgaagtttaaacagtggttttgtaaataaactgcttctctgagatagtttattgctctatccttttaattttctgtttagtataattaaaggggataaaagaaatgaaagagggtagagaaaatggatctgtccgttttacacaaacttacatatggtatgtacgctgttggaactcttgatgggataagacctgccggctgtatagtaaatacggtgattcaggttacaagcgataatcctgttattgctgtgagtatgaacaaaaataattttacttatgaggccataaaaaagagcgggcgtttcagtatttcgattttatctgaagcggttgaacgtaatgttattgcagagcttggatttgcctgtgggcgcaaaatggataaattctgcggtaaaaattttgcctgcggtgtgttggatggtttaccgatagtgaaagagcacgcctgcggctatatggtttgtgatgttattgccatgcatgatgccgagactcactgcgtgattatggcgcgtttaactaagactttgggtggaactgatgaactgcctatgacttatgaatattatcataatgttatcaagggaaaagctccaaaaaatgctccgacttatcaggctgaagtgtcgaaatcagaaaagcaggctcagctgcgttatatttgtgaggtatgcggttatatctatgaaggtgacattaccaaagaagcggatgattatgtctgtcctgtctgtaagcagccgaaaagccgttttaaaaggatgtaaggtctaaataaaaaagctacgccttaaaaggcgtagcttttttataatatttacaggcgaaaatcacgttcgccgttttcgatatctgtcaaatgctgtataaccagttcacgtactttgggattggggatattggccagttcattttgaatgagattttcgccaagctctttagtatgtggcttagcatagtcggtcaaatattctttgagtgtcatcagtgcgtttggatgacagcagttttgtatctgaccgcttttgcataaactcataaagcggtcgccagtacgaccctgacgatagcaggctgtacagaaactgggcagataaccgatttccatcagccaggctactacttcatccaggctgcgggtatcgctgacatcgaattgtgctgagttttcagcttccggttcaggtgcggcataaccgccgacactggtgcgcgaaccgccgctgatttgtgagattcccagatgcagcacacgttcgcgtgatttttgactttcgcgggtagaaacgatcatacctgtatagggaacagaaatacggatgcaggctacaagcttggcaaaaatatcatcgttgatgctgttattaaaggcgttgggatcgatatcgtcagcagggcagatacgcggaacgctgatagtgtgcgggccaactccgtgcactgcttccagatgttcggcatgcattaaaagaccggtaaattcataacgataaagttcaagcccaaagagtacgccaagtcccacatcatcgatgccgccctgcatagctctgtccatggcttccgtatggtaggcatagttgcttttaggtcccgtaggatgtaatcgttcatagctttctttgtggtaggtttcctgaaaaagtatatatgtgccaataccggcttcgtgcagtttacgataattttcgacactggttgcggcaatattgacattaacgcggcgaatggcgccgtttttgtgtttgatgctgtaaatagttttgatgctttccagaatataatccagtggattatttaccgggtcttcacctgcttccaaagccaggcgcttatgtcccatatcctgaagtgcgataacttcgctgcggatttcatcttgagtgagtttttttcgggtgatgtttttgtttacactgtgataagggcaataaacgcagccgttaatacagtagtttgaaagatataacggcgcaaacataacgatgcggttgccgtaaaaatcttttttgatctgttcggccaaagcaaaaatttcctgatttttttcatcaagctcacagtctaaaagcacggcagcttcgcggtgtgaaagtcccttgcgttcctttgctttagcaataatactgtcgataagcgaagcattatttttgtttgctgaggcataggcaagggtttccaggatttcatcatgagcaatgaactcactggcttgcattgatttgacattatacatttgtctaccttctttctttcggggcaggaatcctttcccgtcagtgatttcccttatatataaatatttaaaagggctgttcttgcggagcttttgcgtataaagccttgacgcttactcctttgagcatacctattttgccggaaagcgtactgataacgtcggccggggcatcaagaacgatactgataatattaatgcctttttgtttatatggcagtcccatacgtccaataatatattcgttatgggcatgcagtaaaatattaagctgttctactgcggcagtattttcaacgattattcccagcaagacgacacgtttctgcatacaagcacctgctttcaagacaaaataactgatttattagtattatatcataaaatatctgtaattattattaacgaacaagaggttataactaaaagataaaaaataattgcgaaaattaacacaaacagaataaaagtgctataatatatgaagtaagattaaagcaatggtatcaaaagttacaaaaaatattgctctaattattttattacatggcgttgatttttgaaagccagtgaagatttttatgtcaggcaatagctgcaggtaagtaaagtgccgctgccgccaataatacaaggataggggatgactatcggtataggagttttgttatttacatcgtcaatctgaccggcataattagatttgttgaatctttttgaattgttgtaaatcgtgctcaggctgtttagacatatgttttctataaaatttcattaagtgtttttataattttattttagcaaataaaaaaggtgaccgtcaatgagagccgaaccctctcgttgacggtcaaatgattggaaaaagattaaaggaagactaatgtcccaagcaaatgtctcgtttgctttgactgaattataacaataaaaaaagatgaatgttgttgctgaggcaacacgaataaatttagaaaataatatcataataaagtaattaaagtaagtttgaataaacaagaaacacaaattataataaaaacaaatcaagggcatattaaataggaagaaacttatttgttttatttagatgattgagagtaagagagaaggaggacagctatgaaagcggcaatgcagaatcttttgagtttacccttgttcaaagggttagccagcgatgaattagacactattcttggtaaagtaaatgcccttgttaagcattttgaaaaatcggactatatttatttggccggtgatgcggttgagagtattggcattgttgtagcgggtactgtacaaatgatcaaggaagatattatgggagataagtccattatcacaacaatggggtctggttccatttttgccgaaaacttcctggggcatgacaaacaggacgagaaaactaatgttagctactttgctgccagtgacagcgaggtgctgatggttccctttgggaaggttctgaccgatctgagtaataatgatccctgccgtaacaaattgctgacaaacatgatttcaataatggccagcaacaatgcacagttgattgaaaaaacggagatcttgtgtaaaaaaactctgcgcggcaagattatgacttatctggaacaggaagctaaacgtaacggttctactgaatttgaaataccttttaacagaacggatatggccaattatttggatgctgaccgcagtgctttgactcgtgaactggccagaatgaaagattgcggattgattgattttgataaaagaaattttaaaattttaaagtttgaatagctttaatgcacttatattataacaaaatattattattttactgtttaactgctaaaaagccgaaaccttgcatggtttcggcttttgcaccgtttattacaaattttaaaaatatagtgttgcctgggcaacatcattttgcatttaccattgctataatgtaaattaataaagggattgctaaacttgtagttcctttgcgatctttatatgttgtccgacaattcgaacagcatatagaaaatttaaaaaggaggaatttattatgtcccaagcagtaaaatgtttaattctgttggctgtggttgcattgctttttgttactgaacttatccctctcgcaatcactgctactgccggcgcaatcgcgtgcggcctgttaggcttcatccctgctaaacaagtcttttccggtttgtctaactctacggtagttttgtttgcaggtatgttcatcgttggcgcagcaatgttctataccggtttggcccaaaaaatcggtaatactgtagttcatttctgtggtactggcgaaaacagcctgatgtttggtttaatgatagttggtactttgttgtcttcagtactttccaatactggtacagcagcttgcctgcttccggttgctttgggtatctgtgctgctgcaaagattcctgcttcccgtcagttgatgcctttggcgttcgcttgcggttggggcggtatcattacgatggtaggcacaccgcctaacattattgctaccggtgctttgacttctgctggtttggaaggatttggtttctttgaatttgcatggatcggtattcctgtatctatcgcaggtatgctctatatgatgttcattggtaaacatttactcccgaaagttgaattggatgctgaccaggaaatcgaacaagaagttgaagctactactacttcttcttccaaacaaatcatttccggcgttatcctgctcgtagttgttttggtaatggctttggatatcaaaggcgtttccctggaaatggcagctatcatcggtgcattggtttgcgtactgactggttgcttgactgaaaaacaagcttacgcttctatcgactgggtaaccatcttcctgttcgcaggtatgatgcctgtatccactgcaatggataaaaccggcgctggtaaattgatcgctgaatggaccgtaggtctgatgggcggttctccgtctccgttgatcgttaccgcagttctgtttatcctgtcttgcggtttgacccaatttatgtccaacactgcatccgcagctctgctgtgcccgattggtgttgcgattgctaaacaacttggcgccgatccgaaagcagttatcatggctatcgcagttgcagcatcctgtgcattcgcaactccggtaggtactcctccgaatactttggttcttggtcctggcggttataaattcatggactatgttaaagcaggtaccggccttgttgtcgtctgcttcgtagtatccctggttgtaattcctgttatttggccgttcttccctggcaaataagctaagaactctcaacataggatccctatctgaaaaacctgtcgattttatcggcaggttttttgtttttgactcaaatgtaatttttcttgttataatataaatatagatcgttagtaatggagttgtagaaatgaaaataaaaccggaagaaacaattcaaatccaggggccttatggagaaataaatggtatactaaccccctgtatcgaagaaaatactgccgcgccggtgctggttttggcacatggattccgaggttcaatggatggcggcggcagagcggctgttttagctgaaatggcttccgaatgctgtaatgtcatacgttttaattttaatggcagtcaaatcctttccaagcaggttgaagaattggaagcggtgcttgcttatgtacgacttaaattttcagccggaaaaatatttttactgggtagaagtcttggcggagcagcggcattagttgccgcttcacgatctgctgatgttacaggactggtattgtgggctgcgccgaacgatttacaggcgaccttcagaaatgccttgggtgctgaagcctataatgcgttgtctgcaggtcagactctgtatttaaatgatgaacgtggtgaattgaccttaacgcctgattttattacagatttcgccaaatatgatctgcaggggattttacgtaactggcgtaagcgttctctgctgatccttcatggagaaaaagatgaaacagtagctgttgatcaggcacgtttgacatttgctttagctggagttccaaaaaagctggttatcattaacggcggtgaccacagttttactaatcacggaaataaggctgcggcagaggttgttggctggctgaaagacaggctgtgatgattaattattgtggtactgtatgaaaacttggcgatgtattttcgagcctagtgagaatacgtacccttgtggtataatattggtagctataaaacaggaggatatgattttgaaaaaattattaatattatgtttattggttttcagcagtttcagcgtagtagcctgcggcagtgaaactaagagcgagccggatgcggtgccgatgaagccggcaactgctgtttttgaaacgtcaatgggtgattttgaagtgaaattggcaacagatctggctcctaaaacttgtgagaattttatcaacctggcgaaaaaagggttttataatggagttacctttcatcgtgttattgataattttatgatccagggcggtgatcctactggtactggtacaggcggacctggatataccattaaagatgaattcagcagtaaactgacacacgaaggtgcaggtgttttatcgatggccaacgccggtccgaatacaggcggcagccagttctttattactttgcgtgcctgtccgtggcttgatggcaagcatgctgtttttggtaaagttaccaagggtatgaacgttgtttataaaatcggaaaagtaaagactgatggcaatgataaaccgttggagccggtaactattaagaatattgttataaaagaggggtagtagagaaaggagcacgaatttgtcctttttacagagcgaacgtatcattgaagtacaggatcaacaggaaatggttggtattttaggacgaaatgacgagctgctgcgggtaatcaaggaacattatgagagtgttattgttgcgcgcggcaatgtgatcgttttcagcggtgaagacaatgaagtggggcagattgaaaccctgttcaaagagctgctttttttgtatcgtcagggtatgcctctgactacacatgatgtcagatacagtattgggatgattgcagagggccggctggaaagtctgcaccgtatgtatgccgatacgataatcgttaccaaccgtggccgtcaggtaaaggcgaaaacactgggacaatgggattatgtagaaaccattaaacgcagtaatgtcactattgggataggtcctgcaggtacaggcaaaacttatctggctgtcgctttagctgtgaaggctttaaagaataaagaggttgaacggatcgttctgactcgtcctgctgtagaagccggtgaaaaacttggctttttgccaggtgatatgcaggataaggtcgatccttatctgagaccgttgtatgacgcgttatatgacatgctgggcagcgagacttttcagaaatatgttgccagagggacgatagaagttgctcctttagcttatatgcgcggacgaactttgaatgattcgtttattattctggacgaagcgcagaatacaacaccggagcaaatgaagatgtttctgacccgttttggttttgggtcgaaaatggtcattactggtgatattacacagattgatttaccaaacggtaaaaacagcgggttgaaacaggcggcctatgttctgcagaaaactccgggggtaggtattattcgttttggagaagctgacgtcgttcgtcacgagatcgtggccgctattatcagggcatatgagaattatgacagcagacgccagaaacagcgggaggcagacaatgataataacgctggaaaatgaccaggataaattacagatcagtgaagagctggagcagctgctgactgcgggattgaatgtagtagctaggctgcacagtctgtctgagaggacagaagttgatattactattgttgatgatgaagaaatacatatgctgaatcgcgattatcgtaatgtcgacaggcctacagatgtactttcttttgcacttgatgaagaaagtgaagaggaaccggagcttttaggtgggcctgaagaacatcttttgggagatatcattatcagcgctgaaactgcttccagacaggcggaagaatttggacatggcttggaacgtgaaatcgtttatttggcggtacacggcctgctgcaccttctgggatatgatcatatgacagatgaggataaagcagttatgcgggctaaagaggaagaagctttacgggaaatcagcctttcggaagaatttctggttcattaaaaggagcagttatggagacgaagttattagcggcagcgcaggcggcacgtgataatgcttacgcgccttattctaaattcaaagttggggcggcggtcgaaactgttgacggagaaatttttaccggctgcaatatagaaaatgcttcgtatgggttgacttgctgtgcagaacgtaatgctgtttttgcagctgtgtgcagcggcgtacgcaggtttaaaactttgtgcgtagttgccgatacagatgagccggtggcaccatgcggcgcttgccgtcaggtgctggcagagtttccttttgaaaaaataatcctggcaaattgcaagggacagacaaaaacaatgtctgtggcagaactgctgccatatggttttggctctgagtccctgaatataaaaaataaatgtaagtgaaagcaaaggagcgattagtataaataagcaggatggcaagcattattctggttttgcggctattgtaggccggcctaatgtaggcaaatcaacgttgacgaatggattgatcggggagaaaattgcaattatgagtgaccgtcctcagacaacgcgtaataagatcatgtgtattatgaatactgacaatgctcagatcatgttcttggatactcccggtatccataagccgcagcataagctggggcaatatatggtacgggctgcagaaagtacgctgcacgaggtagatgtggttttgtttgttgttgatgtttcggaaaagcgcggtgccggagaggattatattctggagcagctgcgcaaggtcaaaactccggtgattcttgttgccaataaaatcgataaactggcagacaaaggtaagcttttcggcattattgaaagctatactaaagattttacctttgcggcagtagtgcctgtttctgctttgcaggatactgaattcccgggtttggtaaatgagatcaccaagtatttgccggaaggtccggcatatttccctgacgatatgataaccgaccagccggaacggataattgctgcggaaatgattcgtgaaaaggtactgcggtcaactcgtgatgaggtgccgcattctattgctgtggagattgatgaattcaaggtacgtgataatgatgatatttatattcgtgccaatatttttgtggaacgtgaatcccaaaaaggtatcgtgattggggctaagggcagcttgctgaaaaagatcggagagcaggcccggaaggatattgaatcactgctcggcaataaggtttttcttgatctgtgggttaaagtaaaacctgattggcgcaataaggataaggctttgaagcaattcggttatgaaggctgatttattgactgaaaatacagtagtatggtatgcttatgctaataacaatttatgaagtttatataagtaaggagagatgacctatcgacggcgaccccgctatgacatgcttatttgagctgtctattgcattattgatcactttattgaacggcttttttgttatggctgaatattctttagtcagaatcagaaaaagcaggctggatgaattgatccggcagggaaaaagcagagctaacacagttttaaaaatgagcgaaaagcttgatacttacctgagtgcgactcagcttggtattactgcttcgtctttgcttttgggctggtttggcggcccgcttctcgctgaaatgttccgcggtatgtttggggtaagtgccggcacctggtatgatcattcgctggtttttgcctgtgcgtttcttatcatcgtttttctgcatgttgttttcggcgaactggtgcctcgcactatcgccttaggtaaggtcgagcaggtagcgatggcggtcgcttatccgttggttttttttcattaccttttatatccgctggttgtgctttttaatcg

SEQ ID NO: 9978 - DNA, 30462 bp, Unknown
  gut microbiota DNA sequence
atatgatttgtttgtatactgatgatacgctgcaggaaaatctgcaggctgtgcgtgaaagccggcatacacgttatcctttatgtatggaagacaaagatcatgttttgggcgttattcatgtgcgtgatttgatggatctggacgatgacgacgatccggcttttgatctgcggacacgaatgcgcaatattgtcgttgttcccgaaggaatgtcaacggctaaagtgctgcagatgatgcagcataagcgtatccagattgctgtagttgctgatgaatatggcggtacggctggtctggttacaatggaagatctcctggaggaaattgtcggtgatattcaggatgagcatgatggcgaagaagcagaagatattttgcgcttaggtgatgacagctatgagttcgacggccttgttttactggacgagatttctgaacttttaaatattgaatttgacgaaccggaggaagataccattggcggttttgtcttcggacttttagggcgtaagcctgaagaaggtgacagagtcgttaccggcggctggcgctttgaggttactgaagcagaaggctttagagtaacacgggtcaaagctaccatgttacaggaagatggtactgcggtacaagctgatgagtaatactgcatatcaggacgaagtaattattttaaaagtaaaggattggcagactgcggataaatacgcagtctgtttttcgcgtgcccatggtaaaataccttttttagcgtacggtgcccgttatgcgaggactactggcggacggctgatacagccttttgcgatgctcgatatgcagctatattctggtaaacgtctggacagtatgaaaagctgtgaattgattgctttgccgcagcaaatggacatcaaacagatggcttatgcttcggtgattgctgaagtgacagaagctctgacggaagcacatgagccgcaggaagatatttatgagctgcttgtaggagcagtacaaatactttccaggaataacccgcgtctggtcgcgttgtcggctatttgcaagctgcttgttttaacaggatttgctcctgtttatgacgcctgtgtcaactgtactgaagctgttgaaggagatgctttttttagtgtcgttcagggcggccttatttgcgaagcctgtcacggaggggaagagttgccctttagcagcggcgctcagaagctgctgcaggagctgattgcgctggatttcaatgatccacagccttttactgtgcgcggcggcgatttgatgcagctggaacagatactttatcggtttattgtttaccagatcgacaagcctttgaaaagtttaagctttttagcgcagttaggattgtaaaagcattgacaaaggacgtctgatttgatatattttcttttaagcgatgaaagggataagtagttttctgttttagcgagccgggatggtgtaagccggcagatgagaaaacaaaggcacccgggagctgcaattttataaacatcgaggcggaccgtatgagcggtcaagcagggtggaaccgcggagtgatttatgtctccgtccctgtaacttaattgttacagggacggagacttttgtttttgtcgttgtaacaaataaaataggaggcagaacatgaattttcaaacaattattttgaagctccagaaattctgggcagaccaaaactgcatcatgggccagccctatgacgtcgaaaaaggtgcgggaactatgaatccgtcaacttttctgcgcgttttaggaccggaaccatggcgtgtggcttatgtagagccatctcgacgtccggctgacgggcgttatggggataaccccaatcggttgttccagcatcatcaatatcaggtaattattaaaccgtctccggataatattcaggagctttatctccagagcctggccgaactgggtatccgtcaggaagaacatgatatccgttttgttgaggataactgggaatcaccgactttaggtgcttggggacttggctgggaggtttggctggatggtatggaaattacccagttcacctattttcagcaggtcggcagtatcgacgtgaaacctgttactgttgaaatcacgtatggtttagagcgactggctatgtatatccagggtgtggaaaatgtttttgatattgaatgggtggatggagtcacttatggtgacgttttccatactaacgaagtagaacagtctttttacaattttcaagtagctgatacagcactgctgtttgatctgtttgataaatatgaagctgaggcaaaacgcgttattgaggccggatatatccgtcctgcttatgattatgtattgaaatgttctcatacttttaaccttttggattcccgcggcgccatcagcgtcagcgaaagaacggctttcattggccgtgtgcgcgctatggcacgtttgtgcgcagctgcctatgttgaacaaagggaaaaacttggcttcccgttattgaaaggggagaataaataatggaaaaattattatttgaaatcggtactgaagagatccccgcaaaatttatgccgggtattcttaaacaattacaagagcttgctgcaggtaaaatgcaggagctgcgtattccgtttgaaaatatcaaggtttatggcacgcctcgccggattacctttattgctgaaggtgtagcagaagctcaggcagacagtacgattgaggctaaagggccgtctgcaaaaattgctttcgtaagcggagctccttccaaagcggcaataggctttgcccgcgggcaggggatagacgttaaagacctggaagtgcgcggagaatacgtttatgcagtaaaacatttggcaggtcaacctgttgtcgatttactgcccggtttgctgcttgatatcctggagtctttatctttcccgaaaaatatgcgctgggccgattatgattttcggttcgtgcgtcctatccgctggctggtagcactgttcggtgaaaaagtaataccggtagaaattaccggcgtaaaatcgggcaggtattcgatgggacatcgttttatgcagcaatctatgaaagaggctgtggaaactaaaggcctgctgagcgcggctatcaataaggttggcaatgtagtgcattctgctgttatgggaatgcagggagctgttgagatccccaacgctgatgcatatgtacaggcacttgctgacaactttgtgatggtcgatcaggatgcccgccgtgaattgattcgtcagcaggtgacagaactggcggctgccgaaggcggaattgctgaaattgacgaagacttactggaagaagtcaattatcttgttgaatatcctactgcattatgtgggaaatttgaagaaaaattcctgtcgttaccgaaggaagccattatcaccccaatgcgtgaacatcagcgttattttccggtagtggatgaagaaggcaggctgctcaataaatttattacagtccgcaatggcggtaaagagtttttagatgttgtcgcacacggtaatgaacgtgttttacgcgctcgtctcagtgatgctgaattcttcttcaatgaagaccgcaaactaaaattggaagaccgtctggaaaaactgaaaacagtttcattccaggaaggtctgggcaatatgtatgataagagtgagcggttggctaaactggctgaaatggttaagtttgccatcaatgttaaagttgacgatactaacctcaaacgtacagctttgctgtctaaaacagatcttgttgccgggatggtggttgaatttacagagctgcagggagttatggggcgtgaatatgccaaattagacggcgaacctgctgaagttgctgaaggtatttatgaacactatctgccgcgttttgccggtgacgagctgccgaagggtactattggacgtattgtcggcatcagtgataaaatagataatatcgttgctactttcagccgcggacttgcaccgacaggctcgcaggatccttatgcattgcgccgtcaggctttgggtatcatcaatattcttatcagcagtaactatcatatgcccctgatcaaaattctggcaggtgcgctgtatctgctcaatatcaaaccggaagataccggtaaattgataccgcagattttagaattctttaaattacgtttgaaaaatatgatgatcgaacagggaatccgttatgacgttgtcgatgctgtttttgccgatgaacgcaacgatgatttagtagatatttacgcgcgctgcaaggctttgaatgcgtatgtagttctgccggaagcagaagctgttattcaggcttctatccgtgtctgcaatctttgcaaaaaaattgagactgaagttgctataagcagtgcgctttttgccgacccggcagagcaggaattgcatgatgttctgattcgtcttaataaagagctgatcccggacatcgtgacttataattatgccggtgcattaaaacttgccgatcaggtagttgagcctgtaaataaattctttgacagtgttatggtcatggatgaaaatgttgatattaaaaataatcgtctggcccttcttgagcaggcgaaagaggttacaaatgctgtcggcgatttgagctgtatcgttctttaatcgcacattttacggcagttgttttgtcaggcccttggttacaaacaccagagtacatttagtacgcggcgtgtctgtcatcaggggctttccttgtatttgcagtgagattcgtgggcttgattgtattgttaagaaatatactaagaagtacattgtgcaatcgttacatatatggcgcagtctatgagatggattttagttataatctgctgattttactttttcccaggtatcatttagtgtatactaatatatatactctgtttttccagtgacgaaaatattatttaaagagtaaaggagggccgtactgaaaataagcacattttgtaaaatttaacacaaaaagttaaaaagtgatgaaaaaagtccttgaatgtggtgtacaaatatgatatagtatacactatattaagggcgcagcccaaaaagtataatataaaggagtgctacaatcatgaaaaaagaagaacagtttcttctctggtttgagcaattagaaagaaaagacgttgatatcgttggcggcaaatcctcttccctcggtgaaatgactgctaagacagatgttcccgttccttacggttttgctactacggcttacgcttatagatacttcattaaagaaagcggtcttgaagaaaagatgcgctctattttgtctgaattgactgacgttgaaaacagcgctttactgcgtgatgtcagcgctcgtctgcgtgatgccatcatggctgagaaaatgcctcaggatctgcaggacgctattggcgctgcttatgttgaacttggtaaaagagtcggcgaagagaatccctatgtcgccgttcgttccagcgctacagctgaagatttaccggatgcaagctttgctggtcagcaggatacctatctgaacgtacagggtgctgaaaccattatcgcaaaggtaaaggaatgctacgcttcctgctttaccgaccgtgctgtttattatcgtgaaaaacaaggctttgatcatatagaagttgctttgagtgccgttgtacaaatgatggttttctctaaaacttccggtgttatgtttactgttaacgttgctactggcgatgacaataatatcctgattgaggcagcctttggactgggtgaatatgttgttcagggtactgttactcctgataattatactatttccaaacatgaccacaaaatcattgaccgctgcgtaaatgagcaggacatcatgcttgtacgcaaaaaaggcggcgactgtgaagaagtgcaggtccctgaagaactgcgcaaagtacagactttgactgacgagcagattttggaactggctgattatgctaaaaagatcgaaaaacattatggctgctatatggatatggaatggggcgttgatgaacgtaccaataaaatctggattctgcaggcccgtccggaaaccgtatggagccgccgcaataaagaaggaggagcaaaagtgcaggaaagcaaatctatgactactactgatcataaagttatcgtgaaaggtttgcctgcaagcccgggtaaagtttctggccgcgtacacgttattcttgatccttcccgcatcgatgaatttaaagaaggagagatccttgttactgagatgaccgctcctgactgggtaccggcaatgaaaaaagccaaagctatcgtcactgacagcggcggaatgacctgtcatgcttccatcgttagccgcgagctgggtattccctgtatcgttggtactaagagccgtggtgaagctgctactgttactattcctgatggtattgatgtaactattgatgctactcatggcgtagtttatgaaggcattattgaagaagctaaaaaagaaaatcaggcaggcgctgctgtagcggttgctgaatacttcccgccgactggcactaaagtttatatgaatttgggcgatccggaactggctgagaaatattccagtctgccctgtgatggtatcggtttgatgcgtgaagagttcatctggactacttatatccatgaacatcctttgtatctcattaaaaccggacatcctgaaaaagttgtcgatcagctggcagaaggtatgcgtcaggtttgtcaggcaatggctcccagaccggttactctgcgtttcagcgatttcaaatccagtgaatatcgtgatttgaaaggcggcgatgagttcgaaccttatgaaccttcagcattattgggctggcgcggtgcttcacgttattatgatcctaaatacatcgaagctttcaaactggaatgccaggctgtagtgaaagttcgtgaagagtttggtctgaaaaaccttaatgttatgattcctttctgccgtaatgtagaggaatgtgaaaaagtggttaagattatggctgaatgtggcttggagcgcggtaaggactttaaagtatggttgatggctgaaattccttccaatatcattctggccgatcagttcaataagtatgtagacggttattctatcggttctaacgatttgaccatgctggtgcttggctgtgaccgtgataatgatactgtttcccatatctatgatgaacgtaatctggcagtgcgccgtgcagtacgtcaccttattgaggttgctcacagcgaaggcaaaactgtttctatctgtggtcaggctcccagcgtttatcctgaattctgtgaattcctcattaagagcggtatcgacagtatttccgtaaatcctgatactgttaaatttaccaaaaaattagttgctcaagtagagcagcgtgttatgctcgacgctttaacaggtcgcggccgtaaagaagtcgaagaacttgactggaaataataattaagaaaaaccccgttgtcttttaagacagcggggtttgtttattaaaaatagaatttagagttttttagctttgatggcgataagattcatatatttccctgcaccggcattcattgaagctctatcgttgatggcatgttcctcatcacattccagccagtcctgccaggcttcctccatacacttcagctctgagatgctttcgatattgatcgtttgagattgtgaaagcagttcgtgccaccacttacagctgtgaaaggtatcaagatcttcagcaccccaggaaatgagcagttcggacggcagattattgtgataatcttttttgaagccggggaaggctaaggcaatgataccatttggtttgatataaggagctagtttggtgtccataaattcaggtgtattgccaaaataatgatatgaatcgacactgatcaccgcatcaaaataattttcagcatagggaaggtcaagggcattggcatggattggtatgatgcgatcttcaagcccgagctttttgaagcgctcaaaattttctgcagctgttatccaaaggtcagttgcatagacttgtacgccgaattcttttgctaaaaagattgatgtaagtcctttgccgcagcccaaatcaagtattttcatatctgacgtgagttttattccttctgtaagttcttctaaaatttttaaggcattagggcccatcatattttcaagcagaaattgcttgtcgtattgttcgcttttaggatatttcattatagcacctgctttctctgtctttgtgtttattatattacaggttttacaaaattacttcctgcattttttttctgaaaagaaaaagagaacgtcaggtaatgacgttctcaaggatcagattttctttttagcaatgatactgtatattgttttagatgacaaaaagtattcttcggcaagaacagtaacaggaattccacttagataacggcagaatatttcctgattacgttcagcagtttgttgttttgtacctttggtcgatccccaggggcgtttgttattggttttacgagggatatagatatattcacagtctatgtattcctgaatagctgataaaagtggcggtggtaatatttttttaccgttttgatagcacatattgcttcctcccagatttataattaccgggatggcagcaaaagctgttttgttttagcgattgcctgtcaaatagcctttgctacctgacatgaccgcatcgatatttcttaaaggattgataaagcaatcctcctttcaaataatagattctgggtttatcttatacgatagcggcagatattgcaagaagcagatttgtaggtttgctgtaatgcgtgggaagtaaaattcctggaaaatattttgattttggtttgacgtaccacttaatggatggtaaaatattaccaatagaatattacctttaaagcggtcctgtgagactgtaaggtagacttttaggtaacttgtactacaagccttctttgccatcttgcaggcacagaaggcttttttatgtgattaataggaggtaggacaatggcaaaagcaaacgtatctctgggtggcagagatatccttgatctggattcactttccatcgaggaatatgaaatgattctgcaaactgcggcagaaatgaagaaaatcatgaaacgtgatatcaaaaaggtgccgtcactgcggggaaaatccattatcaaccttttttatgaaccaagcaccagaacaagaacctcatttgagctggctggaaaatatcttggcgctgacgtagttaatattactactgccagctccagcgttgtaaaaggtgaatgcctgcgcgatactattcttactgtacaatctatggcttgtgacgcaatcgttatgcgccatccgatcgagggtgccgctgcttatgctgcggaggttgctgatcctgttatcatcaacgccggtgacggagcgcatgcacatccttctcagggacttctggatatgtttaccattcgtgaacagggaaaagatctgacggggttaaaaatggcgattttaggtgacgttctgtatagtcgcgttgcccgtactaatatcgctgcctggactaagatgggggctgatgtacatgtagccggaccaatgactttgctgcctcacgatatagaaagtctgggcgtaaccgtacacaaacgtgttgaagatgctatcgaaggtgcagatgttattgatgtcctgcgcattcagctggaacgtcagaaaaaaggactgttcccgtctccgcgtgaatatgcacgaatctttggcttgaatgaaaagcgtctggcgctggcaaaacccgatgttactgtcctgcatcccgggccgatgaatcgcggcctggaaatttcctgggaggtcggctactgcgataacgccgctattcgtgatgaagtgcaaaatggtgtagcagtacgtatggcactcttattcttgactttgacggggggtaagcaaattgaaaacattgattaaaaacggtcgtgtcatcgatcccagccaaaatattgatgccattatggatttattggtggaagacggtgtagtcaaagaagttgcggcggagattaaagctgctgccgatgaagtatatgatgccgatgggcttatagtggcgcctggtttggttgacgtgcatacacatttgcgtgaaccgggcctggaagctaaggaagatatcgtaacaggtacaatggctgcggcagccggcggtgttacgactatcgcctgcatgccgaataccaaacccgttattgataactctatcattgtttccggtattaaggaacgtgctgcacgtgaaggctatgttaatgtagaggttatcggtgctatcagcaaaggcgaagaaggtaaagagctggctgaaatgatcgatatgtctgaaaaaggcgcgatggcgttctcggatgacgggcactttgtcaacagtccgcgtctgtttacacttgccgccaaatatataggtgcttttgataaagttttgatttcccatgctatcgaaccggaactgggacatgaaggctacatgcatgaaggtgctgtttccgcacgtatcggagtgcccggtatacctgcaatagcagaagatattgctgttgcccgcgactgtcttattgccgaatataccggcgcacatgtacatattgcgcatgttgccagtaaaggcgctgttgatatcattcgcggctttaagaaaaaaggtgtcaatgtgacctgtgaagttacagtacatcatctgactttaactgacgaggcctgtgctacttacagcagtgctaccagggtctcgccgccgctgcgcagcatggatcatgtagaggctttgcgcgctgcagttaaagatggcacggtagatgcgatcgtcactgaccacgctccgcatgctcctgaagaaaaagacgttgagttccgttatgctccctgcggatttacgggtttggaaacatccgttggtgtagttttaactgatctttatcatacaaacatcttcacaattaacgaaattattggtaaaatgagtacagaacctgcgaatatttttgcactaaaagctggaagtttaaaagttggttatccggcagatgtaactattatcgaccttaacaaagaatggactgttgataatacgaaattttatacacgcggcaaggtaactcctttccaaggaaaacattgtaaaggcaaagccgtagctacgatggtagcaggtaaattcgtaatgagagatggtgaagtatgcaaacgatagcaagaaaaggtaaattggtattaaaagacggcagtgtttatgaaggcgagctgtatggtaaacgcaatgcggtaggtgaggttgttttcactaccggtatgagcggttatcaggaaaccttaactgatccgtcgttttgcgggcagattgttgttatgacttatcctttagttggaaattatggtactaacgatctttttaatcaggggagaaaatctttttttcagggatatgtgattagtgaactgtgtgatcatcccagcaactggcgctgcgaaaaaacgctggaacagtttttagatgaacaggatgtacctgtactgacaggcgtggatacgcgtgcgattacccgtaaacttcgcaattatggtgtactgcagggtgttatcgtgccggcagaaatgccgcaggaggaagtggaaaagctgctggctacaccagaagtacatgatcaggtagctacagtaacaactcctgaaatttatacgcttggcaacggcaaatatcatgttgcggtcatggattttggtatcaaacaaaatattcttgaatatctggccagttttgactgccatttgacggtttttcctgcatatactacagcagaggagattttggcagcacggccggacggtattttcttagctaatggccccggagatccgaaggatttacagccgatcattgaagaagttaaaaagctgatcggcaagaagcctattttcggcatctgcttaggtcatcaaattttagctttggctaatggtgctgatacctttaaaatgaaattcgggcatcgtggcgtcaatcatccggttaaagaccttttggaaaataaggttctgatcagttcacaaaaccatggttatgctgttgacgaaaaatctttagccggtctgaatgtggaaataactaatatctcactgaatgatggtacgattgaaggtttgcgttatcttgaccatccttctttcgcagttcagtatcatcccgaggcaagccccggaccaggcggccatgaatatttatttaaacgttttgtaaaaatgatgggaggccaaaactgatgccaaagctgcaaaatatcaaaaaagttcttgttatcggttccggcccgatcattatcggtcaagctgctgagtttgactatgccggtactcaggcctgccgttctctgaaagaagaagggctggaggtcgtacttgtcaacagtaacccggctacgattatgacggacgtgcatattgccgaccgtgtttatattgagcctgttaatgttgaatttttggaaagtgttattaaacgcgagcgtcctgattctttgctggcaactttgggtggtcaggttggcctgaatcttgcaatcgatctggaggaaaaaggtattctgcgcgaatataacgtgcagcttttaggtactcagatttatagtatcaagagagcagaagatcgtgagcttttcaaagaaactatggaaaaaatcaatcagccgattccggaaagcgctattgttgaaacgatggcggcagcgaaggaatttgcccgtaaagtcgggtttcctctgatcgttcggccagcatatactttgggcggcaccggcggcggtatcgctgaaagtgaagatgaactggatgaaatcgttaataaaggtttgaaatacagtcttattggtcaggcattgattgaacgcagcgtagcgggctggaaagagattgaatttgaagtgctgcgtgacgcggctgataactgcatcactgtctgctcaatggaaaatcttgatcctgtaggcgtacataccggcgattctatcgttgccgctccggcgcagactctgagcgatcgcgaagtacagctgctgcgtcaggcttctattgatatagtacgtgaattgggtgtgcgcggcggctgtaatgtgcagctggcattggatcccaattctgaacgttattatgtaatcgaagtaaatccgcgtgtcagccgttcttcggctttggcttctaaagctaccggttacccgatcgcaaaggtttccagtaaaatagctatcggttataatctggacgagattcaaaatgctgtaacgaaaaagacaactgcctgcttcgagccttctattgattatgtagtactgaaattcccgcgctggccttttgataaatttgttacagccgaccgtacattaggcacccaaatgaaggctaccggcgaagttatggctatcgaacgcacactggaagcagcaatgctgaaagcgatccgttctttggaaatcggtttgactcatctggaaatgccggaattaaaagaactgagtgatgaagaaattcgtgctcgcatttctaagatcgatgatgaacgtatctttgttgttgccgaagcacttcgtcgaggcgtaagtctggaagagatccatgagatcacgatgatcgacagatggttcctgcagaaaatattgaatatcgtcaagatggaaactgttttaaaaactgaaccgatgactaaggagataatgcgtaaagctaaacgcatgggctttgccgatgtggttattggcgaatatatcggtaaacagatgatggaagtacgtgctatgcgtaaggactggggcattatcccaacctataaaatggttgatacctgtgctgccgagtttgaagctgaaacaccttattattattctacctatgctgttgaagatgaagtgcgcgtcagtgataaaaagaaggttgctgttttaggcagcggaccgatccgtatcgggcaaggcgtagagtttgactattgctctgtacattccgtatgggcactgaaagagcttggatatgaaaccatcattattaacaataacccggaaactgtaagtacggactttgatacttctgatcgtctgtattttgaacctttgacagtagaagatgttttgaatattcttgataaagaacagcctgaaggcgttatcgtacagtttggcggccaaacggcaatcaatctggctggaccgcttgcagatgcaggcgtgaaaatacttggctccagtgttgacagtattgacagagccgaagatagagaacgttttgaacagcttttgacaaactgcaatattccgcgtccgaaagggcatactgtttttgatacggcaggcgctttaaaagctgcagctgatgtcggatatccggttatggttcgtccgtcttatgttttgggcggtcgcgcaatggaaatagtttataatgatgaagaactgaaacattatatgtccagtgctgttaaggcttcacgcgaacatccggtactggtcgatcattatctgcagggtacagaggtcgaagtcgatgctatctgcgacggtaatgaagtgctgattcccggtattatggagcatatcgaacgtgcaggtgtgcattccggcgattctatcgctgtttatccgccgcgtaatctgtccgagtcagttatcaaaactatcattgattataccaaccgtatggcacttggactggaagtaaaaggtatgatcaacatccagtatatcgtacggaataatgaggtttatgtaattgaagtaaatccgcgttcttcccgtacagttcctttcctgagtaaggtcaccaacgtgccgatgatcaatgtagcaactaaagcagctatgggtcattcgctgcgtgagcaggggtataaaccaggcttgggcttcttcccggactattatgcagttaaagcccctgtgttctcattcaataaaatgagtaatgtcgatattacattagggcctgagatgaaatctacaggcgaagtaatgtgcgttgattatcagtactcacgtgctttgtataaagcatgtattgcttccggtatcaatgtaccgcatgaaggctcgatactgatcactgttgctgatatggataaacctgaagcggcagaaattgcggccggttttgccgatctgggctatgaaatcatggctaccggaggtacagcggaatatctgaaagaaaagggtgttaaggtgaccgtagcgactaaagtcagcgagggcagccccaacattcttgacgatatcaaagaaggccggataagtatggttatcaatacaactaaccatggtcgtgatgctgagcgtgacggctttaaaatcagacgttctacagtagagcatgccattgcctgcctgacttctatggacacagcacgtgaactgcagcacgttatgtcggcaatgcgccgccgccgtgtggtcagcatcgttgcattgcaggatttagcctgggagggataagcccgtgccaaaaactattacgaacgccactgttattggtcagcgtgttttaaacgctactacaaaattaatagaagtttatgctcccgagatcgccaaaacggcggtcccgggacaattcgtgaatgtgcaggtctgcaagaatacggcgccgttgcttcgccgtccttttggcgttgccggagtaaatgcggataatggtactttcattatgatctaccgcattattggcgaggctactcatattctggcagaagtgtgcagtggagataagctgagtatcgtaggtcctttaggccatggcttcgctatggaggctgaacgtccattgctggttggtggtggtctgggactggcgccgctgctgtatttggcagaaggattctgtgcgcagaacaagcccatagagattttgatgggagggcgttcggaagaagaactgttttggacagatttgtacgaagatatttgccaaaatatccatattacgacagatgacggcagttgtggtgtgcaggggacagtaattgctcttttgccgcagcttttagacagcggtaaatatgactgcgtctatgtctgcgggcctgtgccgatgatgaaagctgtagctgaagttgctgccgaaaaaaatataaaatgtcaggtttctttggaaaagtatatggcctgcggtcttggcgcttgcttgtcctgttcgtgcagtggtataggcaagcggcttaaggtttgtaccgacggcccggtattttgggccgaggaggtgggcgaatggtaaaagcattgtatgatggacggttggcgacaaatattgccggcttgaaaatgaaaacaccgattaccacagcttccggtacttttggctttggactggaatttaccgactttcttgatcttgaaaaagtaggggctgttactgttaaaggtacctccttagaaccgcagccggggaataagggacagcgtgctgttgaaactccgtcagggatgctcaacagtatcggacttgaaaatcctggtgtggattattttttggaaacaacgttgccgcaactgcgtcagtatgacgtaccggtaatagttaatatttatgcccattcctatgaagattacggcaaggttgccaaaaaactggatgtagaaggcgttgacgctttagaaataaatatttcctgcccaaatgtcaaagaaggaggcctggtttttggtacctgccctgacagtgcagctgaagtagttaaagcggtaaaaagcaatacgtctaaaatggtgattaccaagctttcaccaaacgtgaccgatatcgtagccatggcccaggctgtagaagcggcgggaactgacgctatttcactgatcaacaccttgattggtatgaaaatagatattgacaggcaaaagccggttttaggcaatgttatcggcggacttagcggtccggctgtacgtcctgttgcagtgcggatgtgttatcaggttgctcagaacgtacatgtgcctattatcggtatgggcggcattatgacagcagaagatgcgatagaattttttctggcaggtgccagcgcagttgctgtaggaactgttaattttaccaatccttgtattgcagaaactatttcacatggtattttggaatatatggataagcatggcattaaaaaacttaaagatatgatcggtttggcgttgccagaaggtaagatccatctgaaacgcgctgtaaaacgttaagggggtggcaggatgaatcatgacgatcgtttgatcgtagctttggatttccccacaatggaacaggctaaagcagtagtattggaattaggagataatgtcagccattataaggttggtatggagctttattatgctgcgggaagtgaaatgatacgcttcctcaaaggtcataataagcaggtgtttcttgacttaaaattacaggacattcccaataccgttgcaggtgctttggcggttcttactggtttaggtgcagatatgatgaatgtacatgccgtaggcggtaaaaagatgatgcaggcagctgttaaatctgtgcgtgaagctgctgcaaaattgggacgcccggcgccgaaactgattgctgttactattttgaccagtatggatgatgagcagtttggtgatcttaattataagaacactattgcagagcaggttattgctttggcaaagctggcacaggaagctggcatggatggtgtcgttgcctcgccacaggaagctgcaggtattcgaagtgcctgtggtcccgagtttttgatcgttacgcccggtgtacgtccggctggtgcgtctatagatgaccaaagccgtatcgctactcctgccggagcatttaaaaatggttccagccatatcgtagtagggcgtcctattactaaagcagaagataaaattgctgcggcacaaagcatcgtagcagaaatcagaggtgtttgatatgttgcaagaaaaagaagtaatgcagcttttagaagaaactgaagccgtgcttcacggacattttttgttgaccagtggtttgcacagccctatgtatgtagaaaaattcaatgtgctgcagcatcctaaatacacagaaaagctttgtcaggagttagctgaacgttatgctgccgataatgtagaattggtagtaggcccaatgacaggcggtatcctgctggcgcacgaagttggtaaagcgcttgatacccgtgctatttttaccgaacgcgaaaatggtaaaatgactttaaaacgcggctttgagattccaaaaggaactcgcgtcctgatcgttgaagatatcgttacaactggcggcagtgttatggaagttctggatgttgttaaagaacatggcggcgttccggtcggtatcggacttttagttgaccgcagcggcggcaaggtcgattttggtattcgtactgaagctttactgcatcttgatgtaccaacctttaaagaagaggactgcccactttgtaaagaaggcaagccttttaataaacgcggccgcaccggtaaatagcttctaaagtgttgatagtataaaaataaaggccgattgctgataatcaagcaatcggcctttatttttatgtgatttttgttataatagaagctgtgtgtgaaaggggtagagaagatgtatgttgtaatcagagaccatattttagaaggcgacagccttgaagatttggctgcctgtttgctaaggtggatgccgcctttggtgccgtggatgcttgatctgcaaaatgaagtgaaagagcaggcaggtgaatatggcagtgaaggccaggcattgttagctgttattaaaggagatagggagaaatataaaatagactatcaaagtaaggacagtccttttttataagtaataaccaagggaagccaggcattacagctgacttcccttggttttattttaacatgtctaaaataaaaaagctgcagacatcgtctgcagcttacttttgcgtggcaggggcagtaggaatcgaacccacaaccaacggttttggagaccgctactctaccagttgagctatacccctaaaatggagcggaaaacgagattcgaactcgcgaccccctccttggcaaggaggtgctctaccactgagctatttccgcaaatggcgacccggatgggactcgaacccacgacctccgccgtgacagggcggcattctaaccaactgaaccaccgggccatttgtcagtagtcctgacagatataaataataccataaaaccatgaatgatgcaaggattttctgtgaaattactaaattacttttcagcggctttgcaaaataaccgttttagcgtataatcataagtaatatcaacgatagtactgtttcgttgagtcatcaaagtaaataaggaggatgtatcatgctcaaaaccccagattgggctgcaggagccgaatatctgcgtgaacatgcgtctgagctgatcccattgatcgataggtttcctgtgtgtgaattgaaacccgagccgcaggagaagtatttcgggacgttagtgacaggtattgtttcacagcagctgccgccggatgtaagtttgcagttattaaaaaatttaggcaagtttttgggaaatccgctgcagccgcaggcagtactggatgcctcgatggaggatttatgtgaacagggacttgtgaaacagaaagccgaatatttgaaaagctttgctgaagcagttgttgcaggtaaggtcactatagaaaatttttctggaatgactgacactgaaataaccaagcagcttgttcagattcgcggcttggggcaatggactattgaaatgtttttattgcttgccttgtgccgtacagacgtggtgccatcagcagattttatttttaaaaaagagctgaaagaattgaagggattaaatgatatcccaaaacgcggtcaaataatgactcttacagaaacatggcgtccatggcgttctttgggagtgtggtatttgtggcaggaagcagcatttaaagaagaaaataaaaaagtaaaataaaaatgaggccgtatcaatacggcctcatttttattttacaaatttccactactgagaagtttcttcaaatcgcatacctgctgtgaattgcgtttttgagaataaaattttaaaaatttctgagcaataactgacaagggcctatctttaactttaactacagttttgaaaagatcaatggttgtatcagatattctttttgttaccagatcagaacctaaaaattcgcccggttcgataggtactacggcaacggcggttttttcgtaagcccattgcagtgcagtattgcgggtggtactaacgctgagtatttgtggagataaggcattttccgcgcaacatttttttaataaatcgcagcagccggcagagacactcagcggcatttcagataattctttcagagtaatatcggatgtggtattgtcgagccacacggcttctttatgaaaaacggctgataattcttcacgacgttgaaaaagaacctcaaaactgtcttcgtgtgtgatcggaacgcttaaaattccaagctcggtaatgccgtttagaagctgttgcgcctgttcggcaattcctccctcataaatttcataagtaacctttggatacagctggcaaaagtcttttagcgatgtactgataaacagggaagaccgcgaatttgcggcgcttatacgcaaagttcccacagctccgccgataatattatcgatttcatttcttgccagatcctccaaagagcagatatatttggccttctgatataagatccggccagcttctgttaaaataagctggcggctgccgcgcgttgtaataataagcttggcaccaaagaaattttcaagtgtttttaattgtttactaagtgctggctgtgcaacatgcacacattcggcagcacctgtaaaacttcctgcttcaatgatagccagaaaatttctgtagctttctaattccatttcaataacctcctgataataaaaaaacgccctgcacggacgtaaagaaaataaacaagtcaatgttatgatctttttttcctgtcactcgcagcaaaagataaacaatctggctatactgactttacagtggcgggaccgtgtcataaaatgactttgacctgattgttttaacaatatgaagtttcagctgtttcttattttaatcgttccattattttgtgtcaatataaaatattatttgttcgtaaagataattattagtttttcctaaatgttataacttaaattcctaataggtatttttattattttactctctggggtatactttaggtgtcgcaagcagtaaaaattatcagcacctataaagaatatttttaaggagtgattttgatgacagaagcaacaatggccaataattccgtgaaatttaacaacgagggtgaaggattcctgttcagccatctgcgtaaacaacgccaaatggcagcgaaggtttttccgcattgcggcgaacgcggctatggttttatccgtcgtgtacaaggctgtgaacttccggctgaagcattgaaggctcttaaaagagaatgagctgcggcagtgttttagaagtgctggtaaattactgtaaggtttttgaaagtgaattctaccgaaactatatcaaaaccattttactttgatattatctaataatgatgtttacagtactggaaagctgttatctatcaaaacagacctgatatttcgggtctgttttgatttttattatcattttttcgatatgcaaatttagcataactttaatgaataataggtatttttattatttaggaatttattatatactctttttcagtgaaaggcactcttgaaaaaggctggaaggaggatagtgaaaatgccaagtgaaaacagtaaagaaatatcaaaaataaaagagttcctcaaacaagttgataaaaaatactatcacagggctattcaaaacaggcaagcgtccagtagtgtttttccgcatcggggtgaagatggaagactgtttttaaacacgtttcaatatgtcaatctgtttaaagaaaactaggagggaaaagaatgacacccgcaatcaaatgtttaatcttattagcgatcgttgcacttttatttgtaacagaaatgattccccttgctatgacagcaattggagcatccgttgcctgctgcgctttgggacttgttcctgaaaatcagatttttttggggctggctgattctacggtagttctttttggcggcatgtttgtagttggcgcagcaatgttttatacagggctggcccaaaaaattggcggcggcgttgtacggatgtttggcaaaggtgaaaatagccttatgtttggcattatgatcattgctgcgcttatgtcggcagtgctttctaatactggtacaactgcctgcctgattcctgttgttatggggatttgtgctaatgccaaaatttctgcttcgcgtgaattgatgcctttggcatttgcagccggacttggcggtacgatcactcttattggcacaccgccaaatattctggcaaatgtagctttaaaagcagcaggtatgcctgagctgcaatttggtttttttgagtatgcctggatcggtatccctattacaatcgccggcatagtttatatgatgtttattggtaaatacttgttgcctgaagatagtggtacacttaatcttgaaatagacgaagaaattctggaaaatgaaaccagtacccaaaaacagattatttgcggaattattatggttggtgttatcggcagcatggcaactggtatcgtgcccttggaaattgctgcggttgttggtgctgtaattgcggtacttacaggctgccttaccgaaaaacaagcctacaattccattgactgggtcaccatctttctttttgcaggtatgattccggtggcgacagctatgaataccagcggcgcaggtaaacttatcgctgaagctacggtaaaaatgcttggtggtgatccttctccatatatggtaactgccgttttgtttgggcttgctgttgtacttacgcagttcatgtccaatacagcatctaaagccctgttatgtcctgttggtattgcgctttctgcccaaatgggggcgtctcccaaagctgtactgatggctattttgattgcgtcttcctgtgcttttgcatctccggtaggaacaccgcccaatactttggtacttggccctggcggctataaatttatggactacttaaaggcaggtaccggacttgttgctgtttgtcttattgtttccattattgttatacctattgtctggccgtttttcccggttagtgtataaattaagcaaatcttatccttcagatatagacttataataccttctccttttttgaatcgggtacttacgttttgagacatggcgtaaactgctttgattcaggcccctgcataataatgtgggggcatttttttcaaaaaatttgagatatacataaataaatcatgttacaatatagataataaaaactactagtatatcgcttttaataactacaaaattaaagaaaaattttacttagattttttttaattaagctaaatggaattaatgagctgaaagtgctaaattataaattgaaaaatatagaaaggactgatcaaaatgcaaacaaaaagtattttggcaaaaacagcagtagtcataagcctgtgtgctttatgcagcagtgtatttgcagctccaaccagtaaaactcttacaaaaagtgaagagctttatcctcagggctggactgtaggagaccagataaagtttaaaaaaggtacaacggccagtcttaatgataatggagctgttatcagcggtgtactggcaagtgatacctatttgcgcccacaagggtggcagcgtattattaacgattattattttgtttctgcatatactaaccgcagcccgtttttcccgcgttattacagatattggaacaataacagtacctacaatatagcactttccagttatgggcatatccgttataaaggcggtacggctgtgaccttcagcgaacagggaacggtacttaatggcactatagctgatgaaacaacagttggccttggttcagaaaaatatgggtttatagcctttaaaagcggcactatccttgatttttataatgacggtgcagtaaaaaaggggactttggcagaagatactaaactgcggcctgttggctggcaaaataatgccgtagatatggagaatgcaggttttgttgaatttaaaggaaaaagcatagtcagctttactccagacggtgaagtaacaaactgtacagtaaaagagcctttaaaatggaaagacaatggtgtagaaattgaattgccgggtggttcaataatcaactttactgaacagggtgcggcaatagttaaagaataaaaaagataaaaataacagtagaattttaaattctactgttattttttgacttttactgaaagtttgtttaaatagctgccattatcattggtaacccagtgatttatgattgaagtcatataaagatcgctgaccgcctgcaggttattatcctgtaaatactggtaaagcatagtgacatatggtttgccgtacgaacaataaataccttcaaagtaaattgttgcatatgatcctgcagctttaagaaaaaagtaaggtgaatcaaaaggatgagaaaatgattggtaaaaatacttggtatggggccgtttaccagctataaaagcagtcttatcaagtatataacccgaaacatgattgttaaaagtaacataatcagccaaggttgataaatgctgagccgagatttttgttctgatttttaaatcagcattctgcggaacaggatcgcttaaaaaaagatattcttcggcttctgctgttaaatgaaccgattctacaggtaaagcttcagtgttttctaagaagttgattctgtcactaagctcactgcgcattttttgaagattaagcaaaagctgatctaatatattggcatgtttggcaagtaagtctttgtaattggatgtagatttattattaagatactcaccaatttccggtaaagatatatctaattttcgtaacgccaagatgatctctaaggaaaagaattgtcgtcgggcataataacggtaaccgttatcatcaataaactctggtttgatcaggccaagcctgtcataaaaaagtaaggttttgcgatgaatattacacaaggaagccagttctcctgttgtaaataatttttttttatttttttccataaattttcaccaacctcttgactgtctaatgactatacatagtattatatcacatatagtagtgaaataaatttaatattaaatactggtaatctataacgagtaaaagttagtgagaatctaacacggtcccgccgctgtattagcagtgattaaaactgcttgagtcagaatttaccagcaactctatgcctgcgagagacagtatagggaagatatgacagtaaattttgtctgtatcctccttatctgttttcagagaaggaggagtttctattttacgactatatttagagaagggtgacaatgaattaaaatttgaaaggaagttgaatttgatgaagcaaagcttagaaaaaaataccctgatgatcgcattgataactggcagtgtcatctgggggggcacatcagtgtatgcagaagaaccggaacaggtttttacacttgatccaatgatagtaacagcaacaagaactgaaaaaagagatttagatgtgccggcaacgacaagcatatataccagcaaacaacttgaagctacaggtgcaacaactgttgagggagctttaaaatatgcgactggtatcgtctataaatcagaaacagcaggagatggcggcggtgaatttttgattagaggtaagcggcgtggtaccatggtattagttgatggaataccattaaatgtaagaaccggttattatgatcttgacagaataaatattgcagatgtagagcgtattgaagtagtacgtggtggtggtgccgtgctttatggcagtgatgcaactggtggtgttataaacattattacaaaaaataaaagaactaatagtgtctcagcaacagtaggtaattatggagtacaaaaatatgcgacatctttacaagcaggtaaattagggattggtgccagctggaataaaaaaggtaatatataccatacttcagaaggtgataaatattttaattttttaggcggtgaaaaaactatcctgtctatgaattataaatttgatgatgcgtggagagttactgccgattacaataattatgattataaaagaagctataatcaaacaagtactggcttgccaactgataaaagattcttagataaagaagaatataaatttgtactaagttatcataaagacggctggaatgctaatgctttttatcataaatccagttctgataccaaatatcattattggaaaaataatataatttttaaagatgcatatttctatggaaatgatgataaggtaatgggtttagatgtaacgaaagaatttgaaactaaaaatgatacagtacttgttggggtaaaaatgtacaacgaaggttataattattataacttctatgatcctgcctataaaaaacaacctaaactagagtatgactatgacagaaatgtatattctgtttttgcacaggtagatcacaaatttgataaaaaaaataatctgatccttggagcgagagaaacatggacaggcagtagtccagatggtactaattacagtgaatttacgccacagattcagtatttacataaaatgacagatgatttaagtgcttatgccagtgtaggtaaatcttttacactgccaacattgactgatatgtatggtaaagatcagataataaaaaatacacaaatcagaccggaagttggtatgcattatgaaactggtttaaaatatatttctggtattcattcctggaagttagcgctgtttaaaagtgatgtaaaagattttattactggtgctactgacgcagcaacaggagaaacatatgcagtaaatgaggatacaaaaaatatgggaattgaaattaattgtgaaataactggtaaaaatggattcagtagtaattggggcgtatcttacagtaatcctaaatataaatctgcagatgaagataatggtaagtggaaaagaaattacggtagatggttgttaaacggcggactaaattatcagcaggataaatttaatgtaagtctaaatggaagctttatggcagatcgtgttttgcaaaaatatcaggaaaagataaaaccatacttctatacaagcttaaatgctgtttataaaccaactaaaaaccatgaaatctttttaaatgtagataacctattaaatagaagagatattacttcccatgtttcttcacgctatatttccttgggtaggaattttgaaattggttataaagttttgttctaaatttgaaattgcagttttataggagaagaaaatgcgcagtattattctaataatggttttaataacagcaacgcttactggctgcggcgtcgttaaagacactgaagtaccatccggcgctttcccaggtgaatactatcaggtaacggatgataaaggcaatgtactggaatttaacaaaaagccaacacgtatctatgctactaccctgagtattgaagaaatacttgttgatctggtaccattgaaccgaatcgtcgcgatttcagagccggctgcggatactaaaatatcattaattgctgataaagctgcgcatatttctgtaaaattgcctcaaaaagcaagcacagaaaaaatactcagtttaaagccggatcttgttatagtacaggaaaattctaatgcagcttttattcaatcgctaaaagatgttggactgaaggtctatataaccaaagtaccaactacagtaaaaatggtacgcagcagaatcatcaatctggctgcagctgttggcgaaaagcaacagggtgggaaaattattaatgaattagataacaaaacagaaacagttaaaaaagtaattgggcaaataccaaaatcagaaaaaaaaaatttgatggcctattcactgttgggggtttttggcagtgcagaaggattgttccatgatatttgtataagtgcgggcgtcaccaatggtgcggcactggctgggctggttcgaggagaacatctaagtaaagaaaaaatagttgaagttgatccagatatacttatgttttctgattacagttccacacaggaaggagattcagaactttttagaaaagaagtccttgatgatccggcactgcaaagcatcaaagccatcaaaaacaaaaatatcataatcatcaaagaccgctacaggtatgcggcatctcaatatattggtgatgcaatttgtgatatcgcacaaaaaacatatccagagtattttgaccaaataaataactgatacaggtataattatgataaaaaaaacgaatagaaagaaagttatccattgtaatttaaatgatatttatatgtccgtagcgtttaataagggtatagttgtcgttctacatgcacctaagtcatgttctcacatagtttataatgcactgcttgatagttggaggcgcatcgctttacgctaccataaaaaattgcctgcacttaatgacaatctttttgtaacgggaatttctgataaagaaactatttttggtggagagaaattactgaaaaatacactggaagagataataaaagaaaaaaatccagagtgtattatagttatttctggttgtgtagctggagttataggtgacgatgttcaatctgtttgcacaaatacagaagctttatcgggaattcccgtaattcatattcctggagctggatttatgagcaatcaacaacaggaagggatattactgacgacaaaatttttgtacgaaaaatttgcagataataatatacgaaaaaataataaaagtgcgttaatttttggaatcaataaattgtattttctgccgcaggatatagaggaaattaagcgactttacaattattttaatattgatacgattatgttgccaccagccaatatgacactaaaagagataaaaactattggtagtgcaggaatagttgggataaatgctattattagcagtaaactggaagaatataaaaaatttgcggaaagttttgctgcaaagctgaaaattccagccattgaatctagattgcctctgacaataaatgaaactctggtgtatttgcgggaacttggtgaaaaactaaatatgcaggaaaccgctgattatgctattttatctgaaattcggcgtttagagaaaaaaattaatgaattgagagtttatttatctggtaaaaactgtattcttgcgatcagccattctataaaattttggaatccaatggaattccttcatttgttgcaagatgttggaataaaaataaaatatattatcttattggaagaacttacagttaaggaatgtgaagaatataaaattttttttgcgaaacatagactggatgtaaaaataatttatgaaaaggaagcatcaatactcagttttacagatagtgtagtcattaccactgattatcgtggattttttcaaaggcagtactgcataaaaagaaagcgcatcggcattggcggaacgataagattactggaaagattaaatatcttgttccaggaaaacaggagtctgatgaatgaatagattgggaaatatgcgcccctgcacaggatattgtcaaatgattggagcagctgctgctttattaagcattaaaggcatacaagttatttttaacagtccacgctggtgtgcagtaattggtgaacgcgagttaatgaatgctgtcaaagattatcaggaaaggctattttgttctgaagcgagacaaaaagatattctttatgggatagaagaatctttatcagccagtattgttgaagccatagcaaatagaatgccaaagctcctggcaattttgaccagctgttcaatgagtttgattggtgacgatattttggggatatgtaaaaaaaataaagtggactgcccagttctaagtattgaagcgggtggacttacaggcagctttacgcatggttatcagcaagcgatgcttgagc

SEQ ID NO: 9979 - DNA, 56358 bp, Unknown
  gut microbiota DNA sequence
tgtccgggatttttatatttatattatgctgttcgcgatcaaaggaatttaggcggcaaggtttcaaagccaaccctgtctgccactttatctatggattgcaggcccgacagaacaaacatttttgatgtgccctgaacaagcagtctgccgttttcatcttttaacgtaccttcggcaagcccgatcgtcctccccattcttatcagtctgccttccgcaattattttgccagaagcagcagcggcaaggttattcacctgcaggtcaagcgtagttatgccgtcctcttcgccgatgcagcagtaaagagcccaaaaggtagccgtgtcaagaattgatgaaaagacgccgccatgtactgaagcaaagggattatttaggctgtcattgatctgcgtttcgacacggcagtagccatagtcaagctcacatatcttcatgcccagcagtttaagatacggggctctgttggcaatcgccataattgctttggcgtattcaggattcacttttcgcattgcatttcacctgctctttcaatttttgcagctatcactctttcagcttttatattacactaatttttcatcttaataaagcttttattcttcactgcctgacaattatgataaagatcctttgctaacgataaggcctgcagcaaaaaaataccggacagatatctgtccggtattgcattttaattttattatgcagttttacttatttcaaagctgccgcacagcgtgcgcacacagtcggatgctcagcatctttacctacggtatcgctatagatccagcagcgttcgcatttctcgccttccgcagcctgaacagttactttcaggtcttcacgtccggtcgcttctacgccgccggccaaaccttccaccagtttagcctgcgatacgatcagcagtgtcgccagatcaccttcaacggatctgagtatcgccagcgcttcgcctgtagcatgcagctcgactttagcgtccagagaatgaccgatagttttagcgcggcgggcaccttccagaactctggtgatctcgctgcggatctcgatgaagttatcccatttgctttccagggcttcgtcgatatattcttccttgcattctggccacggcatcatgaatacggattcaggcatggaagcaggttttttcatgaactgccatacttcttccatcgtgaagctgagtacgggcgcgatcattacgaccagatccagcatgatctcgtacattgcagtctgagcgctgcggcgttcaaaggaatcggccttgtatgcatacaggcggtctttgaggatatccagatagtagctgctcatctcgatgctgcagaaattatggatagcatgatagagcacatggaagtcgtagctttcataagctgcggaaacctcttttttcaagagctgcatatgcatcaaagcccaacgatccagctccagcatatccttaaattcaactttatcggtttcataattgaaatcgttggtgttgcccaggatatagcgaatggtgttgcggatcttgcggtaaacctcagagagctgtttcagtatctctttggagatacgaatatcagccttgtaatcggaggaagctgcccacaaacgaatgatatcggcgccatattgggcgataacttcctgcggggcaacagtattgcctacagatttagacattttgcggccttcgccgtcaacaacgtaaccatgcgtcagaactgcgcggtaaggcgctttgccttcggtagcaacggaagtgagcagtgaagactggaaccagccgcgatgctgatcgctgccttccagatacatatctgcaggccatgccagttcgggacgggttttgcagactgctgcatgggaagaaccgctgtcgaaccatacatccatgatatcagattctttgcggaaatgagtgccgccgcatttggggcatttggtgccctgcggcaggatctcctcagcagaatgagcccaccaggcatcagagccttctttagcaaacaggtcggcaacagcattgatagtatcgtcgttgaccaggtgttcgttgcagtcttcacagtagaagatcgggatcggtacgccccagacacgctgacgggaaatgcaccagtcgtgacggtcggcgaccatattatggatacgtgcttcgccccaggacgggatccactgcacgtgattggcaatagcattcagggcttcttcacggaagccgtcaacagatgcgaaccactgctcggtcgcacggtagatgatggggttcttgcagcgccagcagtgtgcatactgatggcggatgttttctttgccaaacaggcggttcagcccggccagatatttgatgatgggtacgttggcatcaaaaacgaacatgcctgcaaaatccacaccggcttctgctgtcagtttacctgagccgtcaacagggcagatgatcggcagattgtagcgaacgccggtctcaaagtcgtcggcgccatgtccgggagcggtatgtacacagcctgtgccggcttccagcgtaacataatcagccaaaacgactaaggatttgcggtcaatagtttcaaacggatgtctgcattcagcatattccatatctttacctttacaggtgccgatgatattgctgaggtcttttttgcagaccttgccaacggcttccagcatctctttggccataaacaggatttcgccttcgcattctacccaggcatattcaaagtccggatgcagcgcgatcgctacgttggcaggcatggtccacggagtagtggtccagataacgatataggccggtttgccctgagctgcttctggcagcatgccgttgtctttgacgagcggcatttttacgaagatcgccggcgacttttcttcaccgtattcgatttcagcttctgccagagcggtttcgcagtgcggacaccagtaaacagcttttttacctttatagatatagcctttttttgccatctcgccgaaaacatggatctgtacagcttcataatcgtgggtcatggtgatataaggatgatcccaatctccaagaacgcccagacgtttgaagtcggtacgctgctcgtcgatccattttaaagcgtagtcgtgacattctttacgcagtaccagtgtatcaagctcatggcggttcagtcccagatttttgatagcggcgtgctcgatcggcataccatgggtatcccagccgggaacatacggggtatcaaatccctgcgcatatttatatttcataatgatgtctttcaaaatcttgtttaaagccgtacccatatggatcttgccgttagcgtacggcggaccgtcgtgcaggacaaattttttatggcccgcatgcagttcctgtttcttttcatagattttgttttcttcccagtatttcaaaaattcgggttcgcgttccggtaaaccggcacgcatcggaaattcagtttccggtaaattaagggtcttgctgtaatccatgtgtacacctccaaaaaaataaagccccgctcccaaaaagggacgagactataaacccgtggtaccaccctcatgacagacttaaactgcctgccactcgaaacaccataacgtgtgttacccgtccgggcttactgttttcagcccagaagctctgaagtgatcttcccctgccatctttccggtcgggctcgcactgtccccgactcgcttgactgtgcccggcaggctactgtcttcgtcatcgctgctgcttttattaaaacaaagtcattatacaccattatacaagttatagtcaatggtatttgccatatttaaactcaaagatgccataaccgctgtcagtatgcagatgtgaggtatcgttgagcctgaacacagcatgttcgcgccatttgttgatgcccaggaccgtcacgctggacggcaggatatcgacagaaaaatttaaaacgttgacggcagctatatcaagccccagccaatggaaaatgatgttttggatcgtgcctttatgggctacgatcagaagattttcccgctccagatcagcgcattttatcaggccctgcacattacggtcataaaattcctgccgcgtttcgccgcccggatagttgcggtgatgcagttcctttaaggtcggaggctgctgatacaaagctttggcagccgtttcagtcaagcctgccgcctgtccattatttttttcgcgcaaaaattcatacggttccagcttactgattcccagcctggcggcgatgatccgggctgattcttccgcccgcttcaaatcgctggtcaggattcgcagatcacggctttgccctgcaaaatctttggctaatttggacgcaacggcctgcagctgaacctttcccgcagccgtaagctccgaatcggtccaaccgcctgtcaaatgctctgtatgatgagttgcttcaccgtggcgtaccaaaataatcatgctgccgacctcgcttatttttcagtatcttcgctaaagtttttcaaaagctccatttggccttccaaaatgctcatcatatgctgacgatgcacagcggcctttttgacctgatcttcaaagataccttttgcgagagcagctttattttctgcttcaaaaatcatttttcttactttttcgtcggtgtcagccaaaagcgttctggaacgttcttcggcatcggcgatcatcgttctgtagcgttcgtcggcttcgctggtcagcttttgtgcttcggcacgtgcctgtgccaaaacatcgctggcctcgtcttttgcctgcgacgacatttttttgcacagatcctctgtagttactttcattttagcgacttctacttcggcggcactgcgcattttgtctacaaaattctgagtctcatttttcatctgcttcagctcggcctcagcttcgccgcgcagtctggcaatttccgccagcgtgtcgttacgcaattttgtagtttcactttcagcttcgctgcgcagtttttcagcataagcttctgcttctgtcctggcctgagtcgccgcgatttcagcgtccatttttgctttagcagcagcagcctggcattcagaagtgatctctttgcatttcatggcagtttcctgctccagcagggcagccttttgctcgctgttctttttcacttcgtcggcagtttcctgtgcgatgaccaaagtgttctgcatggtggattccatttgctgatagtattccagtttggcgctgacgcgttccacagcatctttaagctctacgttgtcctgatacaggcgttcaaaatccttggcaactttggcaaaaaactcatcgacctcttcggtgtcatatccgcggaagcctttggaaaagttcttattgtttaaatctaacggtgtcaacatatcgtgataccctccccattaaatatatcttttcagcgtgatgcttaaacgaccttttttggtagtgcccctgatctcggctacttctaccctgccgcggctgcggaaagaaatgatatcgccttcgctgaccggctgggctgcgttcttggcctctttccagtttactttaacattctggcctttgatctcgtcagccatacgtgaccgggatacgccatatcctgcagcagcaacggcatccagccttaaagctgcaactgtagcgctgatgaccttgaccttttcttccttctgcagcaggtcagcttctgtgatctcggtcagtgaaaccggggcagaacctatctgcgtcagattgttcataatgtaagtagtaaaagatttatcggctacgaactgtgctccttcagggataaaaataatatcgcccaaaatctcgcgtttacagcccatccccataaaagctcccaaaatatcgcggtgactgagttcataatagcgtttgtcccactcgactttaaaacagaccatgccaaaatccggctgaccaaaaaagtcttcggcaacaaaagcaactttcatgcgctcggcatttttaaaaccgccgctggtttccagcttcacattttcaaaattggccgcaacgatctcggccacattacagccatgcggatcaagaaaatcgctgacgcggaattttcggcttctatgagccccttccgccagatcaagcagtttggctgccagttcttcatcgccgccggcccgaaaatatcttaaaatcttttctctatctgccattggttatttacccttcaatttctcactgcgttccagcacggccagtacagcatcatacatcgcagcacgcactccgcggttttccagagcatggataccggcaatggtagttccgcctggcgaagttacctgatcgcgcagctgcgccggatgcaatgctgtttccagcaccattttgccgctgccggcaaatgtctgggcggccagcttgatcgccagcgcccgcggcaggcctgcattaacgccagcatctgccagagcgtcgatcagcataaagacatagcccggaccgcagcctgataccgccgtgatcgcttcgatagcactttcagccactacttcgacctcgccgcaggaaccaaaaatagttttagcggcgtcgatcatctcggagctgaccttgctgtcaggcgcaatcgccgtcatccccgcacctactgccagcggtgtattgggcatcactctgatgaccgcatgtcccggcactacctgatgcagcttcgccagatcgacactgcccatgatcgaaagcaccgttgcctgcggcggcattgctgcagcaagctcagcagtgatcgccgcatcaacaacctgcggttttactgccagaatgatcagccctgcatcttttaccacagctttattatcaccagatgctttaatgccgtaggttttctgtaaatattcacagcgtgccgctgacggctcgccgacaaagatctcacccgggtcagccagtccggctcccagaatacctttgatgatagcttcagtcatagcgccgccgccgataaaagccagcgggccggtttgagctgttattttttccacggttgaccacccttttcatcataaatgttgacgctggcgtcgatatctacgtttttcggggcacagaccagaatattacggccgatttttttcatactgccgcctaaagcgtaaatagtcccgctgataaagtcggtcattcttttggtcaccaggccttcagtaccttcaaagttcactactacaggctggttgttgcgcagataatcggcaaccttttgcgaatcgtcaaaattagccggttccagcaccactaccttgacctgcttttgagcaagcggcatggaaatggttttgccttcaggcgaattttggacgttctttttgctgaagaaggattttttctcagccggcacttcacttctggcttcgcttttttccaaagcggcagactcggcgggaagtgctgccctgctgacggcaggcgtactgcggggaatccgtttaggagctgtttcagccttttttacaggttcctcttcctctaaaagttcatcatcttcctcttcatataaacctaaggtttcagagatacgatcaaaaaatttcatacatttcaccataccttcatgctcatttatttttactgtaatcgcgcttaccaaataaggccgtacccacacgcacaatgttagcgccttcttcaacagctactgtaaagtcgtgagtcatacccatcgacagcagctcgattccaggccgctgcgcccgcagctcgcaaaaacagcgataaccttctttaaaaacagggcgtgtttcctctatatcgccgcacagtggcgcaataaccatcaaaccgcgtacacacagatttttatagtcgtccagctgcggcaatatcgccagataatcttcaatcaaaaagcctgtcttctgctcctcgcgggcgatgttgagctgcagcaaaatatcctgctgcttatgctgctgtccagccgccttgtccagcgcagccaaaagatgctcgctgtcagctgattcaatcagatcgaacaaggtgacggcctgcttggctttattggtctgtaaatggccgatcagatgccagaagccgcggtcaggcacaatagtgcgtttttccttcgcttcctgcacccggttttcgccgatattagtcacaccaagcgccagcgattccagcaccacgtctacgggatgatttttagttacggcgaccagtgttaccttatcgccggtcagtttagtttcagttcgccggctcaaagcttcggcgatctgggtctgtactttgtgcagattgtcttttaacaaaataaagacctcctaaaagttttatattcgccacaaaaactattattccttttttatcttcggcaaatgcttacgcccatgcgcccggttttacccaactcggcacgataggaaaaaaacagttcccgattatcgcaggtacatgtcgcggcacagtggatattacctcgctccagtcctgctgcttctaattgtaatctattcatcagccataagtccagatgatatttaccatttggtttaagcgtaaaacactcacggtattttgcacccgccgtcagaactttatcgtctacttcgtaacagcagctgccaatcgacggtccgatcgccgccagcattttttccgggttgcagccataatgacggcacatcatctgcaccgttttgagggcgatctcctccacactgccgcgccagcctgcatgcgccagtcccacagccccggtttctgtatcagccagcaaaaccggtacgcaatctgcataaaacagcagcagcggcacattttgcaaatcggtgatcaaagcatcagtgtcggcaatagtatcggcaaaatccacagcgccgctgccgataaggccttctgtcacacaaacgaccttactgccgtgcacctgggcacaggtagtaaaccttgccgcatccacacccaacgccgccgcaaactgcctgcggttggcgtttacaagctctgcttcatcgcccacatgcagcgccaggttgaatccgtccggcacaatactgcttgctccatgcagacggcagctgcagccgttgctgaagcctgcttctgtcagcgccgtaaattcacccagccagatcggcccgttatttcttaatctgaaactcatacctgtgcctccccgcaaacaccgcagcggcggcataagtcaaaacacatcggtgtaaattcttcccgctgcgccttctgccactcgctgatcaaataagcttcggtaaagcccatatccaaatgctgccagggcaaaggcctgccgatctcgtaagcagcagcaagttcctctatatccagtccctgctctttcagcacctgcttcagcggcatttctctgcggaaggcttctaataaagcggcgccgatcctgcgatcaccccttgccaaaactgcctgcagaacagtttccttcaaggattctgtctgcacctgaatatgtttcgcttttttaaaagcggtttccagcattttaaaacggcgttttaaggttttgacatcgcacagcggcgaccactgaaacggtgtaaacggcttggggatgaaaccattcacggaaattatcagatcgcctttattaagggcggcatccatcttttctcgtacccgaccgatcatcgctatcatttcttcgatatcactgtcagcttcccccggcaggcccagcatataatacagcttgatatttttcatacctgctgccgctgccagttctatggcattaaaaacatgttcttcggtaatgcctttattgatgatattacgcattttcacgctgcctgcttccggagccacagtcatcgtcctctgaccgctggcagccaaagcctgcgtcagctctacatctaaagtgtcggcccgcagagaggctaccgtaaaaggtacctgctcatctaccagtgtctgtgtcagttctttgatatgcggataatcagataccgcggcccccatcagcccgacttttttagtctgtggcggacggttgcgtattttagcaagcagcagctcaagatcgcgcgcccgcggtttgcggaagcaataacctgccatgcagaaacggcaatgccgcccgcagcctcgtgctacttcgacgatatacatattttcaaattcagtcgcatctgtcataattgccgatgtctgcggataattatccagttcacgtacccactgacgttttacgctggcaggcacctgcgttgacacctgcataccgcagaacataccgccagcatcgtactgcggctcataaaaccgcggcacatagatgccgctcagctgcgccagctccaacagtgtatcttccttagacaggcctttgtccctggcttcataaacagcgtccagcagtttattgacagtttcttcaccttcaccgatcacgaaagcatcggcaacccctgctaaaggctcaggattgaaggtcgcgcagggaccgccgatgatcaccagcggttctttggcgccgcgtgctgccgcttcaggcttcacattgctctgcgccagcatagtcagtaaattggtataatccatttcaaatgacatcatcacgcagataacttcaaaatctgcaagcggcctctgtgtttccagtgataaaagcggcgttttcgtgcgtttatgctctgctaagagcttgctgtcaggcagaaagaaacgttcgcaggctgaatcgccgcggctgttgatgagctgatacaggatatgcagtcccagatttgacatccccagatgataagtattggggtaaataaaggccaccggcctccgcgcgccaggcgcaaatacctgtaccccgctctcgcgggcaactatttctttcaacgcatttttaatctcccaggtcaacttgtctacctcgtttatactctctcagtgtgctgttagtccttcaaccgtttttcaaacatttcgatcaccgttttcaacaccttcaggcgggcataatatttattattgccttccactatcgtccacggtgcataatcagtacttgtgcgcaccagcatttcgttcacagccgcttcataggcatcccatttctcacggttgcgccagtcttcgtcagtgatcttccattccttgttcggattttgctcccgctccttaaagcgtttatactgctcgtctttatctatctgcagccagaatttgcctatcaccgtaccgtattccgcccattgggcttccatctcgttgatctcggcataggcccgcccccattcatcctgcgttgcaaagccttcgatacgttctaccatgaccctgccgtaccaggtacggtcaaaaatggcgatctctccctgtttgggaaagcgtgtccaaaaacgccatagatagttaaaagatttctctaccacgttgggagccgctaccgggttcaccgaataccccagcggatcgagagctgccgtcagccgacggatcgctccgcccttaccgcctgcatcccagccttcaaagccaaagaccgaaggaataccctttttatacatttcatactgcaaaatactcagtttggactggtatttatccagtttatctttatattccgcttttgcgatttctttggacagatcgacctttgataaaacgtcgtagatctcggtacgcggcaacaccagctgctgcccggctttctgtctgcgggcttccgcttcggccagcgccagttccagccgctgtacgatcacatcaaatatcgagacctcggcaaaacgcgtatcgtcgccggcgatcagataccagtgggcattaggccggtcgctgtcgataaacattttctcgtagatttccagataccgctgataatctacaaaatcatcatcgctttcgctgaccttgttccagcctttaccataggttttttcagccttctgcacattagccttcagctgtttttcggaaacgtgtacaaaaaatttcagcagcacataattatcatcagtcagctgcttttcaaaagcattgatatgcctgtagctcgtatttattcttttaacttgatccgcatcgcggtcaaaggtatattcatttttcagatagtaccagctgcggtaatacacagccatattgccttttgctggcagctgccgccagaaaggctcaaaaaaaggttggtccggttcttcatccgccattttggaagccgaataaactctgaacccgcgggcatccatctgctgcatcatatgattgatgatgacgctgcgctgtgacccacgccagccttcaaacaaaattattacaggaataccagcagcgcggcaagcacgctgcagttctcccagcctggtttcaaaataactcattttttcattataggcatcttttttcaggctttgttttaaatcgattttttctaacaccaatatcaccttgttctctatagattatcagtcaaaagcagttaaaaattcagtcatgcaggcagcaacacctttctttactgccctgctctggctcgcgccgccgatcttccaaaaagctacggccgacgatgacccaacttcctccacgatcctgttgaacagatatttctcagtttttacatccacacatttcagcttcatggtaatgactgaactataagtctgactgccgacgataaccataaagccggtttccttgttgcgcggcggctccatctccatgtagatcacacggtcgacgcccagctctttaccaacggcaacaagctctgccaataccggcgcgtcagcgttttcaaacggatggttctgcatcgccttagcaacaactttggcactggcaacggtattcacgccgccttttttagcaggcggatatttctctttcagcgcgtctttgatagcattagccgctacctttcggcccttttcatccatgcccgactggtcgatatacggcagcaccgccaccgaataaggcactgtcgaagcagttatttttttctctgcctctttgtcagccctgcctgtatcggctacgccggcagtaacggcatcgatcgaagaactttcctgtgcctgcagcggagcggccccaaaaagcagcgctccagccagcagtacagcagcaagttttttattcattaactaacaacacttctttcgttagaaaaataatcttgcccaattatcaaaaactatcatcgtacggtttcagcgaccgaggtttatccaatatctgcgccatcacaaaaccatagcgtacatcttcagctactgtcccgcggctgcgaaagcctttaaaggcaggctggggcttctgcggctcaaaacgtttatacaagggttccgtaacagcagattctgctgccggtgcaggttcctgacaggtattttccgcctcagactgctttttgggcgccctgtcttccggaaactccacataccacggtacagcttcttcgtcctcatcttcatagccgcggctctgccattcctccggcagctgcgtctgcctgtcggcaggctgctgcggcggcggagcaggacgcttcttgcggttgcggacatcgaaaaagataaaaaacaacagtacgatgagcggataaaacagcatcaaattgtccatacattcgcctcatctcaatacaataaccggctcataagtcggcttatttctggttactgcctttttcgccgctgttttcagggctggaaccggcaatcattttccgcatatcagtatcagcattgatattgttcatgcggtagtaatccatcacgcctaaacggccgttttccaaagcatctgccaacgcagtcggtaccttggcctgggcttcgacgaccttcgcctgcatttcctgggtataggctttcatttcctgttctttagcaactgccattgcgcggcgttcttcggcgcgggcctgggcgatccgtttatcggcttcggcctggtcagtcatcaaagcggcgccaatgttacggcctacgtcgacatcggcaatatcaatagacaggatctcaaaagcagtacctgcgtcaaggcctttagccaaaacggtacgcgaaatgaaatcagggttttccagtacatcgctgtgtttaactgcagaaccaacgttagtaacgataccttcgccgacacgggcgatgatagtcgcttcaccggcgccgccgaccagacggtcaatattggcgcgtacggtaacgcgggctttgaccttcagttcgatgccgtctttagcaactgccgaaactaccggcgtttcaattacttcggggttaacgctcatctgcactgcttccagtacattacgtccggcaaggtcaatagcgcaggaacgctcaaaagacagcgggatctgagctctgtgagcagcgatcagcgcatcgatgacacggtcaacgttgccgccggccagataatgcgcttccagctgattgacattgacgtccagacctgccttattagctttgataagcggcagcacgatctgggaagccggcacgcggcggaaccgcatacccactaaattgaaaataccaacgttgacgccggcagcaatagccgagatccacagcgccagcggcacaaaattcaaaaatacggcgataccggcaatgatcaggataaacatgaacccgccgttaaacaaaaaatcaaacatcacaacacttcctttactagttagtttttacttcctgaacaaacagtttattgccttccactttcacgatctctaccaatgcgcccggcatgatataatcgccaaagctcaccacgtcgacacgttcgccgtcgatgatgacagttcccgcagggcgcagcggtgctacgacctctccacgtttaccaagatactgcgagtgatcctcggcacctgtataaccgtggcggttctcttgtttctcccataaaacaaagggattccacttgctttcggcgggcagataaacaaacagcagggcaactactgcgcccagtgccagtacaacaccaagcaaaatatacgcggcctcagcgccgccgcccagcagataatatgagcctgccagcagcgagatcagacccgtaacgccaaaaaagccaaaccccggcaccactgcttcgattcccaaaagcacgatcccgacgcccagtaaaatatattcgattggcataggcttttacctcccttcgtatcgttatattataccaaaaaacttacctaacaggcaaatttcactattcttttacaaaagtaaaaccccgccggccagcggggtttgctcttgatgctgctgtttgattgttcatattcttttccgcggcagcctattccagcttgataccgtcgccttcaactgataccgacgcctgttcgatcgtattgcggcggcgtttatcaagattacggtattcttcctgctgcattttttcagccttaatattcgtcagggtccccgtatatttactgtcggaggacgggacgtaattatctgccggaggctccggttccgggcttttttccttaatgacaagcttcccggtgacatttagcgcataaccgtcctgcgttgaaaacagcagatctttcaaatcatattcgccgatctctgttttcccgtcagccagtaatttggtaacgtcgataatgatcccctgctctgccagcttatcggcaagcgcctgtaccaggccggtgtagtcgctgcctgtatattctgtttcaatatcgccgacgttgatatccagcggcttcagcaagcctttaagcagcggcgtcatacggtcgccataggtcagccacagggctttatcgctatctgtcatccctgccaggaaggccgcattaaaggcttcgatactttcatattccgaatcgtcgccatattttttataaccgctatcagttttatagtagctattacttatcacactgtcaccagtgccaatgatgacaccgtaattctgcgaataaccggtcacttctcccaaattatagacattcgttatcattccacttttgctattacctgcgataccggcaatatactggctgctgcccatcccgattatcgcaccttcgttatagcaatttctgatatcactgttattatatccggcaattcctcccaaataatgagacgcagctatttcaccgctattccaacaattttcaatagtaccagttttactataacctgctatcccacctacatattgagcacgaacactgccaacattccccgtattatacgcattactgataacactgacgctatagccggcaataccgcctatatattttgcccctgatacaccagatgctacagcacctgtgttaaaaacattattcaattctccctgtgagctgccggcaataccacctacatactgacttccgcccgttacattgcctttattatacacatgttctacgatgctttccccataattatagccaatgataccgcctacgccataaccgcctgcctcaacatcaccagtattataactttcgccattgacagtacctttattggaaccgctgataccgcccacctgagaaaaacctttactgtcagctgctgtgcctgcaacagtggccgtattatatgagccggtaatgacggacccgctgttattacgaccggttataccgccaataaggttttgcgccgtgaccgacccgctattataacagccgctgatactgccgccttcgttagacccggcaacaccgccggcatatatcgttccgccagttatggacgcattgttaaagctgtctttgatcgaacctgtattatagccggtcactccgcctacagacattccgtccgctgtgactgcacccgcagcaagattctgagtgtcttcaagcaccccctcgttgcttccggcaacgccgccgacggtattatcaccaattaccgtaccgctgttctccgcatttttcacaacaccgccggcattattttcacctacgataccgccaacgcagctgacacccataacattagtgctatatatatgccctttaatatttccgctgtttttaacattttcgatcagaccgtcgttgtcaccgctgataccgccaacttcactgccgccgccatactttaattcgaccagacctgtattttcggcccctgtgatcgaactgccggaactattgatacctgttatcccgccaatacctcccatactttcagaagtaatatcgccgttatttttgacatcgagcaaaatgccggtattgccccagacagtatcgccgttatagccggtaataccgccgcttctgccatctattttcagtgtgccgttattgacggcattacggatcacgccgccgttagtaccaacgataccgccgacaccgccgctgctgcataccagttcggcagaattgacaatattataaatcgtgccccagttcagtccggcaatactgccgaaattcgacattccttcaatatgtccgccagccatatttacattgccgacactgccgcctttgccaatgccttcaaacaagccgatataaccatcatattggtttccgatctgcctgatatacagattttggatactgtgacccataccgtcaaaagcgccgctgaaactgcctgttacaccatttcctgtgcggttcagccgtcctatcgggtcaaagccccggccgctgttccagtttttagtatcacctgcatcgatatcgccggtcagcatgtaattgcccaccacataactgctgccatttatagtcccggtatttctgtcgatggcctgcagttcatacacatcatgcaccagcatagcgtcgttgatacttttggcgctgcctttcagatcggtaactgaagctgtgctcagaacgtcgctggctttatcaccgccgcctttaccgtaatcgctgacctgatgcgtattccccttgccatcgcctacgtcgatcgttgttttgtcggtcacctcgtagccgatattgatattttccccggcccgcagcgtgattttacttttatcagctacttccaggctgtcagcgccgatgatcgaaaggttattcccttctaagaccagtttacccgccttcagcttgccaagattgatgatatccgctttgacattggccgcaccgccggcatcaagcggtgacaaactgccgttaaagctgtttaaagctgctttttcaagactgcgggtcgatgccgtcagctgccctacgttgacctgtgccgttttaccgaacagtatcccattgggattgaccaaaaacacattcaccccggcgccgttgagcttgccgaaaatctcacttttactgccgccgctgacataattcaaaacagcctgcatatttttaaaattcacaatttcatcagccgcgatattaaaactgttccaatcgatcgccacattgccgctgccggttatatccatcaccttgcccccggcagtaatagtgccgttattggtcactacctgtccgccgctcggcagcgcatagctccagtttggcataaacagcatcccgccgcctaataatccggcaaatatttttttatataaaagctttgtccctcttttcatctttaactgcctcccttagccctatttaaaaaagtttatatgccaaaaaccacagcctgccgtttttatcctcagcttcactctggaatttctccccgtcaagtttccttgcataatccagccgcagaaaataatcattgggcttcgcatattctacacctacgccccaacctgccagattacggtgctgaccgcagcttttagccaggtccacttcgccccagtctgtaaaagcagcaagacttaaatatggcacgggagtagaataccgcagctcggccgtggcctgataaccgctgtcaccgctggcttctccctgagggtaagcacgtactccgttggctccccccagactgaactgctcactgccgtcaagatcgcggctggccagctgaccgtgaaaattcagatgcaggtcgaaaacagatcccagatgctggatatgattgatatccgtagtgaatttagaaaaacgcccttccgtctcaggcgcgctggcgtcatcatagcttagctgtcccagataatacaaagcgctgtaaccggtagcactggcactgccgcgcctgctgcctacaatgccgccgtgcagtgtattactgtgttttctggtgctgcccagctcgccaaagcttctcatttcatctttcaactgtcggttatcataaccataaataacgctcagatgcctgctgctggtgttgatcagcggtgtcgacgcatacaggctcagcgtttttgcccgccctaccgcatcaagcagggcgaagtaatcacccaaggtataatccatttggctgtaactgatgccaagccttgtaccccggcttccaagaggcatttcataaccaaaattataattatgcagatcttcattgctcagcatcccgcctgcaaaaattttatcgccgatccgtccgggattattaagcgttgtctgaaaaccataacggtaccggccgctgtatttgccgccgtagttatcgctgtacacaatatgttcggcagtttttccgtcatgcagagcgatagtcagatccgtactgccgatcgcttcaccggcactcaaaataccggcagcgctgatacccggcaaatcattgaaattattaagtacagactcgatccccgcagtcctgatataaccatcccgttccagtgcagcagccaaagcagcggccgcagcatcggccaggcgcgaatcattttcgatgattactttgcctaaagtccccagaaaaatcctgatctcaactgtcccgtcttgaatattttgctgtggaagcacagctgttgccaccgtatagccctgctgcctgcaataatcagttactgcagcagccgcctgttccagttccgtaacagtcacttcctgtcccaaatacccctgcgttgcctcagtcaatgctgccgggtctatttcctgctggcctgtaaagacaaattgccgcagcagtaatttctgcggcagcgtttcttcagctgccttctgctgctctggctgctgcagatcagtttgctgctgcctagcgccgcgattctgttccaaggccctgacatcagcactgctgcccggcaatgaaggtgccgcccatgcagatgcggtgatccccaaagttaaaactacagttattccttttcccatcaaatccaacaatttttctcgctcctcttcccgcttagctgtaaatttttacttttcaagcccggccgcctttacctgctgcggtgtcaccttacgtctttttaccggcttgtagtttctgcagaaagcccttaacttctgcagatgaatattctctgacctccattactattcttggcggttccgtaaattccagctgcagcaaatcatctaatgtgcactccagcgcattagcggcacgcagtaaaacacggaaattaactgcgaccctgcagcactcaatattgctcagatgcgtttgactgataaccaaagcccgggctagttcaccctggctgataccgcggcatgttctgagcagcttgatattagcgccgattattttcaaacagcgttcatcgtacatattgccagcctcacatcttaatgtaatcagatcatattttttaaaattatcagccttttatctgctattacttgtaaaacatttaccaaacaatattttctataattatagcactgttgtacccccccacaagacatacaagaacttttttacgccgccgtccggttccgttattgctcttacgttttgataatcgccaaaatcacctccagcaaacagtgctgctgcccgtccgcacaacactttcacactactgtcctggcagatatggtataatgaaagccattaaacaactctgatattttttattcggcagcttcgcctgtcctgacacagaaaggtacagctatgcattatgtgcaagtaaaaggcatcctctcagctaaaaatggtatgaacctgtatcgcggctgctcacacggctgcatttactgtgattcacgcagcagctgttatcagatgccgcatgcttttgaagatatcgaagtcaaacaaaacgctcttgtactgctggaagaagccctgcggcgcaaacgcaaaaaatgtatgatcggcaccgggtcgatgacagatccttatattcctctggaaaccgaactcggcagcgtgcggcaggctatggagcttgtttataaatatggctgcggttttacagtgctgactaaatcggaccggatcctgagggatcttgatctgctgcaaaaaataaacgcgtctgcaaaatgcgtagtccaaatgactctgaccacctatgacgaagaattgtgcaaaaaaatagagccgtatgtaagtacgacccgtgagcgtttcgaagctttaaagcaattacgtgacgcaggtatcccgactgtagtctggcttgctcccattctgccttttatcaacgataccgaagctaatctccgcggtattttagattactgtatcgaagccggcgtttacggcattatttgtttcggtatggggctgacgctgcgcgacggcaaccgcgaatacttttaccagcagctggacagacacttccccggactgaaaaaacgctatatcgacacctacggaaatcagtacgttatcgacagtcccaacagtaaacagctgatgcagctgctgcggcaaaaatgccgtcagcatggtatcattcaggataatcagcagttatttgcctatctgagcacttttccaagcaatcaggcagacctgcagcaaagtttatttgaataaactttactgcaggctggtataaaaacaatttgaagaaaggttttgtattttatgaaatcatcttactataaatactttgctgcgcttttgttatttggttccaacggcatcgttgccagtaatatcaatctgcccagctacgaaatcgttctgctgcgtctattgcttggcagcctttttcttataactgtttttacggtttccagacaaaggtttactttttaccggaataagcacacttgcctttatcttttcatttcggcgtcagctatgggagcaagctggatgctgctttacgaagcctatcagcaggtcgggatcagcatagcatctttagcctattactgcggtccggtaatcgttatgattctttcaccttttctttttcgtgaaactctgacctggcctaaaatagctgtttttttaactgttctggccgggatgtgcctagtgaacttacaggcgctggacgaaggtaaaactatttggggtcttttctgcggcttaatgtctgcgtttatgtatgcactgatggtaacagcaaataaaaaagccaaacctgaatccggtttggaaaattctttgctgcaacttgtcatcggctcttttatcgtcgtcgcatttgtcagtatgcagaaaaactttgttctgtcactaacaacgattgactggataccggttttactgctcggcttgcttaatacaggaatcggctgttatttatatttttcttctattacagacttgccagtccagaccgttgccatatgcggttatctggaaccactgtctgcagttgttttttctgtactctttttacatgaagtcctgttgcctttacaaatgctcggagccgtacttatacttggcggcgccatatttggagaatgcttcaagcctgaaaagccgcagcggccgcagcaaaaataaagctcagcagtattattgtacaaacaaaaagcataataaaaaatcaagccgataatggcttgattttttattatcactatttaaatcaaatgctttactaaactaaaaatcttacctcttatgcttaaaatcgcagtgcaccataacggctttccagcttctgcaggtgttcggtaagaactcccggctcaatataagcatattccaatatctgcagcgcattcggtgcatagtccctgatagaagcgaaataaggctcccattcgatagttcccagtcctacaggctgatggctgtcgccgctgccatcgttatcatgcacatgcaccgccaacagctttttctgcagccgtttcacagtttcaggaatattccagccattaacgtgggcgtgtcccgtatccaaaagtgccagagcctgcggataacgttcaaacagcgccagatattcttcaaaatcaaaaagcagtgatccgcagggacgcagacccacattttctataacaacttgaacaccgtagctttgtgccaggctgatcacttcagtcaagcgctgatagaccagttctttaactgcggcggcctcaccatggtagccttcattggtatgcacaactacaaattctgctttgatcttttgggcataggtaaaggtttgagcgtaggcttttaaataatattcatcaccgctgtctgccagatttacagcaacacagggaccgtggatagaaaacgttcttttttccttattattctgcgccagcggcagcaataccgtatcccaataatggtcggtcccgaattcataaaaaaattctatattataggtcaacggcaaaccgctgagatattttttattgaagccggcaaacgccagatcactaactgcccattgcatcagtaaaaacctcccctttttctatatagccaatattcctgccgcttgtcacatcaaacaggctcacatcgtcccagctgaaacagataccgccggaactgtgtacatccgcattacggtcacttactgtaacgctgacagtctcaccgctctcaagctgtaattcaacagtacgctgattacctgtattttcaacataagttatacttccatgcacagcagcgtcctcgcttaaacggcaatgctcaggcctgatgccaagcagcaggtctctgcgctgaccgatcacctgacgccacagctccggtaccggcagtacggccttgccgatacaaatacaatcacggtcaaaacgtgctttgaggatattcattgacggggcgccaataaaaccggcaacaaacgtattagccgggtggcggtagatcgtatccggagcggctatctgctgcagttcgccatctttcagtacaacgatacggtcggcgacagtcattgcctctacctgatcatgcgttacatagatcattgtcggtttatagatctcatgaatacgtaccagctctgtcctggcctgctgacgcagctgcgcgtccaaattggacagtggttcatccagtaaaaagtagggtgattgctttacaagggcacggcataaggccactctctgtttctgcccccctgaaagctgtttgggcttatagttttcatagcctcttaaattaagtatttctaaggcttcatcggctctttttttgatttccgcttccggaagcttttggatatgcaggccaaaggtgatattatcccagacagaaagatgcggaaacagcgcatagctttgaaaaaccatggcaatattacgttcaccgggagcaatatcattaactactctgcctcccattttcagctgaccgctggtaatatcttccaaaccagcgatcattcgcagcgtagtagttttgccgcagccggaaggctccagcaaaatcaggcgctcgccttcttttatttccagattcaaagacttgacgattttagcatcgccgtaagatttacagacgttttcaaatacaatactgttcatatattatcctttgacccccgattgcataaaggtattgagtataaatttttggcagacgagatataatgccagcggcggcagactggtcagagtagcgacagccatagctataccccactcactgccgccttcagcgctgataaacatttgcagtgccagcggcagggtataggtttctttgtcctgcagcaccagcagcggccaaaagtattcgttccatgagttgataaaaaacaggataccgactgctattatcgacggtttgatcagcggcagcacaaccttgcgcaatacctgcagcgggccggcattatctaaaacagcagcttccagcaatggtttgggtatgccgcgcatcgtctgacgcatcaggaacacacccataccatcaacaaactgcggcagcataacaccccagggagtattcagcaggtccagcctgctcatcagcaaataattcggcatgatcagtaccgttatcggaataaagaaggtcagcagcatgctgttaaaaacagtttctttatatttaaagtcataatagataaaggcaaaagctgccaaaacactggtcagcactttgaatactgttacgaacgcagcaatgaaaaatgtattatagatataagtaaacagcggaaaattacctaatacggtcagatagttattcaatgtcggtggcagaggcaatggattgagtgttgcctgaaaaatctggtccatatctttgagcgatgtggaaaccataaaaactatcggccacagctgaataaatactgccacaagcaaaggcagatgccagcaaagatcttgatgtgttttagttttcataataaacttttttctccagatatttatttttcagatacaggaacgccatataacagaacatggtgataatagcgaaagccgctgatttaccggtttggaagaaaataaaaccatactgatagacgatatataccaaattggaactgccctgatccggtcctccctgcgtcagcatattgacaggtaccagtacatactgcagaccgaaaactacagtgatcgtgaaaacataaattgcagtagaagaagtcatcggtatgataatacgtctaaagatcgtccagttcgaagcgttctccagcttggctgcttcgatcatttcccttggtacggcaaccatcgctgccagcatcacgatcaggttatagccaaacaccttccagccaatgatagtacagatagaaaagatcacgagcagattttccttaaaccagcgcggcgattctatatcaaaccacgcaagcactatactgagcggtccggctaaaggattatagatccacaggaacagaatgcttgccaccgccagggataaagttgccggcagaaataaaacagagcgataaaacattttcccccgctgaagcaggtgcccgaggataaacgaataaagatagggcaagacaaagttgaacagcagcataataagtacaaaaactatcgtattcccaatgattttgtacagctctctgctgcctaaaatatcactgtaattgctcagtcccacatatttcatcgtcgggctgatcatattccagctgaaaaagctaagatacagattctgcagcagcggccagtaaaagaaaacaataaacagcagcgccgccggcagtaagaaccaaaaagcaggccatttggctttattcatgacaactctcctttggtaaaaatcaggatgctgcggcaagcagcatcctgattggttcaagcgtttgtattacagtaagttattgatcttttctgcagtttcgtgcagcgcctgagcagcagtttctttgccgctcagtataatatcgcgggcgtcaatcaggagctgttcagcctgtaagccgttagcgcctgggaagctggcccattttaccagattaggcatcgtggacaaggctacctggatatttttgttttcttcgatcatttttttgaaaccgttggggtcttctgctacgcctttacgaggtggcagataacctgtaccggtgctccatttagccagcgcttcaggtgattcgatatatttgatgaattcccaggctgctttttgtttatcggtatcttttgagaacagcatcagaaagttaccacctgccggcactttcaactctttgccttcaaactgcgggaaaggagctgccataactttgaacttggcgcttttttcaaaattggcacgtttgccgatagtagtgcagaccatcccaagcttaccggacagataagcctggaacccttcttcattagtagcatgcaggccattgccgtctttgaccatatcagccagcagctgatacgcttctgccgcttcgggagtatcgaaaccggctttgactttgccgccttcatttttcagcattgaaccgccgttagattcaataatggcctgctgagtccagttatcagcatattcctgcataaaaaaacccatattaccggtcttttctttgatctgttttgccgcgctcactacctctttccaggttttaggcggattattgggatcaagtcctgctgcagtaaagatttcaggattatagaacaggaccggcacactgatagaataaggaataccgatctgtttgccgtcatcagtctgagctaatgccaaaacattgggcagataattctctttcaagaaatttttgtcttcaggagcctgcttttcgatcatcggctgcaggtcagtgtacttaagattttcagcggcatagttcaaataagaccagcccatctgtacaacgtcaggatttttaccggaagcgatagcagcctgcagattttgtgtcaggcctttatacatatcggggttatatttttcgacaacctggatattgggatgcttggcattaaaatctgcgaccagttctttaacagttgcaccgccgaagctttcggaggctacatgccaatattcgatctgcacctttttgtcaacgctgcctttagactgattatcactgctgccgcagccggtaaagaccatcgcgctggcagctgctaaaagcagtgccgcaagtttctttttcatcatcatttttaccctccacttttttagttccgagctctgttatgtatgataacgaattttgattaaatctaaacgttgtttttgttaaagatttgtaaagtttattgcaaaaatatgttcagaataaataaaaaagacagtaaaactttatccaagttttactgtcctttagttctttaaaacttcaatatattaaacccccgactgtataacagccggggaaattatatcttaactaaagcatttccatgtcaatcagccaaatcatcaatctaaatattacttagctcccggtctgttcttaaagcaggagtacctgcagtaatagtagcgttttctttttatcaaagccgtgtaaacatgatgggctttattacagacgaattctttgccgcaaaccgggcagatcatcaccagagaaccgacgatgcttttagcttttgtttcaattgtgttcattgtttctttttctttcatagcagatcaccccaaactcagaatattttttggtctgagtttatttcaatggaattttcactgtatcactcccttacaggcttttgtgctttatattcatcggggtaccaattattgagcgccattttacggcgttgtttttacttactgtaaaggacacccgtcagttaaacttttttaaagtaaactatctttgtcagatattttttaacatcctcttattgcaaaattttataatttgtaaattttaattcacattattaaaaaaagtttgtctttttaaatttttatttttctttatagatatttttatgtataataacatatttgttttgagtatgcaagatatctttatttacataattaatttcagatttaacttattgttatattttgctattcttgttaactataaggaatgtttgtgatttatagatacaagtgaatggaattataaaaaacactgtatgtatcgtcattgttgcgcttctttaacctgcgaaaatattaaatttgaacaactgcagataaataaaaaacacctgtattcacaggtgtttttatttattaatttttagttgtttattctttgcctgcacaaaaataggcaaacgggcagtttttacaatattcagttttcacagtaaattcactttctctgcgtttcgaaaaaatatctctgcataattcggcaacctcctgcagcctatcactgcaatcctgcagctgccagcaggaattattttgtaaaaaatgcagttcggccagtgctgccgggcgctgccataattctgacgctgccttttgatacagtgccagctgataaatataacccggcgcaggttcgcctgctgccggcggcacgcctgttttatagtcgacgatcgtcagagtcccgtcactgttaaaaacagtacagtcaatataaccgctgaacacagcagtaatcccatattcctgcagcagcggcaactcaaagctgatctcagccttacgttcagcttcctgcagcctttgataaagcggtccattaatatactgcatatacatatcgtatgtccttgcagcacttccctgtaccttatatgcctgcagcgctgacctgaaagccggttcctgttcgtaaccgttcgtcagtaattccaaagccttatggataacggtaccctgcaatgccgccggcagataaccgcttgcatcagctgcatttacagcttcataccccggcatctgcaaaatatactggtaataataacagcgggggcaatcaagatacgtctgcagcgctgttgctgacaagctgcgctgccactccaacccatattccggcagcggtttgatccgctgcagcagctcatctgttacaagtacctgttccaaatctgctgctgatttaacggcagttccttttttaccagcttcatattcctttaacaggaactggtcatagtcctgtaaaatattacgcaggctgctgaaccagttctcacttctgcttttgctgctgctgtcataagtacctgacaggatcagcctgtcctgcgcccttgtcattgcaacatataactgcctctgtttttcagcgctatccaactgcttttctatgtctttgattgccagcattacgcttgtatcctgcaattcgccgcccatatccactttaattcctaaacctgcatctgcattaaatcgcagcatatccgtatcacctttgctcctagcatcaagcgcgggtacaaaaactacagggaattccaggcctttggatttatggatcgtcataatcgtcacagaagcgcagcccgtcatatctgcagcagctgcttctcttgctccagcctggcgcagctgctgcagccgcagcagatattctgccagcgtcccatgtttttctatggtataggcctcagccaaagcaatcattttttttatattagcaagcttttccagaccaaattcctgcgctgtcagaagcggttccagttgcaagacgtcaacaatagtatgcagcaattccggcaatggcatcgtctccgcatattgccgcagctgccgaagtttctccgcagcagtcaatagatggcaacgcttctgataatcgatcaacagccatgcatccttctgcagcagctgccataaggtaactgtctgctccttctgcttgttcagctccagaaaaagtgctgtcaagctttcatcatcaacagcaaaatatggcgacctcagcacaccagcaagctccagactgcggctactgtcttccaaaaataccagtaaattgatcaaatcaatgatttcccgtcgttcataaaaacctttaccatcaacgatagtataaggtatacccgcctgctgcagagcagaggcaaaacttttagccgatgttaatgcaccgagtagtattaccatatctttgtaggatatttgtttttcggtatgcagctgcagtatccgttctgctataacggcagcctccgcttccctgcggcaggctttgctttctttatcgtatgcgattaccagcatttccggcaaaatatcagtcgcacgattagcattcagagcttcaaaataaacgtcctgctgtctgtcttcacctaataatgccgcaaaggccaaattgcataaatcaagcactttatcaactgtacggaagttatcatctaaaacgatattactgccgccagcagcttctatatcgcgcctgacacgagcaaatacacttacgtcagcgccgcgaaaacgataaattgattgcttggcatcacctactacgaacagcttatgtcccagcagcctgtctttatcaccgccgcacagcaaataaacaagttctctttggcgttcgttagtatcctgaaattcgtcgaccataatatactgatagcggctgctgtttttactgcaaacctggcggttattttttaaaagctccaaggccctgctttccaagtcgtcgaagcccagcatattattaagctcctgctgttcacgcagataagcactgcaattcaccagagcctgctgccagcagggtatcaatttcagtgcagctgcgtctgccgccagcaaatgcagctgctgcagaatttctttagccgctttgaccactgctttatcactgcttgttgcagctagagtacccacatagctgtctaaaagcgtcatattttcaggcttgctgctgtctgctgccgcctttaaaagttccggaaggtgttcgcgcagcaattccagcttttgcctatgagctgaggctttcaccttcattttgtcttctgccagttccaatagcagctcctgcagttgtacctgtaatacgtttttctcgttcatctttgcctgatacggctgtaacaaatcaccaaagttcaaaatcgcatccattttaggtatggcaagcaatagctgttttacaacatcagctgcggtatattcatcagccagacgtaaaatatcactgtcaccgcggcgcagtccctgttttacaaactgctgcacagtgcgcagtaaaaattcatccatttctacttcttcagctacctgaaaagcaggatcaagacctgcttccacgggattttctttcaacagactgttacaaaaaccatgtatagtattgatacgcgcctgttccagcagttccagctgctgctgccagaaagatgcatgcaaagcatcctcctgctccaattccgccaaacgtctgcgaaccctttctttcatttcacccgcggctttgcgcgtaaaggtaatagccagaatatcggcagcacttacctgtttgccgccctgcctgaggctctgtcgaagaatgttgacaaaacgttctacgagaacacgtgttttaccactgccggcgccggcagacacagatacatttctatccagcgtctctatcgcttcctgctgggctttagtaaaatcaaacattttcttcaccgccttctgctgccagttcgccgtaggcccggcaaatatccttcccaggacaatactcagggcagtttttacgcggcgccggcgggaaattcccctgccgcaaggtattgatatatcctctgacagtcgtacggcaaaaatctgcaaaagccagccattgatcttctgcatcactgaacggtttattatttgttgtaaaaggcgtttttcctaaagtctgcatggcaaaaccgcctttgcgtttcgcttcctttagtgaatagtaaccgccgccaagcactttactctgaggctctaaggctgcaagcgccataagatataccggaatctgcaaatccagtccttctgtcagctcactgcccgacggagtttggctgcgtttataatccgtaacaaaaataccattaccgtcactgtcgatacggtcgatacgtccgttcaaataaatttttccgccgttgacctccagcaccaacggagcactgccgttacgcccaaaatcccattctatttttaccggtacaaaaggttcccattttttctggtatacaagctcccgctgcagccagcggcgcagcagcaaattcagcttccgacgctgcgaaggccagaaatctgtaacggcaatctttttcccagtaatatattcatcacaaactgacgtcataatgtcatcaagctgacttataagctcagtcggcggatatttggtaagcttttcgtgcaaatgtcccgccataaatcgtgctaaaacatcatgcagcaggctgccttcaacagcaggctccaccgtttctgtaagttcttcatattgctgctgtttccagacatagcttagtaaaaacctgtatgggcattgagcataggtttctaaatgcgacgcactgaataaaccgccaacagcttcattaatagcccgctgcagctgtacgtcttcaaaaactcccttataaacactatcgccttgctcacgaattctttcgatactgctgcgcagtgtccaatctgctcccaaccgctccaacaaccaattatggcaggtatctttttgggtaatccccagcagcagctcctgctcagacaaagcctcctgccagcctatacgtccagctctgcttctggttatacacccggctgcatataatcgttccacatcttcaatatatgcggaagcgccagctgtatcgtcgctgtaccagctcaaagtcagagtttctgttgccattgctgccactgcggcaaaaaagaatttatcctcagcataagcacacgcagtattatctaattccacaccaacaccgctcaattcggcccgttctctgtcattgtagatccagttttcatttttactgcgcggaaactcaccttcgcgcagtcccataatgtaaacatgcttgaacagcagcccctgcagattagcagcttctccgaataaaataccttcactgtcggccgctgttaaaatgatttgccgttcggaacaggcagaaatcagcagctggctgtattcctccgcttttaaaggcacactttccaaaccgccattctgataatcttcactcagtgtatccaaaacttcggataattgccgtactgtctctactatatttttaacctcaagcagatctgccatgccatttttataattttcgccagccttaacaggcagcgccaaagcttctaatattgttttaaatgtttctccataagcagccgccgtatctcgccgctgcaccttgtccagcagcaactcaagttcgcctaaatcagctgaccactgcttattttcattggcatcagccttatcacgaactgccttacgcagttgccgcagatcattatataaatattcctgtttcaatctgttgagctgctctccgtcaaagctatagaccagctttacaacgccgcattttaacagacgccagtaagcagcgatagcttcactgccgccggcagctacgttcaaaagtaaacgtaaaaattcacagacaggctgagcactcagagaagcgatcttaggtaaagtaacaggtataccatattcatcacaaacagctctgataccgctgtaagtcttaaaatcacgtacagcaaccaaaaaatcattataagcggcgccatgctgcagcttagcttttatagaacgcagcactgcccgcagttcaccttcactatctcctgattcaataaaatttatactgtcagcaagagccagcgtctggtagcttccagcacctaacttagccgttaagtgctgcagatcaggctttcgtactgaaccttccatatgcagatcatgcagctgagcaaaaccgcttaaataaccgaaactccgctctacagcagcaaatatttccggtcgtttgggctcgtacatcaaaccgatactgatctgacaatgccgtgacaaagattttataagcaaacgctgcaaagcatcaaaatgataaaattcgctgaaatataactgctgccaaggcagcttggcctgcggtctttctaaaaccgctattgctaaccggtataaaccctctacatcataccagtttttttgttttagcttattgcgataaaggttataaagtgccgctacttcacgatccttcatcacataggcaggattgcgctgttcccattccagcagcgccgtagtaatttcttcctgtgtcgacccactgcgtgaaagctgacccaaaagcccggtaacagctttaacgaaaccttctttatctgccagtttactaaaatagtccaggccctgcaatttagccagctggtgcagcaaatcacccacaagcagttcctgtgtcctccgggaaatcatttctaatttcacttccggaggcaaatccagcagctgcctgtttaatgctacgatacggttgggcagatattcaaaattaactgcctgcgccctgcctgaccggcgggcatgattcacaagcaatctgcttggaagcaccagcaacgcttcatcatagctatatttgttttctgcctctgccgaaaaaaaatccctggccgtagcacctaacggtactgtatataaatcgatcatttttcttctccgctcaataaaattatatatttattgtaccacaaaacagcagtttccagtattaagcacagacaaaaagcaacagctgccagagccgttgcttttaaacacctaacttattttcatttactgtttttccagacagagggagcgtaaatttatagtgaaatttatgcatgccttgccgttcatagaaacaatgcgccttttcccgcagcatattactgcttagttcaaactgaatacaaccattgtcccgggccagcttctccgcataagcaaaaaactgctgccctaagttcctgccgcgatgggatcgctccacatcaaattctaaaatctctgctattttagcggcatgatgcagctgtccttctacgcgcaaatgtaaaaatgcaacggttctgccctcaatttcaccaatcatgagaaaatgttccggcagcttcaataaactgccgaagatattttcaaattccagcagcggcaaatcctgctcctctaattcacaaatcagagcgtacacagctcttacatcctgtaattcagcctttcttatcagcacccgcatcacttccatcataaaattctttttgcagcaacgccgcaaaatcttcagccggctgcggtttaccaaaataatacccctgaatataatcacagccaacacttttcaaaaattcaaactgcgctgcagtctctactccttcggcagtcacttctatttgcagagaatgagccagataaatgatatttgaaatgattttttcactgcggtcatccccaatatcgtcgacaaagcttttgtccagcttcaaaacgtcgatagctacatttttaagcatcatcatcgaagaataaccggttccaaaatcatccatcaagactttgatgccaactttatgcaatgcttcgataacattattcataatactgatattttcaaaaaaggcactttccgtcagctccagctttatataagcagcagacaaaccgcttccattcaaaacaccgatatattcgtcaacaatatgcggatcatacaggcacatccgcgacatattgactgatattggcacaggtataagcccctgtttaagccaacgcatctgctggcgacagacgagttcgaacatataacggtcaaccttattgataaatccattacgttcaaaaagcggcacaaattgatagggcggaacaataataccgtcacttctgcgccagcgtactaaagcttctgcaccgataagtttctgctctttggtactgtacttgggctgatagtaagcaataaattcgccttcagccaaagctttttccatctgactttcaatttctttttcgtgcaacagcttatcacgtacggctccgtcataaaaagcccaggctgtgtcacctttattttttattgtctgccgggcaatataagctctgtctgccatactgacgatatcatcagtttcaccgtcaacctcgtatatacccatagaaagggatagtttatagacctgtccgctttttgtaatatagttattcaaatgcagacataaatcattgatacgccaaagcagttcttctctcgtatcaaatcgcagcaaaaaaataaatgtatcggcaacaccatgcgctaatatttcgccttcattcaggcttgcttttacttcctgccaaatataacgcaaaaggtcattgccttctccatagccaaacatatcgttgaaatatttaaaaccgtcgatatccatacttacgattgctgtctttttatctgtttcaggtaacaacagttctgcttctttaaaaaacttggcaaaagaataaccaccagtaacttcatcaacataagcaatatccatcagttccttttgattgcgggtatggatacgcataatgtgccagataaacaataaaaaaatcgcaatcaacaaaatacccagtaaataagttttattcagcaccatattgattttatcttcgataacactggctggagttaccgtcagcagcatccagttattaacacctatcggtgaacagtacatatatttctgactgccgttataaaattcaatataaccgccttttttactgttgatcatctgccagagtttttcagcactgtctttattatttaccggatctgccgtcagcagggccgcataaacatttttaaagtttttaaagctttctgaatgctgcgaatctactacaacatcaccattttcctgtaccacataagaatatccagcaccgccaaaaaacgatacttcaatagtttttctaaatgtatccaggctgtaagtagcgaacaaaactccaatcctcttatcgcttccatcttcaaaaatcggtaccgcataaactgcgatcctgccgccatccgtataatcatccagattacgtgaaacagccgtgtgcccgagaatcgccttactaaaatactctcgctctgagatattcaattcaacaccatctgttgtataagcacgtccatccgtcaatgctacgccaattcgtttaaaactgttgcgctccgcggcttcctccaaataagcggcggccgcctgcggatcatttacaaaaatccgactgacatcgtgcgaaagttcagctaaaagattttgtttatttttgatttcattatgcagcatcaaagctccctgattagaaagttctttcagtgagttgatattttcttctttgtaactctcttcgatacttctgctataggaaaaaacagccgtcagcaaaattataatggcaataagacccagcaaaagcgtgccataaagttttctatatttgcccatcgctgccttcctccgatttctgaatcattttttgtcagattattttaatagtttgtccgttttccggctcttccaaatatatctcgccaatatgcagcttgccgttcactatatcaaaagcatctgttttgattgtccccatcttggtttcaatgacaacatttttaaattccagatgtttattttgattggaaaactcgccgctgatactgtcaaaaggaataatatagtacgatccttttcctgatttaaagctgccataggtcaacgcagttttaggatctcccttggatcgaatcttaaaatccagttcgaccttgcattttattttaccgttacgtgcggcaatgcttcccaacaattcgtgtcccagcgcgtcaatattgtaatattttgtatccagatgataatctccgaaagcttcaactgtgcctccaaaaacatttccttttacattagtaaatttcagcagagcatcttcgtaatgcaaatcgcctctgaccttagaaaaatgcagtccgggaatattcagttctttaaaatccaaatgaccatctataacaggattcggaagttctccagtaactgaagcggtaatagaaaccgtatctttgatatccgctattcccaacgaagcaggcagaatattataaagctccaaatgcaggtcgtaatgaggaatctgctgcgctaaattgatgtttccttttatttccaccccatcgccaaccatagtgccgccaaattttccagtcacaaaatcaatcgtaagctttttctgcgtatcaatatcaattattgcattaacttcattcagtacaaaataacggttacgataaccggcagttaaggtacagttattaaaagcaacacgcattttcagccgcttattttctaaatccagattcaattcatgcctgtctccaggatgtctttcctgtactatgatcttttcctgcgctatatgttcaagttcagttgctgtttcgtttcctgacaaaacagcttccttttgttcagcccgatcaataactcttttggcctgtgcctgctcaaaaatatccaactgcatctttctgttgaatcttacggcaaacaaagcgttgtccaattccagttccttaatagtagatgtactgatacttctggtaataatatcccatggccgcaccttgaaacgtccctgcggcacatgtacgataggctgaccgtcaatatcaagccagacaagattctgaaactctacccgcccccaaatgtcggcatcaatactgccaagcgtcaccgagcctttgagcactttttgagcagacatagttttattaaaaataagcatagcctgatcactggctattttacacaaagtaaaataagtaactgtcacaagcgcccacagtcccaaagcgatataaatatatttcttttttatctgcatattatcactatcctttgagcggactgtttcagctacgcttaaatactctgtgttttcgtcataatcttcaaaatttcctgatcagtagtagccattccctctttagccagctgccccacattttttatagtgttctcaacacctttgctgacgataccatcgcctccgtaaaattgctgcccttctttatacatatgataacctaatatacctgcatcgatagccgtagctattttagcagcgcacgaagctttagcgccgtcgcagataataccggaagttattgccagagaattgacgatcgtgtgagaaacttcatcaacaccgcctccatacagatacgcaataccggcaccactggcacagccggcactgactgcaccgcagtaagccgacagcctgccgatacctgacttcaaatggatcgtgatcagattagataccagcaaggccctataacgtttctcgtcagaaacacccaactccttagcatactctataactggtatggaggcagtaatcccctgattaccgctgccggaattgatcacgactggcatctcgcagccgttcattctggcgtcagaaccggcagctgctttggctttagctcttatttttacgtcatccgttccataagtctttaaaaggaccttaccgatattagctccataatcgccagccaagccttcctctgaaatattaacattacattcgatctgaagatcaagaatatccttaacatcttctattcttgcagtatcagcaaattcaataatctcctgtacattcataaatccacgatctgtaaagcccaaactgtcttcgactgcaacatctttctgcagtacatacttagcatcttctcttatttccactacatttgtatgaaactcacagatgcgtacataggcagaatgaccattaccgtaaacagtgatcattatatcaaagatttttttactatcagagaagttaactgttatcggcgtagtttctaaaaatttatgaattgcagaaactgcttccgtactcacttccgaaataactttcaattccttcgcagcatcgccggcgacaatacctgctgccgctgccacttcaatgccgcgcagacctcctgtattcggtacaataacactttttacattcttgatgatattgccgctgacctcgatctctacccgttctggcaaacatcctaaatgctctctggcaatagctccggcataagcaatagcaatcggctcagtgcaccccatcgccggaatcaattcctctttcagcacattgatataatcctggtatttttgccttgttatcatctgcctacccctctgtatttatgattttttcttaattattctatacatctgccctgtaactctttataaaatcataacaaaagttcccaaagtaataaggacagagccgataattgtttttacagtaaattgttcatgtaaaaataccgctgccattaccaaagtgatgactatactgaatttatccaccgaaactactttcgaagcatcgccaagctgcagcgctttaaaataacatagccacgatgctcccgttgctaatccagaaagagtcaaaaaaatccagctgcgtttacttatttcggctatcccgctttgggcattagttaacgcaactataccccaggccataagtactacaacaacagtcctgattgccgtagccagattagaattaacaccttcgatgccgatttttgccaaaatggaagtaattgcggcaaaaatcgccgaaagtactgcaaaaaccaaccacatactaacgcctcttttcctgctttacaaataaaccttatattatcagagcacttgtatcaagtctctgcattttaagtaaactaaaattttctgaaagcagcgtgaaacaatggttttaatccagcagtttagttttcgactaatctttcaatttctttctcaagcaataaaaatgctttagaaactacataaccatcagcgaccgcatgattcattctcactgttaaaggcatcatcaatctttcattttcactgcgatattttccccagtttataatcggcggaaaatgcagatgcccgtcaggcagttctacatgcagtgcttcatacgacaaccagggaatataggaagcatcgaaatagtttaatttactgccatccaaaccatagctgcgggtctgtttagccttttctatatcagcgcagcatctgtcataaaaagccagataatcttcgctgaactctgtataaactactgtaaaagtctccgtatcctcgtggaaaacataatgcgcagtgttgattttatcaaacacgactaacttatcctcctgatacaaataccgcattttgtaatcatctctggtattcagcgccttggtcaggacatacagaaaattgatataaaatttagttccagtttgttttgaatatgcaacaaggtcactaacatcaattttggatgtaatcataatcgaacatttacattccattgtaaaatgcctgtaaatatccttacgataacacttttccatatctaaaactttataatccataattactacctttcacacaacacaaatccactttggcaattttatagtttgcattaattaagtattcaaataattgcaaagaatcttttgatcaatttattgttgacatcgcaattgccaaaacgccacagcgcttgcagcagctacattaagcgagtccacattgtgcgccataggtatcttcacaacataatcacacgcatcaatcacagcctgagataagccgtagccctctgtaccaaaaaccaaagccagcctgccctctgccatcagctcctgatcatctatactgacagcatgctcacacaaagccattgcagctgttttaaagccccattctcccagctctttgacattgttttctatataagtccaaggtatctgaaataccgttcccatactgacacgtactgcttttctgcataaaggatcacagcaggagtgcatcacaagtaccgcatcaacacctaacgctgctgccgatcggaatattcctcctacattggccgcatccgtgatattatccaataccgccacccgcctggcctgaaaacatatctgctgtactgaaggcagcctgggcctacgcatagcacacaggataccgcgggtcagcttatatcctgtcagtccagccagcacatccctgtccccggtatagactgtaacatcctcataccgagcaagaatattttgggcctgtcccgtgatatgtctgcgctccatcaacaaggaaatcggctcacagccagcagcaagcgccaactctatgactttgccgctttcagcgataaagatgcccttttccggttccagcttatggcgcagctgcttttcagtcaattttgtgaatacttccagttcaggagcagaaatgtcatttatttctataatatttgccattatgccactctttcttagaaaagcatctctcccgggttatagccgcttggcagctcttcttcaactaaaaaattaaattcttcatcacgcaggaccggcaaaaatacggcataggggatctctaaaaattcagacgtataactgctggccccgaaccatttaccctctttggcacctaaattcaaatctctggcaaacttggtatcattagagcaatcatgtacaaccaaattccatttctcttttgctgcggctgccataaatctgagtgtcagttcgcgactccagattggtgatatatatccatggcgggcaatatacattttttcaccccaataattctcaatattattgggattcaaatgcagctccgcacaattaataaaatctaatcccgtgtccaaaacagcctgttttttcaaaaagaatttttcaaaaaactcattggtcataggcgtttcaatgccgacttttttgatatacttttttgctatgccaatattttcaatgaccttatcagcacaaccggaagctcctaaattaaatctaagctcattcaggccagcctcccccaatgctttaagcgttgtttccgtagccagagtgccgttagtatatagatgctgataaataccagccttgttaaatttttgaataatattataatatttctcgatttccataaaaggttctaaatatacataggcaacccctgtaggttttttatggatttccaacaacagatcaatgtcattttcataaaacttggtcccgccaatgacccaaatcccctctcctaccggttcaatagcatccagctcgccataattatagcaaaacctgcactgcagattgcatttattggtttttctgatagctgtcagcccgctgcccaacagacatgaacggcacccatcaggaaatttttcatctggtcccacaaaaagtgttctgtcctttaatgttttcaaaccgggaatttgttccataagctcttcttttctttttataacaactgcctcaatctgtgcgaatgtggcataaacaatttcctgctgtttaaccagaagctgttcccctgcaggcaattgtgcaaaaaattcaaaccatgacaaagcatccttcttagaaatcttcatatctgttactgctccttgtctacaatacaatctacttaatcaatccattgctctccgctctgcataaattgcagtgcctggcaaccgggctccataattttattttttattcttgtcatcaatacaacagtctctacatgatgcgtcatcgggaacatatctaccggctgggcaacttcagcctgataaccgttctgttccagataagccaaatcgcgggcaagcgaagccggattacaggaaacataaactatacgctgtggcatgacctgcgcaatagcagccagcactttttcttcgcagccagcacgaggcggatcaagcagcacaacttcgggacgcacaccctgttctaccagttcctgcattttaacagcagcatcccctaaaataaattcagcattatcacagcgattatcttcagcattacgttttgcatcttcaatagcagaagctataatctcaattccataaactttttgggcatgttttgccaaatacagagaaattgtaccggttccgcagtaacagtcaacaacgatttcaccaccgctcaaagccgcaaattcaatcgctttgttataaagcttttcagcctgggcactgtttacctgaaaaaacgactgcgcagaaatattgaattttaaagttcccaaacggtctttgatcgtcgttttaccatataataagcgtgttttattacccatcacgatattggtctgttttttgttgatattctgcactacacttttcaagcccggaacagcatcacgcagcattttgaccagctctttgccatgtggaatatcgtaaccggcagtaatgataactgccataacctcaccagtgttaacaccaaccctgcccataacatggcggactacgcccttacctgttttttcatcataagcagagatttcatactgccgcatccattgacggacaacagcaataatgtcattgttacgctgcttctggatcagacagttttcaacgccgactactttatgtgtagccgcagcataacatccgatttccaaaattccattttcaaatgcaaccgggaactgcattttgttacgataatgccatggatcttcttcaccgatgatcggcagaactttgacttcctgtaaatgcccgatccgaaaaagcgcatcgcgaacctgctgttctttagcctttaattgccccgtatagtttaaatgctgcagctgacaaccgccgcaggcttcataaacaggacataatggttctacccgctcaggtgatgcttccagaatggccgttactttccctgacgcataatttttcttcacctgttccagctctacttctactgtctcatctgctaaggcgccatgtgcaaagaccgtaaatccatcagtcttgcccacaccttcaccgctgcttcctaatcctgttacttttaaagttattttatcacgcactaaaaatttattatcaacgctcataaaattctcctaaattaaattttcaacaactaaattataccacaaatctatacagtttcttcattttacagtttaaataaaatggcagaaaagcgaactttttcaccttctgccaaaataatcagctattatttagttgcatctacccaactacctacagttaccttttccagcatttcagcactgatcggcaaagctgaatgaggtgtccctgcagcaataaaagtaatgtcatactctttcaaactattatccagataaactgaaacctgctgacgcaaggcaaacggacatactcctccgggcgcaaaacctgtgatttgcattacagtttccgcatctgccattttgatttttttcgcttcgatggcacggccccatttttttgtgtctattttcttatcgccgcaggcaacaatcaaaatcggcttgccatcagctaaaaaacacaaggttttggctatctgtcccggcgttgtgcccaaagcctgagccgccaattccgcagtatgtgttgatcccggcaatatttttatttccagttccggataagcctgcaggctttcctgtactcttttcaaacttgtttcatattcttctgcatgctcttccatttccatcatccatccctcacatttcttttgcaattctgccacaactaacagctttatttttatactttctgtgctataatatatccatacatgaagtcatacaggcatctgttgtaattttaacacagacaagtctctctgacaaatcaaagtacctgttaaaggaggtttatccatggatatcattactaaagataccggcatcatcgatgctgttcaacaacatcctgaaattttggaagtgtttgctaaatatggtctgggctgtgttggctgcatggcagctcattacgaaaccatcggccagggagcaggcgctcacggcattgatgttgaagcgcttattgccgacatcaacaaggctgttgctgctgcaaaatgatcttcttaataaaaaacagtctgacgttgaagcgtcagactgttttttattaccacttgtacaatgatctcaataaagctatctcaactttatatccaggcaattcattcggtgtttctaaataaaagggcaagtctttcagctgaggatgattagtgacagcgctgagcgcttccaatccaatgttcccctgacctatttttgcatgccggtccttatggctgcccaaaatattcaggctgtcattgatatgaacagctaaaagacgtttcaaaccaataattttatcaaattcctccaaaacactttccaaatcattaactatatcatagccgccgtcaaaaacatgacaggtatccagacatacccccagttttccctgcagctccactctgtcgataatcgaacgcagttccgtaaagtttcgcccaacttcactgcctttaccagccatagtctccagcagcaccattgtctgctgctgaggacgcaggatttcattcagcaattctgctatcatgattattccctgctctgctccctgttttacatgactgccaggatggaaattatatcttgtaccaggcagcagctccagcaactgcaaatcctcagtcattaccatacgtgcaaaatcccttattttagaatctgccgaacaggcattgagtgtataaggcgcatgtgccaggagcggcgcaaaagaattctcccgcatcagcgccagtaaagccctgatatcctctgtatcgatcgctttggctctgcctccgcgtggattacgtgtaaaaaactgaaaggtgttggcaccaagagccagtgcctcctctcccatatgcaaatagccttttgccgacgataaatgacaaccaatattgagcatagaccctcctagatttacaaagcttttaaaaatacgttataattataacatatcaagcctgttgaaaggaaaagtttgaccatgcaagcattacgagaacacctgctgagcctgcaggacaccaaatatcagaaatttcacagtgccctttgtcccggtatcgataacatcatcggcatccgtatccctgtattgagaaaactggcaaatgaaatcctccgggatggagattaccctacttatctgcagaaagccttatacgaaccttttgtctacagtgaagaagcaaccttatgcggtatgattttaggtttactgaaaattgattttactgaactgctggaaaatctcaatatttttgttccccgcatcgacaattgggctgtttgtgatgttacctgcggcggtttgaaagttttcaaaaaaaatcaggctcagggacgcgaatttctgcagcaatatcttgcttctcccagagaatatgaactgcggtttgctgttgtaatgctgatgaattattacaatgatgacacatatatcgacaatacactgaaagaactgaacaatgtacgacacgaaggttattacgtaaaaatggccgtagcttgggctttatcgctgtgctttgtcaagcagcgagctaaaacaatggaactttttcaaaataatgaacttgatgactttacttacaacaaagcccttcagaaatgtcgtgaatccttccgtgtcagcgatgcagataaagccctgctgcaaaatatgaagcgtaaataaataataaaactcccgtctttattcaagacgggagttttattattttgccatgctcagcagcatcgctactgctaaaatactcatgggtatcaaaatcgccaactgaccgatttcattggaatagttgaagaaaaagaatacagaaagccgaggcaacagctcctaattgccaaacaacagaccaaaaatcaaaggaaatgcattaacaggccttaattccgttattgatggtataggtataataacaaaacatttaaagagcagcgccgtaacggcaaatactgccgtcagcaaagctgcaaatgtcagtttttctgttttatttctctgcgcccatcattccgcctacttttgcaccagtttaaccagcacttccacacattttagcagggaaggcaccggcaaatattcaaaacgcccgtggaaattatgcccgccggtaaagatattgggacatggcaaccccatttctgaaagccttgcaccgtcagtaccacctcgtaccggtactagatgcggctcgattccagctgcacgcattgcattttcagcccgttcaattatttcataaacaggcataatatattccttcatattacaatagacatcttccattttacaaacaacgctgcccgcgccgtattcagcattcagacaatccaccatatgcagcagcagttttttacgatcttccagcttcttcctgtcatgatcgcgcaaaatcatttccagctcaactttatccgtaccgccattgatacgcagactgtgataaaacccttcatacagctcagtatattcaggacgctcgccggcaggcagcagcatctgccacttggctgccatcgtcacagcgttgcgcatcttatttttagcagaaccaggatgtaccgaaactccataaaatgtcaccgtggcattgcaggcattaaaggtttcataattcaattcaccaacagcgccgccgtcaactgtgtaggcaaaatcagcactaaaatctgtcagaggaaaatgctccgttccccgtcctatttcttcgtcaggggtaaacgccaaaagtatcttgccatgcttgatttccggatgtgcaagtaaatactcacaggctgaaacaatagcgcatactccagccttgtcgtcggctcccagcaaagtcgtaccgtccgaggttataatttcctgtcccagataattttttaattctggaaactccttcgggctcaatttaacccctttgccaaggtccagctcactgccgtcataggcagaatgcacctgcattttgatattcgctcccgatgcttcattactggtatccatatgagcaagcaacccgataacaggcagtttttcattcgtattagccggcaatgcagccagtacgtaaccatattctgtaagtgctacgtcatccaaacccaaacctgaaagttcagacttcagtagttttgccagctttaactgctttgccgtactgggcgaagtttctgatttatcatcagaagccgtatccaaagcgacgtagcttcgaaaacgttcaataatcttatctttactgagttcaatcatttttatatactcctaagatctgccgtgcagatagtctaacaactgtcgcgcaatcctgccgttgcgcccggtgtgactcatttcccactttaccgcagcagcacgcagatcttcttttggaatatccagcccttcggcttcagctttattttccaacaaacggaaatactgctcctgatccatcgaatcaaaaaataattttataccgaaacggtcagccagagaaattttttcgttaatactgtcgcggctatgcagctcgttcatattctgatcctgccacacttccttgataatattacggcgattggaagtagcatagaacaacacattatcaggttttacttcaagcccaccatctaaaatggattttaacgctttgtattccacttcaaattcttcaaaagacaaatcatctaaaacaacgataaattttttgccccaacggctcaattcctgcatcacctttggcaatccggcaaagtcatggcgttttacttcaaccatccgcagacctttttcaaaaaatgcattgccgagagctttgatagatgatgatttgccagtaccacgatcgccaaaaagcaatacattattagcaggctttccttctaaaaaagcttccgtattgcgtatcaattcttctttctgataatcataaccatacagcttatcaaaagtcatatcagaatagtttttagtaccagacaggcattccagttcgccattccaggcaaaggcaccgttgtccagcattgcgccataaccatagtcattataataactgcataaaatttctacagcttgccgcccgtttgcatcaccttcagcatgcagtaaaattttttccagcttactgcgtcccggcaaaggcctgaacactgtcggcgtatagtttcccagcagtggatggtttttataacgattaaaaacgtcatcgacgaactcgcgcataattacaatatcatgcgctgcagctcttgccagtccttcaccaattttaccgtcatttttttcggcaacagcagaaaacacattctgctcatgcacgattgccgacagcaaatactccaaaggaataatccctgtcaggcctttttcttcagcagcaaccagcagcaaaccttccagttccggcgcaaaaaattctttaggcctgcgcagagcatttacgatcgggtcggataacagagctcggtagatcaccaggttacttaaattagcgcagcaattcatctcattcatctccgtctgtcaaagattttagaaggttctgaatactttttttataaacagggtgtattttatctgcagcaatttctgacagcggctgcagtacaaaaagtctgttttgcatatcaggatgcggcagtaccagtttttcactataatagatcagatcatcatacaaaagtaaatctaaatctatatttctttcaccccaatgccgtaatcgcacccgacccatttccagttcagtatccaaaagcagcttcagcaacttttctggtgctaaatcagttttcacacaagcaacagcgttaataaattcaggttgatctgtcacaccataaggttcagttttaaaaaagcttgatgcagaccttatttgcagtcctttgaccaacaacatttttaaagcctgtctgagattagcttccttatcacctaaattactgcctaaagctatatatgcgatggacataaaattgcctccagcatccttatagcccgcagattttcctgtacatcatgcactcgtaccatttgagctcctgcatacacagcctgacaactggcagcaatcgtaccttccaggcgttcttctgctggaattccgccgagtacacttccaatagtacttttgcgtgaagcagcaagcaatacaggatagcctaaacctgtcagtgatttcagcccctgcatcaattgcagattttgttcaatatttttagcaaaaccaatgccgggatcaaaaattattttttcttttgccacgccacggttttccaggattttagcccgttgcagcaaataagctgcaacctctgttactacatttttatactcgcagttttgctgcatatttttaggcgtgcctcgcatgtgcattaaaataatcggtactttactgccgacaactaagtcagacatagcagcatcaccttccatcgcagtaacatcgttaatgatatctgcgccagctgctaaagccgcctctgccgtcgaggcacgataagtatcgatagaaataacacaagccggataacgctctttcaatgccttgataacaggaacaatgcgcttttgttcctcgtctgcagttacggcatcactgccagggcgggtagattccccgccaatgtctaaaacagccgccccttgtctaagcatttcgcctgccttttccactacctgttccaactgcggcacacgcgaacctgcgtaaaacgagtctggtgtaatatttaaaatacccatcaccaacattttatcataattcagtgtcctgccgtcagataaaatagtttgaggaatcggcgcatctaatatagccatcaattcactttttattcctgccataccaaaataaggcatctgcgttaatttttccagcagcctagcataatgtttatatgttcccagaagaattacatctacccgttcttcagcacaaactacacacccggctggaattgcacaatctccaccacaagccagcatttcctgtttaataatattggcagcaggagtacggatatccaaaatttttaagggaacaatttcacttttatgcaaaaaaatcgcttcactggcaggatgaatacccaattgactgaattcattggccagtgtttgcggttccagcttcagaatcatatccccacgtccttccaacccttttcgacacaagcaaaagcgttatgattatggatactttcaatgctttccacagttgctttataccatattatgcgtttatcggcttccagacgcaaagcaatttcgcggaccgcgtcttcaacaaaacgcggattatcataggcctgctcagttacaaacttttcatcaggacgtttcaaaagaccgtaaacaggcgcgcttgctcctgcatcagcaatagcagccagttcttcaagccaaaccatttcagcagatctaatttccaatttagccaaagctctttggttatgagcgccataagcgctgatctctttcgagcatgggcacaaggtttgaataggaatctccgcagaaatgcgcaatgaaaactgctcatccttttcagccgtataaacacaatcgatatccagcggtgctctctgcccactgacaggagccgttttataaataaaatatggaaaatttaattgcagaaaagccttttctgcctgcagccggtccttcaaatggtcaagaatattttctaaagaacctaaggtcactggtcctagcgtttgcaggcactctacaaaacgactcatatgcgttccgcgcagatcatgaggaagatcaaccgccaggcttactgtagcgaccgtgttctgcgttcccttttctttatctttcaatgctatcggccagcgcagatttttgatgccaacatgcttcaacggtatattacgacgatctaattcaccctgtacatccttcattatagatcacctcggtaaatacagccgctggttttagtttcccagacttcaacttcataaagcttatagttgggcccctgcagcattttttgtaaacgttgccacacccaaacagaaatattttctgctgaaggctgctttaaaatatcattaagacaggcatgatccaatttacttaaaacctcttccttgacaatattcttaagacggataaagtcgattaccatgccttccttatcaggagttccctctactttcacgactaatttataagtatgcccatgcagtctttcgcatttaccattatattctggtaaataatgagccgcatcaaattcaaactcttttaaaacaaacatagcccacctccaaaataattaaactgtcaagccggcaaaatcatcctgctgccgcaaagcttcataagcaacgatagcaactgaatttgataagttaagcgatcttgcttcagcaatcatcgggatacgcacacagcagtcttcgtattccatacgcagtttctcaggtaatcctgccgtttccttaccaaaaatcaacaggctatccttttcgtagcatacttcagtataccgcttatgtgcttttgttgtcagcaaaaacttagcattatccttatacttttccagcacttcataaacgctgtcatagtagtgcacatctaccaggtcccaataatccaatccagcacgttttaaatatttatcttcgaccgaaaatcctaacggccgcactaaatgcaaatgacaacctgtcgctgcacataaacgtgcaatatttcccgtattacccggaatttctggttctactaaaacgatatgcataaaatgttcacctctccaaattttagaaacgcaaaatgcacagtcacctgactgtgcacttacattatttatttttcttcaacagttcatcaacaagttcacgcattttatgctgatcttctgtcgtatttacttcctctttcaccttgttatcttttttatcatgctcatttttatatttttcagattttgtttctacagcttctattcccagcattctctgccatactcccataattttttcactataattagggctcatggcccaggtaccgttcaacttataccaggtatcacacaatccacgctctaatctgatagcatgagccaaatcataacgcgggtcaacgatcttcgtcgaaggatgcttctgcgtagtataggctaataaatgctgaatatgtgcacgtacaccaatttcaggagtcttaaaatgtgccccttttacaccgccgcctgtagtaccaagtccacagaaattattctgttccggctttacatcgccgccaaaacggaaaaaacctgtttctacaagagcctgggcaaaagcaagatcttggcgcactccttcgcgactggcttcctgccagtataaatcaacaatttcttctgcactgcaggtcaattttaaatccggattattttgttttagcaaagccacagcctgagatttactggcgaccgcttctccaaaaataccaatttcctgataaccgaccggcaaggcaggacttacaaccgtcttaggcaaagttccttgagcggtggcagaactgcctgctttatcattatttctgttgattattggagtctcgtttttttgctgcttagttttatttttttctttagacttctttttcgcttctttttctttctctttagccgcctttttagcttctttcgcagtcaactgcggcgctgtcgcaacagtacgcacctgtaccttagattgattaggcgttgtaatacgccgcgattcggtcggggtattctgtatcaatacctgcttctgactgcgtggttgcggtacagatgatactacaggctgagtttcattggttttattctctttcttcctcgcttctgcctgaagcggcatcaccgcagcacagcaaaaagccaaagaaatagctattaattgttgtttttttaaattcacgtcacttctcctgcttattatatattgatagttaaattttaccccatttctactgatactgtaaagttttattcatcttcttcacaaaaaatacgcatcttctatgttataatataaataaagaattttttaaggagttgataaattatgcccactacttttaagttcatcaatcatgcttgtttcactctgacacatgaaggacatactattatttttgatccttatctcgatggcagcacccaggatatcaatgatcttaaagttgaatatatttttgtttctcatggccatttcgaccatcttggcagtgcaatagagcttgctaaagcgtacaatgcaacaattatttccacagctgaggtttgcggagttgttagtgaagccggcgtggaaaaccatgctatgcatttgggtgggacgcacgaatttccttttggtaaagtgcgccttactttagcattccatggcagcggcattcctggtggacatgcctgcggttttattgtcgatttctatggtactaaactttattttgccggcgataccgctttatttggcgatatgcagcttttacaacgattggatgcctttaattacgcagttctccccattggtgataatttcacaatgggaccaaaagacgcagctattgcagccgaatttttacaagctgaatatgtaattccaatccattataatacatggcctttgattgctcaggatccagttaaatttaaagaagctgtcgaaaaaagcacgaaatctaaagttttaattgtagcaccaggtgaaagtattgaattaaaataatttaga

SEQ ID NO: 9980 - DNA, 31889 bp, Unknown
  gut microbiota DNA sequence
agttatttcacctccagctgctacaatcccttttattctgcaattagtaccaatccttaaattatttttcactatcagtaacgcccgttccatttgcacattatcaccaataatcagattatcaccaactactatcgttactcttcccaacaaatgtaaattgttttctatagtaatattcttttcggaaatcaggaaagcatccccctttaatgcttccactatacaaggtaaccttgccccatataaatcatcactataataaattcccttaccgaaccccaactggcgatattcgtcatcggtcaaaaaactatagtggctccattttttataagcgcctatgtccaatgtctctaaaatatcacctgcttcaccaacacagattaaatcattatacttattgaaatcaccatttatcttaagaccagcagttaaagtattttcgtaaaactcctgtccgcgtcctaacggcggctgtaaacaaacctctgccaatcttatttgcatatcatctgctattgaaataacactcactttacgccctggcagactttcagctctttctaaaacaacttctgtctgcattactttttgaccaggatataacatttgctcttcaagcctaaagctttctgtcagattactactctgctcttttctcagcacacaactcataacatcaccagttgcagcctgcagctgattatgtaaaacaattttgctttcagcctcaatttcttcgcgcaacgaataatataatgcctgaacagctccgctcaacacaacacatgccaacaatacaacaatgcttacactgcctctgctatatctgtttattttcatccttcaatgactccattacctaaaagcagtaccttactgctggttatccttcttccgcttttagtatcctggatttttatggtcagcatcaattctctgtaattcaaacgttctgcccgaaactcttcgatctttacagatgctaaagacaaaacattaacgcctttcaaagaattacttttagtttgacgatataaaatattaccactcagataaaatgttatctgacgactgccaaaaacatcctgacaaattattttactgctgcctttataccctgtattactgattgttactgttgctgcatgtaaaaacaattctctctcaggtaatgagaaactgtaatttgcagcccgccgcagcataatgtcagactgtatacgctgccagccctgcagcagctgtcgcaccccgcctgcaaacagcaggctcgtcgttataataaatattaaagccaaatttaattcgactaataaaaatcctttattccgacaatgcataacgcaccttattaacaagcaccttttgatttctgcattctctgactgtaattatttcctgtttaatttgcaagttatcaataaattccttacgttcaataaacagcccctgctctgccgctaaagcatctgccgcctccacgttccttacttccaacaattcaaatgccagttccagccgattatattgctgcattgctaaaacgcaagccttataacctgtcaataatgaacagcaggtaatactgacaagcagtaaaaccagcatcacctcaatcaacataaatccctgcttatttaatttcacttacaacgacccttccagttacaggctgtacttcaaacttttttaccagctgtggctgccgtctattttttattaaaaccgaaaaataaacctgcggtgcaccttctgcagaaaagcgtattattgaagtattaggactgtaaaaatacagacttccctgcccgatttcctgaagccttactttttttacaattttaccttcgcgataaacataataacactgttggtctaaatcaacagtcaacttattctgtaagcccgctccccaaagagctgcctgctgcaacgcagttacttccgccgccagtcgctgacaaaacccttccatctccaaacggttgtctactttaataataccctctgcacaaggaatcaataatgccataactaagccataaaagctgatataaagcagtatttcaacaagtgtaaatccagaattattacgactgcttgctgccatctgaaacaacttcttttccttcggcatcattacctttaaggatgtaattcagtccattatcagcaatggcataagaaaaaacagtattagtagcatcttgaaaacctttatttctggcaatgtattcactcaccaaatcttctaatttttctgggcatttacccttttccattttatataactgaatcgcactgtccactgttaaaagatcatttttcagtttggcatttttagcttttttattagctgaatcaatagacggcagaagcattccagccaacacacccaacatagccgttacagccaccagttcaatcaaagtgaaaccttttcttccacataaatttttataaaaattcatcataacacttccatcattcgtattcaggtatttccgttaaaaaagtcagtaaaggtgacgctactgtaaaaatcatagcaccaatcactaacgatataataattaaaagtacaggttccaataaaactttaaaattttttaaacttgcggtaaaatcctgctccagtaataatgctgcttccttaagcatcgttgctaaagcccctgaactttctccgacgattaaaaattctatggtcagtgaactaaaaagcggagaagctaatgctgctgccttggtaatatcgctgccgcgaacgatagcttctgaaaaaagcattgcttttgcagtcatttttttatcagcacttccagcagcagcagtttttatcgacaccggcaacgaaattccactattaagaagcaacgacagtattttgcaaaatcgtatttccaaaaacgtctgtcgataacctgcgataagaggcaggcagaagcaccatttcagcagactataccttcgctgccataaataatataaaataaataaacttaaagacgctgctgcctgccaatatttaacagcaatttcacgtacaaacatcattacctgtaaaggcaacgttggaacaaggtcaaaagactgatataagtcggcaaacaatggtagtaatttaactacaaataagcagccagttactatagctaatgataataccaaacatggatataagcagatattctttaaaaatctgtttatttcttccttctgcccaaaataaacagccagttcagacaacatctcctgtaagatgcccccttgttctcctgcctcaattactgacacagtaacaggtctaaaaatatgtacgtgttttttcatcgcagcagacaacgcttttccagattgtaaatcagcaatcaataaacagcagacatttgttaaagaaaccgggcagcgtgtttttaaaagttccaatgctctgcacaacggaataccgctgccaatcatggctgccaattgctgaaaaaaacggctgcgttctttgtcattaactttaccactattaaacaaacggcttattttaatagtgaaactttgtacttcttctatcccagtaatataatcataattttcgtgtaaaaatgctgctacttcctgtttactgtcagctaaataacttccctggtaaagttttcctgccatactgcgtgctcgccagcggtacaactgcattgttacacctccattattttcaggtattctttattcttgcactatactccctctcattctaatgatatttgtgaaaaaatagtgaacgagaaaataaaaaagacgtctttccaaggaaaaacgtcttttttattaactattatttttaccaattcagatatttaagctatcttactttctccaacagctccagatattttccctttaccaaatctggttcaaagacatatagtaaatgtttaagctgttctctgcttgtacgcggctgctgagaggcccaatagcccactgttaactgtaccagtctgcgtactctgatcttatttttttcacttttagcagcagataaaccaaactgcagccactctccgtatacagtcatttcttcctgcatagtcagtctcgccacagcagttatcaaatcccgctgagtacgcagcaccaaactgcctatttgttcccgttgctgctgactgcgcctgctggaaacagcctgatcaagtaaaaccagcataaaattctgccacggagcatataatttaaacgcgttagcaaaaccatcccagcctgcatacatttgaaaatgtaaggcaatattcatcagcgtactacgcgttaaggcaaaatctttttcacgcaccagaaaaacaaataatccgtccattaactgcctggtctcattttcccattttctccgggcaatctgtgcaatcagctgtgtccattcacgcacaaaatactgtaattctcctgcagttaatgatttattattggtcaataacaaactcatccagcgcagcattggtaatgcattaacataacgtctgtccgaggccgtaaaaaatagcgtcagcaaaaattctaccattttagaaccggcatagacagtactctctgcactgtaacgtacaacagctttggatacaatagcagaaaatctggcttcatcacgcattctagcagccataactgccatatcctgcagcatctgcagcaattcctgttccaaatcagcatctgtttttgttaattcattgcttacaataaccactatattcgcacactgtatcgttacctccggcagtccatctttcattgccaggcagccaagcatacccaatttacgtatgccttctgcacgcagatgcgaatttgtcactaaaacaggctgaaaaacagctactatctcttttgctaaaatttcatgtttagcacgcatgaaatagatgcaggaattctttaatttctccaaacaggcttcgcaggctattccctgttctgccaaaagcttaaaacggcgtactattcgctcaatcgtcaatgacatctgttccttgacgctttgcgacataaccgcctcagactgcatatctaacgcatccagaagacaactgagcagatcctgtgccagaacacttttctcatctgaagacaggtcttttttctgtgtctgtttttccagcttagttacattatctaaaagatttttaaacgtaggaccatgaactatcctggttgattcttcagccatctctacctctatcctctattaaatattgatagcaccttcataaacgataccgcttacagtatccacagttacttccatatcgtctttaagcaggttaagcgcattttcagcgccaacaactacaggaatactacaattaattgctatgatggctactgaagatgtcagtccaccctcctctgcaataatagcagctgctttagacgcataagctgccgcttcatccggcaatactccaactactaaaacatcaccaggtttaaacttttctttaaaatctgtcaatgtaatagcagtgcatattttacctgtaaccgaacgtttacctataccaacaccgcttactaatttatttcccacattaaccaccttaatcaaattcgttgaacctggtttaccgacaggaactccagctgtaatgacaaccgagtcaccgtctttgacataaccgtgttcacgtgcacatttcaatgatatctcaatcatttcatcagtattatcactggaaggccccaaaagcggccttactccccagtaaaactgcatcgcccttacccttgcaggtatccgtgaaacgcctacaacataacacttaggcctgtatttagcaatcattcgagccgtaaaaccagattcagtaaccgtaacaatagcgtctgcatccagttcctgtgcaatctgcactgtagcatgacttatagcctcagtagaatgtattttatcactaataccttttcctttaaaaatagcggcataatccaatgcctcttctgttcgcaatgctatcttggccatcgtctgaactgcttccagcggatacgaacctgaagcagtttcaccgctcagcataataacatcagttccatcaaaaatagcattagcgatgtcactggcctctgcacgggttgcacgataactgttgaccatgctttccagcatctgcgtagctgtaatcacaggcttaccggccttattacagcgcctgataatttctttctgcaccaaaggaacatattcagcgggaatctctactcccaaatcaccacgcgcaaccattacgccatcagaaacttctatgatttcatcaatatgcgtaaaacctgcctgattctcaattttggaaataatccccatccccgatcctgcggcttctaaaaccttacgaatcgcaagaacatcctctgccttttgtacaaaagacgctgcaatataatccatatcatgttctattgcaaaagtaatatcttttatatcctgctcagacaaaaaaggcagttttaattccacacccggacaggcgactcttttacgtgaacccagctgcccaccatgcactactttcgtatagatttcagttccgttgatgcgttctacctctaaagaaagtaatccatcagccaataaaatagcatcgcctacttttaattcatcaggtaaacctgaataattaactgaagcaatctgttcattaccgatctgctccttcgttgtcagacaaaaagattcgccctcctgcaacgtaattttatcatgttcaaaaatacccaggcgcatctcaggcccccgggtatcggcaatcatagcgatcggtttattgacttgttcagccgcctctctgacaagccccaatctttgggcatgttcagaatggcttccatgtgaaaaattaaagcgggccatatccattcccgctttcagcatagaaactaaaagcgggatattatcagtactgggaccaacggtgcaaatgatttttgttttcttcattgcccggcctccttagaattacaactgaaacttgttttcgcaaatgacctcatacgcatcttcagcttcggaaagcggcacactgatttcatatacgccaccgtgcttggaattcgtagttttagtctgcgtcaaaaaaccgttcgcggctaatacttctttgatcctggcagccgcttcagcggtctgcgcaatgtatactaccttccacacaggtttttcctccaagtttaaagcttaagcctctttaacagctttgattttagcgatcagcttgggcaaaatttcacgtgcatcgcctacgataccatattgagcaaccttgaaaattggtgcattggcatctttattaatggcaataacaatatcagaagcagacataccagctaaatgctgtatagcaccggaaataccaaacgcaaaataaattttaggcgttacagttttgccagattgaccaacctgatgcgcatgatctacccaaccttcatcgacaacagcgcgagaccccccaacactgccatgttcaaataaagcagccaattcttcgagcattttgaaattatcacagctgcctaatccacgaccgcctgaacaaataatctccgcatcttctattttaatagcgccactggcccccaaaatctctttgcgaactaactctaccttagatgtaacagcattttttacagtataatttacaatttcgccgcttctagatgcatcgacatcctttgccttaaagaccttaggacgtacagtgcccatctgcggacgatgctcatcacagattatcgtagccagaatattaccgcccaaagcaggacgtgtccattctaccagttctccattgatatccaatgccgtacaatcagcacaaagacctgtgcctaaacgtgcggcgatacgaggggcaagatctcggccatctacagtagctccgcataaaacagcatttggtttataggtttcaaccaattcacaaaaagcattagtataaatatcagtattatactctgcatactcaggtccgcttacaacataaacaatatcagcaccggctgcaaatagtttctgcggcaagctgccagcttctttacaaatcaaaacagcgcagcatttctgatctgctttagccgccaattcggcgccgacaccaagcaattcataaacaacaccaacaggctctccgtcttctaattcaacattgacccataaatctttaccttctttattctttacctcacggacaatctcttcacgttcaattgcctcaacagggcattcccctatgcaggcaccacaggcgatacaggtgtcctgatcgatattagccttaccgtcaaccatattgagcgcgccaaccgggcatactgctatacaggattcacagccgatacatttttctctatctacacaaatagccatcttcattcacctcaatgagtaataattttcgcttgtaccaatttttcgatcagcatatcaacagctttgtctgtatcttcttcattgattatttcgctttcgatctgtggtacggacggggtgaagattttcaaaactttagtcggagaacctgataaccctatcactttcggatcaatctccaactcagccgcacccattacgggaatctctgcttttcttgctttcatttttcctttgatactggcaaaacgaggttctttttcagatttagtaacagtaactacagccggcaatgtaacagccaaagtctggcagctgctttcattctctcgttcaacaagcagtcttccatctgctcccaacgctacttttaaaaccccggtaacctgtggaatgccaagatgttcggccatttcaggtccaacttgagcagtatcaccatcaattgcctgtttaccgcataaaaccaaatcgcactctcctaccttacgtacagcagctgctaaagcaacacttgtagccagagtatcagaaccagccaaagccctgtcactgattaaaacagcgtcgtcagcgcccatcgcaatggcctctttcaaaatatccgtcgcctgcggcggtcccatcgaaacgacggtaaccttcgctccgctggtgtccttaaggatcaaggcagtttccaatgcctgacggtcaaaaggattcataatattttcaacaccatcgcgaataagtgtgttggtttcaggattaattttgacctctgccgtatcaggaacttgtttgatacatactacgatattcatgtgagccctcctctatatttatgccaaaggttttaactacatatttattattgtaacattctttacttgactgtggcaagcaaaaccctgtttttcaacacggtttcacccctttaaataccaattttctcccaataaatcatctaaagcctggtaaacaccggcattcttcccatccacccaaaaacagcgctctactttgatcatctttcctgaatctatcagatgcagatagacaggtgtgtcgcccgaaaaactttcaaaaatctgttttaatcctttttggacaataccattttcatcctttttcatgatctttatatgtaaatcaggaggcacttcctgcagaggtttaatctttaacgcctgaatttttcgttcacgttcatcgatactgagttttccttccacgctgattgcattctcctgataaagcagcctggcagcgtcacggtaaacttttggaaaaaccacaatctccatctttccgttaaaatcttctaatgttaaaatcgccatactgtcaccctgacgcgtatttcttatccggcaatccgaaattatgccggcaacactgaaatatttaccgtcaagcacttcactggcatctgatattttacgcaatggagtgtaataatacaaggaaccgacataagcgtctaaaggattaccggttacataaaaaccgatcagttccttctcatattgcaaaatcgtgcgtttggggatttcttccaattcaggtatttttagctcattaacatcagcaaaactgtcatcaccaaatagtcccatctgtccgctctgataatctttttgataattactgcccatgtccatagcctgttctgcaacggctaacaactcggaacgtttataaccaaaggaatccatcgcgccacattttattaaattttccaacattcgtttattaacagctctattatccacccgtttacagaaatccatcaaagatttaaaaggtccctctttacgtgcctgtaaaatgctgccgatcgcattttcacctacatttttcacacctgctaaaccaaaacggataaccctgtctttatttacagaaaagcttcggccactttcattaacatccggcggtaaaatcttcagccccatactgcggcacacacttatataccagctcagcttttcgctgtcactgatgacactggtcaaaaaagctgccataaattctgcaggccagtgtgctttaagataagcagtctgataagcaactaatgcgtacgcggcagagtgcgatttattgaacccataaccggcaaaatgctgtaggagagcaaaaatttcactgctcagctgcgcgctgataccatgtttttgttgagctccatcaataaaggcttcacgcatagaatccagttccttagcctttttcttgcccatagcccgccgcagaatatctgcctgcccgaggctgaagcctgccagaacggaagtgatctgcataacctgttcctgataaagaataacgccaaaagtatcttttaaaaccggttccaataaaggatgcagcatctctgcagttttttcaccatgacgtcctgcaataaaatcttctaccattcccgttcctaatggtccaggacgatacaatgcaactaaaggaataagatcttcaaaactttccggtcccaaatccataaccagtttcgtcattccgcctgattcaagctgaaataccccttgagtatcgccctttctcagcatgctgcacgttgcttcatcatcaagaggaattttatcaatatcaagtttatcaccagtagtttcataaataaacttgattgcatcaccaattactgtcaaagtacgcagccctaaaagatccatctttaaaagtccgaggctttcaatcttatctttatcatattcagttgtaataaaattttcattcgacaactgcagcggcacatactttttcaaatcatccggggcaataacaactcccgccgcatgagtacctgaattacgcggcatgccttccacgctttgagcaagatcaatcaggcgtttgatgttcgtatcgttttcatataaacttctcagctcattactggcctccagcgctctctctaatgtaatacccaaatcacgcggaataagttttgctacattatccaccatgctgtaaggcatttccaacgctctgccaacatcacgaaccgccgcgcgagcctgtaaggtaccaaaagttatgatctgggcaaccttctcctgtccataacgattaataatgtaatccagaacctgctgccttttttcataacagaaatctgtatctatatcaggcatacttacacgttcaggatttaagaaacgttcaaacagcaaatcatatttcagcggatcaatattagtaatccctaaaagataagcgacaatactgcctgccgcacttccgcggccaggtcctacaggtatgtcatttctgcggctgtaacttataaaatcccaaacaatcagaaagtaacagtcatagcccattttattgataatacctaattcatattccagcctatctaaaacctgctgcgtcggctcaggatacctccccggcatcccatctaaacacagcttacgcaaatattcctctgccgataatccatttggaatagggaattccggcagcaataaatgaccaaaactcaattccacgttgcagcgctctgctatcttcgctgtattttctaaagcttcaggacaatcaccgaacttttcgcgcatctcagcttcactttttaaataaaattgatcattaggaaatttcattcttttaggatcatctacagtacttgttgtctgaatacacagcaatacatcttgtgcatctgcatcttcgcgcttcacataatgagaatcattagtagccactaaaccaagatcatatttttttgccaggcgtttcagttcagtattaacagtatgttcttcttcaaggtcatgatcctgaatttccagaaaaaaattgtctttcccgaaaatgtccagataatcctttaaactgttttcagctccttctaaattgcctcgcagtatttgcacaggaatctcaccggcaatgcatgcgctcatgcagataatacctttactgtattgtcttagaatatctttatcaattctaggtttatagtaaaacccttctaaatgtccaagtgaaaccagcttcatcagattgtgataaccttcgtcattctctgccagtaaaatcaaatggtacatcccatcacggttagttttttcaaatcgtgatccatttgtcaaatatacttcacagcctataacaggcttgattccctgcttcattgcctcctgataaaaatcaacgacaccatacattacaccatgatctgttatcgccaggctcttcattccgatttctttagcataagcaaccagatcacttatttttgcggcaccgtcaagcaggctgtattgagtatggacatgcagatgtgtaaaatttacgctcacaacagtcctccttccgaaaaagcatcgatttttttattaaatttataccatatattataccacaacagatataggcaaacaccagttgctttaaggatgcactgccactcaagcaaaagcatcacctgccaatagcggcaaagtgatgctgaacatcaaactctcctatctttatttttatataaactccataatactcccggtactaaaaacaacaaattaaaagccaagcttgggaataaggcatttgccgaatccgggaaaataaacggccaaaggcaggctaccattataccagcaatcattgcggcaaagccagcctcttttggcactaagcctttaaaaaacacaataaatgtcaatggtaaaaatattcctgccccccgcaatgccattgacagataattccaatgcaaaaccagtgaatcaagataatgaaaaacgaatattactgcgccaaatgtaactgccagcactgaaaatctactaatccacaataatctttttacatcacgaagacctaataaatcattaaaaatatctcgtgaaatcatcgtcccaattcctaatgcaagaccagaaatagaaccaagcgaagacagcagcaatgctgcaataccaatgccccccagccattcaggcaaatatatacatagataaaacggcagtgcatcaatagcgttaatctccggatgcatcgcatgcatatacatacctatcatcactgacggtaacccgacaggaataacaatcaatgcagctgtgacacagcctgctgctgccgttgcactatccttggccgaaaacagagcctgtacataggtctgtgtagaaataaccccaatcaccatagaaaataaactaaaaagactgtcttcaatgcccttaccaaaaaggctgagccatggaaacgcaggaaaactttcacgaattcccgtcaatcctcccaaatcattataagaaagaatgcctcctacaaaaacagttgcaaaaaccagtaatattttaaaaataccagccattccagaactgttgataccgccaaaaaaaaccagtgccgcaacaataacaattattattgacgcagcagccaccaggcttacatgaaaaaggcccactattaaatgtattgacgtaagcatgcttgcaacaatactgaaaaatatacctgccgtagccgataaactcgctatcggaccagctttcttcccgaagtttacaactaaaaactcagaaatcgtcatcagaccgctattacgcagcggacgggcataaaacagtcccatgatgataaacccaatgccagatcctaaagtaaaccaccaagcggttagtcccagctgaaagcctaactgtgctgtgcctatggtagcagcaccgccaacaatagttcctataatactgcctgcgaccataccaatcccggcactgcgtccacctaaggcatagtcatcagcagattttattttacgaccggcatatatacctggcaaaatcgttaaaaccagtgttataactatactcacaagttgtactgttgttaactgcataccttccacacccttgttaaaatattgctttcatctttgaatatatattgttttataaatcttaattcgctgttaaatatttaaatcctgccgtaaatctggtaattcattatactattctgatatggaaactatacctttgtttacacttttcttcattttttatactttatcaagtttttcttgctttttgcttttttgcaaagtacaattatctcatcgaatagtatcaaggtacttttatcgtactgttttccagtactgcagcttcgagaagtcaaagcttttaattcgactttttctctccagtacaataccttgttgttcttcgtaattattaatttatttatgagggggatttatcatgaaatttactaagaaaaaactggctctggccataggcggtgcccttataaccatgtcagttttagtcagcggctgcggtacaggcagcgacaagaaagcagacactattaaaataggcgttgttgctgagctgacaggtaataacgctacttacggaacatccattacaaatggaatcaaacttgccgtacagcagctaaatgataccggtggtctgcttggcaaaaaaattgaactggtcgttgccgataataaatctgaacctgcagaagctgctaatgcaatgagtaaactggtcaatcaggataaagctcccgttgttatgggattatttgccagttccagtgccatagctgcctctaacgtaagtgaagccgctaaggttccttttcttgcagttggagccactaatccaaaagtaaccttagatgaaaaaacaggtaaggtaaaaccaaataccttcagagtttgcttcatcgatccgtttcagggtactgtcggtgctaattttattttaaatgaactgaagctccaaaaagctgctgtttacattgataacagcagtgactatgccaaaggtctggctgaatttttcaaaaaagcttatacagaaaaaggcggtacagttgtcattgaagaatcatatctgcaaaaagattcggactttaaagctgttttgacaaaaatagctgcggcaaagcctgaagtaatttatgtacctggttattatgaagaagtaggtaaaatatgcaagcaagcccgtgaactaggtattactgttcctattatcggcggtgacggctgggatagtcctaaattagtcgaaatagcaggtgcatcatctcttaacaatacctatttcacaaaccattacagcccggattctaccaatgaagcttccaaagctttcgtagatacttatgctaaaacttataagcaaaaacctgacgcgcccgcagtgcttggctatgatggagccatgcttttagccgacagcatcaaacgcgcaggtgtctatgaatcagcaaaagtagcagaagcattagctgctaccaaagattttcaggcagtaacaggcaaaacctctttagacgcttcccacgatgcagtaaaaagtgctgttatagttggatttaaagatggcaaacaggtttaccgcgcaacagttaatccttaagcattgttttataacctcctaaaaacagactcttacgagtctgtttttttatttgttcatactttcctttgccatccctgcaggcttagagtataatatataaatcaataaatctactttcaaaaggagtatcttatgccggaacgcaatcaaataattgacgacctgcgcggtatctgtatgcttggagtcatcggtatccacgttggttcttttgtcctagaagcaccttatcccaatagtttcttatatatgctgctggaaatactttcacgctatagtgttcccgcgttcttttttatctccggttatggtttattctgccaataccgaccagaaactactatagcttatctgccttttttaaaaaaacggctgcaaagtgtcggacttccctatgttatctggtcactgttttatctgctttacttttctgctgttatgccaggatgtataaactggcagccagcaaatatcctttttcttctcttttatggtttatcctgctaccacttatattttatggtcatactgctatggttttattttactttcccattatggcataaattattttcttttttccaaaacagcagtcttaaaattggttttatgctgctgttcttactgcagatcgtcttcaactacttgacctgtcatcccaatcttaaaagtactgacttaccagtatttttacaaaaccttttttactatcgtctaaattacctgcctctgcattatttatttatttttatgtcaggcggcctggcagcagtttattataatacttttataaaatttattatcagacatttcacaaaagtaagtgtcttctacatctttacgctcttgtttatcgggggcagttattactattattatttttatcataattccagtctgatcattctggtaaacactcttcagcaattaagtctgcaggggttcctttacacaataggttctctgatttttttctgtgcagtctttgccaaaacaagtctttcgaatcctatcagaaagtttattcatctcttatcagtaaactcgcttattgtttatctcatccatcccttttggatggatatcatcagcaggctttgtcacgttggcggaattgttatgaccagcaaaaaaattcttttgatctactgtcttcttgtcactttatctgtactctcaagtattatcataactaaattaggaggtaaacttccttggctaggtttattattaacaggaaaacgaactacctctacaaaaaaagcatcttgaaaattcaagatgctttttactttcatttcattctaagttcacaaacaatttacaaaaatcagattcttttgtataattgtttttactataattattattttatcatatgctgtgtatgcagagtgaaaggacttttattactatggaacgtgaaaatttctcatcccgacttggctttatccttatttctgcaggctgtgctatcggccttggtaacgtatggcgttttccatttattacaggcatgtacggaggcgcctctttcgtacttatctatctatttttcctgctcattctaggattgcctatcatggtagcagaattttcagtaggccgtgccagctgccgtagcgctgcactttcatttgatgttttagaacccaaaggaactaaatggcacctttataaatacggagctattgccggcaactatatcctgatgatgttctacacaacagttgctggttggatgctgtattatttttataaaatggctgttggtgacttcgcagggcttgatgctaagggtgtaggcgctctttttggtggcctgcttggtgatccgctgactatgactttcaatatggtcctgacagtcctggtttgttttggtgtttgtcttttaggtttacaggccggtgtagaaaaaatcacaaaaacaatgatgttatgcctgctcatcctcatgttagccttagctgcaaactccatgttcttaccaggagcggaagctggtcttaaatattacctctatcctgatttcaataaagtctttgaaaaaggtgtttccgaagttattttcgccgctatgggacaggctttctttacactcagccttggtataggtgctctggctatcttcggaagctatattgccaaagaacgttctctaacaggcgaggcagtatttatcactattttggatacagccgtagcacttatttcaggcttgatcatttttccagcctgctttagttttggtgttaatccggacagtggacctaacctcctttttgtaactttacctaacgtttttaacgcaatgccatggggtcaattttggggagcattattcttcctcttcatgatatttgcctcttattctactgttattgcagtctttgaaaatataactgcctgcatccgcgatcttactggctggagccgcagtaaaactatttatatcaatatagtgctgataacaatgctttctatgccctgtatacttggtttcaatgtctggagccatatccagccgttaggtcctggaagctgtatccttgatttagaagatttctttatcagcaacaatctactgccattaggcagcctcgtttatctgctattttgcacacagcgttatggctggggctggaacaattttatcaaagaagctgataccggcaacggtcttaaatttcctaaatggatgcggttttatgtcacttatattttgcctctgatcgttcttggaatttttatcaacggttatttcgctctatttaaatagccgcttcaaaaaacgaaatctatttctgagtactatcaagcatttttatgaaaaaagatctcatttttgtatcagtacaatactattcacagataaatgaaaaatcccctgtgcaaagcacaggggattttatttactcatcaaatgccaattttcttatttttcaagaacatccacatcggaccagccagaaaaatcgaagtataggcaccactggcaaaacctaccagcatagcgaaagaaaaattatgtatagtctctccgccaaaaaggaagattgacactatagcaaacaatgatgttgccacagtataaattgtcctcgtcatacactgccaaatgctgttatcgaccatctcgcccaggctttcactgcgtcgatgtattttcagattttcacgaatacggtcaaaaataacgatcgtaccgttaacagaataaccgactaccgtcagcagtgctgcaacaaacgaagaatccatttccatttggaacaatgagaaataactcaatactaccaaaacatcaataataagtgctataattgccgctattgcaaatttaaactcaaacctaaaggtaatataagcaatcatcaatacccaggaaagaactattgccatagccgcctgctgtaccagttctgaaccgattgtagcgccaacctgctcaacacgctgtatctgataattgccaagcttgctttgcagatcattcatcgtagctcttaattcagtatcctccacaacaccagtacgaatcaatacactgttggcctcagttttgccatcactgttttccagttggatgatactattgcccatatcatgttctttcaggacatcccgaacctgtgccacattgaccggattttcaaaagtcaaatcaacaatactaccgcctgtaaaatcaattccaagattgaaaccacgggtaacaatagaaccaaagccgatcaacagaaaaataatggtgatggaaaagaaaattttataattctttacgatcgaaaacattatttattcacctccttcggagcagaaacgccaaagaaagcggggtttttagtgaaattgcttgaaatcaaaaagcgcagcaaaaatttagtcacagtaatagccgagaacatactcaaaataacaccaatagccaatgttactgcaaagcctttaatcggtccagtaccaagatagaaaagaataacggcagccattaaagtcgttacattagagtcaaaaatagttacaaacgcacgattaaatcctgcatccatcgctgaacgtaaagttttaccattgcgaatttcttctttaaatcgttcaaaaatcaagacattagcatctactgccatgccaatagacaggatgataccagctatgccaggcagagtcagcgtcgcattcagataccgcatcactaaaagcagcatcattacataaagcagtaatgcaatacaagctacaatacctgacaaacggtaaaacagaatcataaatacaaaaacaccgataacaccgattccaaaagctttaatacttttttctttagaatcctgacctaatgtaggtccaacagtccggttttccataacctcaattttcacaggcaaagaaccgctacgcagtaaaatagccaaatgctcagcctcttccatagtacgtgatcctgagatttgagctctgccgccagttatagcttcctgtactacaggattggtaagcacttcaccatctaacacaatagcaatcggtttacctatgttacgtgcggtaagatcagcaaactttttgccgccttcatcactgaactccaaaccgacaacagactggttgccctgagaaatttgcgctttagcatcctttaagtctttacctgtcagaacagttttcccgctgacatctttaaattccaaaagtgcggtacgtccgagcatcgcaatcgctttatcaggatctttaactccaggaagctcaacaataatacgatccttaccctgacgctgtataaccggttcagtcaatccaagttcattgacacggcgttcaataattttcactgaacgattaactgcatcatcatcaacctttaactcaggtgtatcaacagcctgaagcacaacatgtgtaccaccctgcagatcaagtccctgtttaatggaatttgacaaaggcgaaatataaacacagaaacccccgattatcgccaacgagataatcaagaatttgcctaattcattccatctcaaaattagctgccccctttagtaagttcatcaaaacttttataaacaagctactcacaaagagtaacgtttgtttcagtaaccagatactgcaccggtttatcataataatctactggtattttactgcataacagggcattataagtcacacccatcagcacagctttatcaacctgtgccaagaagcggtcataataacctgcacccatgcctattcggttgccatttttagcaaacccaactccaggtaccaataccaaagctatttcatgtggatttatcacaacatctgtaccactaacactgcggattccgtaacggtcaagtgataactgaccaaaaccttcaaaccgcaccgcacaaatctctgtttctgaaattatctgcggaacacaaaccgttttaccagcgagtctagcctgctctaaaacaatgtctatattcggttcgtttccgaatgccagataaccaaaaatgacgtcagcatgacgatattgtggcgaaagcataatatttgcacagatttttttgctccagcggtcaacctgatccctagaaagctgattgcgcaaagattttaactccttgcgcaattgttgtttcttcattatttttctgccatttcctgcttaacgggatcttgaaaagcactgatagcggaacgtgcaaaatcaacttccacgtcttcagccagctttaaggtaacctttttttcactgatagcggtaatcacaccaaacataccgccaatagtcactactttatcgccttttttcaaagaatcaagcattctctgacgtttttgttgttcttgtttctgaggacgatacagcataaaataaaagataccgcccattaagataaacggccagatcgcattgatcatcgccatagtatctccaccttgcatgggaacacctccttcataattctcccctatctgggattatattcgccataaaaacgaaaaatcctgttttagcctcgataattttctaaaaatctttcgcgcagctcagggaaagtatcactggcaatagcagaacgaatctgctttgtaaaatcaagcagaaaatgtagattgtgaatcgtaagcagcctcagagcaaacaactcttctgccttaaacagatgcctgatataggcccgtgaaaaattacggcaagtataacagccgcagcgttcatcaataggacgaaaatcctcagcatatgctgcattccgtacaaccagccgtccttctgggatcattgctgtaccgttacgcgctacccttgttggaaatacacagtcaaacatatcgacacccaggtttactgcctctactatacagtctggggttccaactcccattagataacgggctttattctttggcatatgctcagttgtttggtttaaaatgtcatacatcagcggcttaggttcaccaacactcagtccaccgattccataaccagcaaaatccatttccgtcagctgatcagcactcatttttcgaagttccggatacattccaccctgaacaatgccaaacatagcttggtcttcacgggtatgtatatctaaacagcgtttggcccaacgcgtagttctcagagttgattcttttgcataatcaaaatcagccggataaggaatgcattcatcaaaagccattgcgatatcggcgcctaatgcttcctgtacttctgtggctatctctggcgacagaaatttttttgaaccgtcaatatgcgacctgaatgtcacaccttcttctttgatttttctcatggctcccaaactgaaaacctgaaatccaccgctgtctgtcagcatcccccggtcataacgcataaaattatgcaaacctccggctttcttgaccaattcgtggccaggccgtaaaaacaaatgataagtgttagacaaaataacctgactgcccatagcatataattcttctggcgctaatgtttttacggtcgcctgtgttccaacaggcataaacatcggcgtatcaaaagttccgtgtggagtatgtaatttacctaatcgcgcgccgctccgactgcactcttttattaattcatatgtaactgcgtgcataaattctcctaaaaattatttattcaaatcagtaataaacatagcgtcaccaaaagaaaagaaacgataatgttcgcatacagcttcagcataagtcgacagcataatctcacgtgttgacagggctgataccaacatcaaaagcgtgctctgcggcaaatgaaaattagttatcaatgaatttaccagtcgaaagcgatatccaggataaataaagatatttgtccagttcccgccagctttaatcacaccactttcacccgcagcttctaaagtacgtaccgcagtagttcctacagcaacgatacgccgaccttcagctttagccttattaatagcttcagccgcttcaggtgaaacagagtaaaactctctgtgcatcacatgatctttgatgtcatcaacactgacagggcgaaaagtcccaagaccaacatgcagtgttacaaaaacctcttcgcagccaatatccctaatcttttgcaaaagttctttggtaaaatgcaatccggcagttggtgctgcagcactgccattctctcttgaatagactgtttgataacgttccttatcttccagtggtgccgtaatatacggaggcagcggcgtttcacccaaacgatccaaaatctcttcgaatacgccattataataaaaacgtgctattcttccgccaaaatccgtatcagcaataatatcacaggacaaatcatcactaaattttatttttgccccaacgcgcagtttgcgaccaggtttaaccaaaacttcccaatccgtactatttaaacgtgtcagcaaaaatacctcaactcttgcaccagtatccttcacgccatgcagacgtgccggaataacacgtgtatcattaaaaaccagtaaatcatcatgccgcaaatattcacataaatcataaaaatgtctgtgttctattgttcccgtatttttatctacaacaagcaatcttgagtgatcgcgcggttccaacggatactgcgcaatcaattcctgcggcaattcataagtaaaatcttttacctgcatcttaatctccggtttcagtaaattttttcaaccctggtatctgtataataatgagttaaaatttctttataatagtccctgctgcgtggcggcgcactatttgccatcccacgtgctccccactgggaaagtcccagtccggacccctgcccacggcctttaaaagttaccatctcacctttttcaccgctgacaaaatgcagatcctttaaaatatctttgaaactaatactacgttcgctgacttttatcgggacttccttcctgccgatttctattccataaggattttcaataggaatctcaatagaatttggtacaggacgattgacttccacttcaaaaaaagtactgttgagccctaatatttcctgcacctgctgtcctgtaaaaagaaatgtcccgccgctgccgctgaacagcatttcctgcacccgtccgctggcagtgcgatcatttccaaacattttgctaccgccttccagcggtgataaacgtatgctttcaagtttgccgacagcatatccacgcgtcgataaacgtcgttcgatctcacttgcaggcaaagctttttcccagttatacataggtgcatcccagtcgtaatccttcacactgcgcagataaggtacatatctgccccacacatcgcggctgttttccgtctgcccgccaccactttggtgataaacagcttcaattggctgcccgttataagtgactaccattcccgctgtgacatcgaccagtttattaatagcctgtttttctgttgtcagtccataataatcctgcccttcttcactggctttcagatcataacctaaacgactgcggtttccaagcctgttataagccagcgaccttgctgctacagcctgggccttaattgcctcatcagggaaaatcacaggtatttcttcgcccaccacactatataaatactgctctaacggcagtacattgaccacatctaaagtctttccgtcagcggaaatacgtacctcaaagcttccacggtaagcttttttatttacttcaatgggcttgccattttcttttaccacaaaacgtaacgttttggcgccaaacttccgcgcacccaaattgacagtaccaccctcagcatttacaaaatacctatccggtttcaaaaccatttcctctccggtatccggtactcttaccatcagttcatcctcacagctaagctcagctgcaaactgaccatgtacgacagcaacagcaatatcaggcgatgaagccattactatgccacaattgatacagaatacccatgcgacaagcagcagcagttttttcatgaggacgctcccttctctaaaactagtctaactttaccttaggcttcttctcataacggtccctttcactgaatacgcagccacagtatggctgacgatataactccagctctaggcttatatcaacaccacgctgataacctttgcgaaaatcctcatagtaaaacgggatatcaaattccttcccagcttcttcagccatttgtatgatcagttcatgcttctgatacggactgactaataaagtcgttgagaaagcatcataaccattttctttggcatactgagctgcataacgcatccgcactctgtagcagtaagcgcagcgtattacaggttcatccagcatcccttgcacacaagtttccagagggtaacttttatctacaatcagcttataacgttttttctcgcataactctcgtaaagcatttaatcgccgtttaaattccttatatggatgaatatttggattaaaatacaaaatatcaaaagccttgccgtcaaccaacagcttctctgcaggatagcatgcacaaggtccgcagcaggcgtgcaatagcagtttcatcacatcatcccttttccgggaaaggcactcccaaataacgatacgtttcacgtgtggcaatccgcccccgcggtgtacgctgaagcagccccaattgcataagatatggctcaattacatcctcaatagtatctgtttcctcacttactgcagccgcaatggtttcaataccaacaggtccaccgcaaaatgttttaacaatcgtttgaagaatgcgtcgatcattgcggtcaaggccataacgatcaacctctaagcgtgctaaagcttcatctgccatttgtccagtaataaccgcagcacctgacacctgtgcaaaatcgcgcacgcgctttaacaaacgattcgctacacgcggagttccgcgactgcggcgtgcaatttcctctgctccgtcagcagcgatctcaacacctaaaatctcagcagcacgtgtaataataaactgtaattcatcaggcttataaaattccagccggcactgtacaccaaaccgatcacgtaaaggagccgcaatggctcctaaacgtgtcgtagcaccaataagcgtaaatttgggcaaatctaaccgcacgctgcgtgcactcgggcctttaccgataatgatatccaaagcataatcttccatggctgagtacaagatttcttccactgttttggataagcggtgaatctcgtcaataaaaagcacgtcattatcacctaaattagtcaaaatcgctgccagatcaccctgtcgttcaatagcagggcctgacgtaacacgaatattaacattcaattcattggcaataatatttgctaatgtggttttccccagaccaggcggcccaaataaaagcacatgatctagcgcttctttcctgtcggcagcagccttgatgaatacttccatattctgttttacctgattctgcccgatatattcggccaggcggcgaggacgcaggctgtattgccatacatcggcgtcctgctcctgtccggtaataattctttcttccggctgcattatttcctcccggcaaacaatttgagagcctgcttaataattacctcactgctaagttctgcataattcggaatctgttttaaagcaggcatgatttccgaattagagtatcctaaagcacacaatgcttcaatagcttcatccatagcagcactaccgccgccaaatgcagtatcggcaaaaccgctgtcgctgtcaccgcctataccgcctactttatcttttaattctaaaagtaaccgttcagcggtctttttaccaatccctggcaactttgttaaaaccttaaggtcacggctttgcactgccagataaaaatcatccggcttaacggcagacaaaatgcctaatgcaaccttaggaccaacaccgctgaccccaagaagaagtaaaaataaattatagtattcctgattcagaaagccaaacagtaaaatagcatcctcgcgcacagccatataagtgtgcactctagcttccattcctacagcaagttgtcccaaatgagccgcaggcataaagaccctgtagccaacaccgctgttagtttccaacaaacaatattcatttgccagataggccacctttcctttaattgatccaatcatttacttcaactcctgccatcgtcttgtcgctgccgtatgcaatccgcaaatcgccactgccaaagcatcagcgacatcatctggtttaggttttgtacgaatattcaagagcttctgcaccataaaagtcacctgctctttgttagcaccgccataacctacaacagcctgcttgatctgcatcggtgtaaattccgtgatctggataccgcggttagctgctgtcaaaagtgccacaccgcgagcctgaccaacgcttattgctgtcgttacattgcggttaaaaaacaattgttccacactcatcacatccggacgatattcatccaataagacgctcagttcatcgtagatttttttcaacctgagttcaggcagcatatccttatccgtaaacacagctccataatggataggagtcagtttatttcctaccatttccaccaggccaaagccgcagatagcagtaccagggtcaattccaattgccagcatctcttcgtgctccctcctgattatgatagaaagcaggcaggccttggtgagcctgcctgtcgcacaatttattcttcgtcttcttccggcaggtctgcgtttgtataaacatcctgcacatcgtctaagtcctccaatgcctcaagcattttcctgactttaacaacgtcttcgtcagacagttctgccattgtgtcagggagcattgcgatctcagacatcatgacttcgatattattatcagcaagagctttttcaacagcatcaaaatcctcaggctcggtaactatctcaaaaccttcttcctcagctttaacatcttcagcacctgcctctaacgctatcaacatcaaatcatcttccgtatagccggcttcactgtcgatactaaaaacgcctttgcgtttgaacatccaatttacacaaccagtctcgcccatgttcccaccgtatttagaaaatacgtgacgaacatcggcagcagtacggttacggttatcagtcaaagtgcttaccattacagcaacaccagcaggaccataaccttcgtaagtaatttcctcataattagaagcatctgcagcaccctgccctttttggatagcgcgctgaatgttatctttaggaacattattggccttagcttttgataaagccaatttcaatttcatattgccggtagggtcagggccacccattcttaccgcaatcgtaatctcgcggccgattttggtagtaatctgaccgcgtgctgcgtcagctttaccctttttgtgtttgatgtttgcccatttcgaatgtccggacattgtcatattccccctaaatctttaaaccttacaaatcgcaagatatttttaccataatattatactatagagccattatttattcaaactattttcgatgccactatttaacattaagatatataaaacgcagccgaagtcatccccggctgcgttttcaattgatcactatgcttacagcacaatatttttcgcattagctaaagtatctcttgcttcagctatcaatctttccatcacttcagcacaaggcagaatgtcgtttaaaacgttcagactttgccctactaaaacagctccgtggacaatatcgccttccaccgcacccaaacggttagttcccgtagcaaaatcgtttaattcctgctgcggcgcaccgctgcattctttttccaaatattctttggtaaactcatttttcaggcaacgcacagcattattgcgcgaaaaaccagttacagcagaatcagtatcagtagccttaataatggcttctttagctttaggatgggtaggacattcgtccgtcagaataaaacgtgatcccatctgtacaccgtcagcccccatcataagcgctgccgcaattccacgtccatctgaaataccacctgctaccaaaaccggtacttttttgattagcggcagtacgtttgtcattaaagccatagtagtttgctgacctatatgcccgccaccctccataccttcgatgaccatggcatcaacacctgcttcttcaacacgctttgccaatttgacacttggaactacaggaataactttaatttctgcagcatgaaatttttcgatatgaggaacaggatttccagcgcccaaagttacaaaggcaactttttcttcacaaaccacatcaataatctctgcaatattaggagccatcagcatgatattgacgccgaaaggtttagcggtcaaatctttggcttttcggatttcatcgcgggtccactctacagtgcggccacctgtagcaataataccagcgccgccggcattggaaacagcagctgccagatttgcatctgaagtccaggccatgccaccctgaatgataggatacttgattcctaaaagctcagtgatctttgttttcatatatcacacctcttaacttaaattttattatgtaaacctgttgcttttatattatataataatcttctgttccttggctacctaaaaagtcccttatcctgtaaaaaaacggtgaaatcatggcttacacaattatctgttaaattgacatttttcgtaaaataccgtaaaatttttttaatatccttatacttggatagacagacagataaaagagacatttaagggaaagaggttattaaaattatgcgtagtgaagaagtaaagcttggttcaaccagagcagctcaccgctctttattttatgcgatgggttacaccgaagaagacttaaaaaaaccgcttatcggcgtagttaacgcccaaaacgaaataatccccggacatatgcacctcgaccagattgccaaagctgttaaacatggtattttagctgctggcggaactccgatcgaattccctgcaatcggtatctgcgatggcattgccatgggccataacggtatgaaatatcctctcgccagccgcgaacttgtagccgacagtattgaagctgtagctaacggtcacgcgttcgacggtcttgtactcattcctaactgtgataaaatcgtgccgggtatgcttatggcagccgcacgtcttaatattcccgcaatcgttgtcagcggcgggcctatgcttcccggacgtcttaacggaaccgacatcagtgtttccactgtttttgaagccgccggtcgttttgaagcaggaaaaatcgacaaaacagaactcagcatcatcgaacatgccgcatgcccaggctgcggcagctgttctggtctgttcactgctaacactatgaactgccttactgaagtacttggtatgggcttacccggtaacggtactataccagcagcttaccagggtgcccgtatcgctcttgccaaacgtgcaggtgctaaaatcatggaccttgttgctcaaaacctgtgtccgcgtgatattatgacaatggacgctttcgaaaatgccataactgttgatatggcaatcggaggttcttccaatactgccttacatttacccgcgattgcccacgaagcagacttagaattaccattagaattatttgatgaaataagcaaaaaaactccttatctgactaaacttagccctggtggcagccatcatatcattgaccttaatgaagctggcggaatcaatgccgtgatgaatgaactcagtaaactcgacctgattcataaggaagcaaaatcagtaacagttcagactatgggcgaaaattttgctgatgctgttatcacccgtcctgatgttattcacagcgttgagaatccttatcgcaaaacaggcggcattgctgtactcaaaggcaatatcgcccccgactgcagcgtagtcaaagaaagtgccgtcgccgaagaaatgcttgtacattctggccctgctaaagtctacgattcagaagatgaagctattgcggcaatctgcggcaaacaaatagaaaaaggagatgtcgtagtcattcgttatgagggacccaaaggcggaccaggtatgcgcgaaatgctcaatcccacatcagtactggccggtatgggacttgataaagatgtggcactccttacggatgggcgtttttccggcgcgacccgcggggcctgcatcggtcatatttcccctgaagcacgtgaaggcggtaatattgcacttatacaaaacggtgatatcatcgaaatcgatattcccaaccgcacacttaatgttaaagtttctaacgaagaactgtccagacgtcgtgaagcgtggatatgtccgcctcctaaagtaaccagcggttacttagctcgttatgcagccttggtttcttcagcagcaacaggcgctgtacttaaagtccctgatcaaaaataaaatttatatagtaaaaatatcaataaacccc

SEQ ID NO: 9981 - DNA, 36664 bp, Unknown
  gut microbiota DNA sequence
ttccttttgttatttccaaattattatttgtattaatttaaattcttttattttattatatatcaataccccccccactacgcaatagtattcatgctgtgcacaattattatactaacgcataatatgtttttttatgatcaacacaaataagccctgcaaacaaaattggggaaatcccccgaaaactgacagtaaaaacacctcttgctgtagaaaagaaactacagcaagaggtgttgtcatgtccgggaaatatacaaaagttgaaaatcctagtgaagaaatacttacttatattaccacagccaaagatatgatatatgtgtacgccgtcgttgacctgtgcggaaaaatagtattattctatcacattggcaataatatgatgatttcgctgataacatatagcatctgggaagcaagccaaaaagaaacagccgctaatggacttaacctccacagcgaccagaggtcgcaatacaccttacaagaataaattcaataatacaacattcatacgtcaatctccagacctggattcctgtatgacaatgcagcaatggaaaatttttggggacactgaaaacagagtgcctacatcacatgaaatttacctgtcggatagaagtggagcaagtgatgatcgaatatgtccagttttagaattttgagcatataaatatgaaaaacggcctcactctgtataaaatccgaagcaaggccgcataatttatcactgttattctacgacaagtggcttttttatttgtctgttaacacggtaacagtctaccagttcagtattgtcgatgagttttattatttatattattttttgcttacttccacttcaaacatccgcttccacggtaaagtgaaattataactgcttactttagcgcccaaaacaggttccgctatctctaaaatatctttagtaataacggcttcggcctcttgcacctgctgcgtattaagtccactattaggccagtaattaggccaaattaattctacataagttttattacgcacattagcctgataagcccaatcatcgagatatcttatttccagcaaagattgaagatcagccgtatccatactttttgacagtaatccttgccccaaagcaaatcccaaagtatttccagcagtattccaaccaccgtaagcagcaagcttttctgccacttcttcttcaaacagttttctgaccaaggcgttgtctgcaccgtttccataagcaatatcagcaactgcaactgcttttccctgctttaaatacctcttgacatcagcaacaaatttctctgtatgttccgttattgtacctgtatttttcgggttagaagcttctactgttaccccatcaaaaggagtattaacagctaataccaaatccgcacgtgctaaattagcagtaggccagccgccagcagcatgtatatgttctgcggcactgaatgctatttcatcatcttcataagcaggtatagtctctccgccttttccttcggcgaaatctacataaaccatcggaatttcataacttaccctgctggcagcacggcttaataaaagcaaacccagctgatcagccccagagaaaaaacgaattttctctttaggaagttcccttacaagaatatccattttacgtgcttctttatgagcctgtgagtatggcgcagtatcatcacgcccaatcaagagatagtcaaaattgccactttccacaccatgcagtaaaagctctgtagtagctatattcaaactgcgtcgccgtgctctgtcttcttgaacagcctggggtatttctactttcaaaccactcagttctttacgttcttttctgcttatttcttttaaatccagtttatcttccaacacacccattctaaaaagctttggtccccattcggcataataggcaggttcaacaggagcactgctggctttgggagaacgcattatcgtcgtaaatacataaaccaaaggatctccgcccaaagacttcaaatttaataacctctcagcccgcgacgttaaaatatcctgaggcagttgatgtgtccttgaatcaaccagcccgccatagatcagagcatcagaagaaataacgatcgcgttggcggttgccgaacgtgcagccagccattcatataacttatcaggattaccgctatgatcattgccggcgatatactccaaaggcggcgtttccacattccatccagctgctttcatggtttctactgcatagtccaaacaaaccggcctgttgtccagcggaacaaacaagagagtattccttcccatacttgcttctgtaactgaaaatggtaaaaagtatattaccaataatgttaaaataaaataaatttttttcatacagataatccttcccaaactttttcaataaaaaatccctcccatgtaatttctacacagaagggctttttcctgctaacaacgtgttaaactgaaccgactcaggaaatccttagtacgctgattctgaggtgcagtaaaaataacatttgggctgccgtcttcagcaatcacaccctgatcgataaaaataactcggctggaaacatcgcgggcaaatgccatttcatgtgtaacgataaccatcgtcaacccttcttccgccagttcccgcataactgctaaaacttcgccaaccatctcaggatcaagagcagaagttggttcatccatcaacaatatttccggctccaaagccaaagctctggcaatagccacacgctgcttctgacctccggaaagctgatgcggctttgcattgatatagcttgccataccaacatgttccagatatttcatggcaattgcttttgcttcttcagactttttccccagtaccttaacctgacctacaacacaattttccaaaacagtcatattgttaaacaaattaaattgttgaaaaaccatgcctactttagtacggtataagggaagattcttaaaacattccaaaacattttcaccgcggtagctgataactccgtcagttggttgttccaaataattgacgcaacggattaatgttgatttaccactgcctgaaggtccaataacacaaactacatcacccttgtgcacatcaaaatcaataccttttaatatctcacgttctccaaaattctttttcaacccttggacggataataacaattctttactttgttcagcagtcattaataattaccgtcctttctctttttaccggccacattaacaggaaaatgaccacatggatcctgcatgggatcaaaagacaccagttgataatccttaggtccatccattttcccttcccaccagcgcaaaagtcttgaagcggtaaaagtcataataaaataaataacgcaggtaatgaaaaatatttcaaagtacctgtaatatacgcctgctgccgattttgaagcaaaatacagctctgtgacagaaattacattcaaaaccgatgtatccttaatattgatgatcagattattaccgatctgaggcatgatattacgcagggcctgcggcagaattacacagcgcatcgtctgaaaatgatccatgccgatagccacagcagcttcgcgctgacccggatcgatcgattcaataccgccgcgtacagtttccgccatatatgcgcccgtattgatagacacaactaaaaaaccggcaaacattggtgacatatcaatgttaaacatactcatagcaccataatatactaccatagcctgtacgatcatcggcgtacctcggaaaagttctacataagcattcaagaccaattgagtcacttttacaagagcctttttggcagcacttgcctttggatcctcgggaatagtctggataatacctacaacaagaccgattacgcaaccgatcagagtgccgacaatagccaaaagtaaggtcacacaagcgccttttaacagaacatcaccatattgatgcagtaaaaaagtcacccatccaaaaaatgactcaggcattgttgtcataagttcctccacctaacataattaattgataaaacactgttatttattatagcacagatatcccttaattcgcaaaagaataatacggtaaaaaaggaaaataagggacggcataattgccgtccctttaggcataaccggtaactattattgagctaaaggttgttttttaatagcttcgtccatcattttatcaaaatcagcagcagtcattttttccaaaacagcatccattgccttaacaagctctgtattgccttttttcacagcgataccaatttcaacatcttcacgagaagttttgaagccttttccttcttcaaagttcaagacagtcaattccggattagcaaaagcggcagcttttgcagtagggatatcagtaacgatcagattgcattttccggaagtcaatgcaacaatcataccaggtaccgtatcaatagccggcaatttttttacatcgggaacttgatcaatctggtcataccagattgtattaagctgagaagttgctacggaaccttttaaatcagcgacgctttgagccttagcctgctcggaatctttttttaccagagcaactaccgttgcatagtaatatggttttgtaaaatctacagtttctttacgtttagaggtaatagacatgcctgcaatagcggcgtcaatcttaccgctgacaactgctggagccagaccatcccattcgattttatggatttccagatcagcacccatagaatcagccagcttcttagccatcattacgtcgtaaccataagcatactcattgctgcctgcaatttttacagcaccgccgtcagctttggtctgagaccagttgtaaggagcataagcgcattccataccaaccttcaatacttttttgtcagattttttctctccgccgcaaccagcagtaaaagcaactgcagccatcagcatagtacatacagcagctgtaactaattttttcaaattcattcttctaacacgcctttccatcaaataaattatgtgttaattttacagttctatgcgcaagaagtcaatataaatcagcatgtatacaatgcacataacattttatcagctttatagaacttatttcacatagttgttcatattattatctttcaaaataacgtcatgagcaccgccttcaaccagcgaagttgaagaaaccaaggtcatttttgcgtttttcttaagatcgtccaagttaagagcgccgcagttacacatagtagaacgcaccttgctcaaagtaagcgttacattatcttttaacgtaccggcataaggaacataagaatcaacaccttcttcaaaagaaagcttagatgcaccgcccatatcataacgctgccagttacgggcacgattcgatccttcaccccagtattctttcatataattaccgttgatatttactttattcgtcgggctctcatcaaaccgggcaaaataacggccaagcattaaaaagtcagcacccattgccaatgccagagtcatatgataatcataaacaataccgccgtcagaacagataggaacataaattcccgtttctttataatattcgtcacgagctttagcaacttctatcaaagccgttgcctgaccgcgacctatacccttttgttcgcgggtaatacagatagaaccgccgccgataccaaccttcacaaaatcagcaccggcctcggccaaatagcggaagccttctgcatctacaacgttgccagcgcccacttttactgtatctccataatgctcgcgaacccaatccaaagtcaatttctgccattcagaataaccctctgaagaatcaatgcaaagcacatcggcaccggcattaaccaaagccggtacacgttcagcatagtcgcgggtattaatgccagcccctactacgtgacgttttttactgtccaaaagctctaaaggatactctttatgagtagcataatctttacggaaaaccatatacaataaacggccttcatcatcaataataggcaatgtattcagtttattatcccaaatgatatcatttgcttcctgcagcgaagtctctttgccgccaacaatcatttcattgattggcgtcataaaagtgctgaccttcgtattcaaatccatacggctgacacgataatcacgactggtaacaatgccttccaatttgccgttcacagtgccgtcagaagtaaccgctaccgtagaatgacctgttttttctttcagagcaacgatatctgccaaagtgctgtctggtcggatattagaatcactgctgacaaaaccggcacgatgtgtttttacacgcgccaccatagcagcttcattttcaatagtctgggaaccataaataaaggatataccaccctctttggaaagcgctatcgccattttatcatcagaaacagactgcatgatagcagaaacgagaggaatattcaatgtaatcgctgattcttcaccttttttaaattttactaaaggagtacgtaaatcaacgttcgtcggtacacattcttttgaggaataaccaggaacaagcaggtattcactaaaagtatgagcgggttcatcataataaaatgccattgtattcatcttccttttctctaaattttatctggagcttgtaggctttttaagctgatttaagttatacaaaacgtcccagtgccaaagcattgggacgtcattattatttttttaatgcgcgccaggcaatatccttacgataatgggcatcagcaaagctgatttttcccgcagcttcataagccttatctttcgcctcacggatatttttcccaacggctgtgacaccaagcacacgaccgccagcagtaactatttggccatcagcacatttagttcctgcatggaaaacaacaacgtcttcccttgcagcagtctcttccaagccactgataggcaagccttgtttatagcttccagggtaaccacctgaagccataacaacacatacagcagctttgtcataccagccgatatcagcctgagctaaagtacctgtagcgcagcacagcattatttctgccaaatcaccatcaagaagcggcataataacctgtgtttcaggatctccaaaacggcagttaaattcaactactttaatgtcgtcgccgttaatcatcaaacctgcatataaacaaccctgatacggtcttccctctgccttcattgctgcaatagtcggctttaaaaccttttccacagccttcagccgcagaatatcagtcataacaggagcaggagcatatgttcccataccaccagtatttggcccttcatcattatcgtttatccttttatggtcctgtgctgcaatcatggaaacgatagtatcaccgtcagtaaacgccagtaaggatgcctcttcgccttccataaactcttctaaaaccacacgtgcgccggcaccgccaaatttaaggtctcccatcatatcgtcaacagcagcaaatgcttctgcttcagtcatagcaacaactacgcctttacctgctgccaaaccatccgccttaacaacaatcggagcgcctttttctttgatataagccttggctgtttctatatcctcgcatactttaaaaaaagctgtagggatcccgtatttttccatcagctgtttagaaaaagctttagaaccttccagctctgcagccgccttactgggcccaaacaatgccagacctcttgccttaaaaacatcggcaataccttcaacaagacttgcttccggaccaacaactgttaaatcaatacagttagcctcagcataatcagcaagtttttctaattcctgcaatggtaaatcaatacattcacatttatcaagcaaagcgataccaggatttcccggtgccgcataaatcgtttccacctgagggctttgcgccaacttccaggccagagcatgttcacgtccgccgccgccgattaataataaacgcattatttcatcaaccttttcatcttatttaccttcaaccaactgcttggtcaggtattcacagatcatagcatcatattcggaagtatggttaaaggcttctttggccaatgttttgcgtgttttgatgtctgcgtccccatactgctgcagcatagcaatcaggctggtataacgggctgggttagtaacaataattacatcacggaaatttttagcagaggcacgcaccattgccggaccgccaatatcaatattttctatcgcttctgcctctgtaacgtttggtttagcaattgtttctttaaagggatacaaattgacaaccactagatctatcggttttatatcatgtttttccaaagctgccatatgctcgggattactgcgtacagccaaaataccaccgtggatcttaggattcaaagttttaacacgaccatccataatttcagggaaaccagtcacatcgctaacataagttacaggtattccggcttctctgatagcagtcatcgttccgccggttgaaataatctctactccaatgtcatgtagaaattgggccaacttcacaataccggttttatcagatacactcaataacgctcttttgattctcattatttatcacctcatctcaaggatgcacgataacgcgccttccctgtatttccagcttgcctaacgcccacaaacgtaaagcctccggcatcgccttatgttcttcaactaaaattcgtgctgctaaagattcctctgtatcgtcatttaaaacaggcacaggtttctgtaatataatcggaccactatctgttccttcatcgacaaaatgtacagtacagccagcaatcttcacaccgtattccaaagcctgcccctgggcatcaaggcctggaaagcttggcaaaagtgccggatggatatttatgattttctgtgtccatttattaacaaaattcccgctcaatatccgcataaaaccggctaaaacaacaagttctgcaccatgagcgcgcaaagctgcatcaatcttgccttcaaactcttccttagaaacacattctttacgtggaattgctacagcagctattccagctttctctgcacgttccaaagcatatgcatcagccttatcactgataacaacagcaatttccaaaggtaaatagccgtcggctatcctgtccaatacggattgcagattgctgccgcgaccgctgaccaagacgccaattttacggctactcactgaaaacgccgcctttcataattgcttttttattaccggcaacaacatttcctaattcatagaaaggttcacctacagaagtaagatgactacgcacggcatccgcttcttcaggagcaactactaaaaccatacctacccccatattgaacgtacggtacatttctgcccagggcacattgccccactcctgcaattttttgaaaaccacaggtatttcccaagctgcggcattgatttccgcatcacatttttctggcaggatacgtggaatattatcgtagaaaccgccaccagtaatatgcaccataccgtgaagatcaaatttttcgatcagaggcagacaggatttaggatagagccgtgttggtgtcagcagtttttcacctaaactgcagccaaattccggaatctcagtactcatatcataattcatcacttcgaaacaaattttacgaaccaaagaaaaaccattggaatgcacgccactggaaggcaatcctaaaagtacatcaccaggagcaactttatccccggtaatcattttacttttttcaacaacacctacacaaaaacccgcaatatcatattcgccttgggaataaaaacccgccatttcagcagtttcaccgccaatcaacgcgcaacccgattcttgacaggcttttgcgacaccctgcactatatttgcaactttctccgcatcaactttatcgacagcaatataatcaaggaaaaacagaggttcagcaccttgcactaaaatatcattaacacacattgcaacggcatcttgaccgatagtattatgcttatcggccataaacgccaattttaacttagtgccaactccatcagtcccggaaacaagaatcggttcctgatattttccagaattcagtgcaaacaaaccgccaaacccgcccaaatctccgataacctcaggacgataagtcgcacgaacactttctttcattaattcaacagcacgattaccagcatcaatatcaacacccgcatcggcataagtcatttgttttttgctttgctcgctcatggggacctcctaattatttgttctcaaaaatatatttcgaaccttgacggatagtttcttccgcattatcgggataacctgcattgaagcaagcataacacataccttcaggatccatactgctcaaagaacgttttaatccttccagcgaaatatagtgtagagaatcagcgccgatatactggcagatttcatcttctgtatgcgtagaagcaatcaattcctttcgcacagaagtatcaatgccataatagcaggggtccgttacaggaggggaactgatgcagacatgcacttcttttgcaccggcatccttaagtaatttgacgatcttaccactggtagtaccgcgaacgatagaatcatcaaccataacaacggacttgcctgcaacaacactctttactggatttaattttaagcgaacagcatttaaacgctgcttttgcgttggctgaataaaagtacggccaacataacgatttttcgttaatccttccataaaaggtacacctgactctaagctataaccaacagctgccgcagtaccggagtcaggtacagaaataacaatatccggatggatctctttagtttcttttgccagctcacgccccatattgattcgtgcctgataaacacattgtttatcaataacgctgtccgtacgggcaaaataaacatattcaaaaatacagtgcgcacatttagacggcatctctttggaccacatcatactcttaggttcggcatagtcatcttcaaaaaccagcatttcacccggtttgacatcacgaataaattctgcgccaaccaaatcaaaagcacatgattcagaagccactacccaaccgccatcaagcttacccaaacataatggcctgaatccgtaaggatcacgcactgcaatcaatttatgatcagtcatgatcaaaatagcaaaagcacctttgatttcattaactgcttcagcaacacggtcttcaactttctctttccgcgagcgggcaatcaggctcaaaacaacctctgtgtcaacagtagtctgaaaaaccacaccatctctggtcaagcgagaccgcaattcggcagcattagtcaaattaccgttatgcgataaagccaagttaccgccgtcaaaataaacgcgcagcggttgagtattgtatgccatactggaaccagttgttgaatagcgtacatgtccgatagctatgtgtccagtaagatcaccgacaccgtctttataaacgtcagctaccagacccatgccttttttgacctgcatattgctgccatcagtagtaacaataccggtactttcctgcccacgatgctgcaatgcatacaatccccaataagtattgagtgcaacatcgtctttatgcgaataaataccaaaaacaccgcattcttcatgtaatttgtctaattcaaagtcaataccaggcacagttaattctcctttttcaaccatttcttacttaccctcagcacgcatttttgcgagcttctcacctttggcttttacctcttcctgcatctgcaaacgattttctgctaatttagtaaccagttcagggtattttacagacagtatctgtactgcaaacaaagcagcatttttagcgccattaatagccatcgtcgctacaggaatacctgcaggcatttgcacaaagcttaaaagcgcatccataccattcaaaggtgtggcattgatgggaataccgattacaggcactgtagtgtaagcagcaataacaccgcctaaatgggcagcagcaccggcagcggcaataatagcctctacgccgcgattgcgtgcgccagcagcaaattcatgtaccacatccggagtacggtgtgccgaagcaactatcacctctacctctactccaaattctttcagagttttttctgccggctcaagaataggccagtcagaattacttcccataataatagcaactttcatgcttctgcctcctaaagtatctgtgagaaaaaataaaacccaagtcgaaatctttcaactgctatatgcgcaactaaaaatccttctcgggtcatctctaccatcttatttattattataattttaccaatagcttccctatgtgtcaattataatgtgaactttttaacaaaaaatcatcctatcgttcgcttttttcaaaaattaatgaaattctgttgtttaatttgataaaaacctctactcctttatgataaggagtagaggttttacttaaaagtctgtaattttactgttggtcgctattagtagtgttatatttgattttgatatcacgataacgattcataccggtaccagccggaataagtttaccaatgataacattttctttaagtcctaaaagcggatcaactttgcctttgattgcggcatctgtcagcacgcgtgtagtttcctggaaggatgcagcagacaggaaagaatcagtagccagagatgctttggtaataccaagcagcaccggacgtccttctgcaggctgtaagcctttttccagcatttccgcattctgtgcttcaaattctgcaacatcgatatattcacccggcagcatataagtatcgccagcttcttcgatgcggattttacgcatcatttggcgaaccataacttcgatatgcttatcgttaatctcaacaccctgagatttataaactcccaatacctgttgaaccagataacgctgagtagcacgcacaccactgatacgtaaaatatcatgcggattgagtgacccttcagtcagacgatcgccgacagcaattaccatgccctcggtaacagcgagtttagacccataaggaatagtataaatctgctccccatcttcactggtaacagttactttacggatgccgttttcttcaccaatgtgtacagtaccagcattttcagtaagtaaaccaggatgtttcggtttacgggcttcaaacagctcttcaacacggggtaagccctgagtgatatcgtcacctgctacgccaccggtgtggaacgtacgcatagtgagctgagtaccaggttcaccaatggattgagcagcaatagtaccaacagcttcgccaacttcaacttttctacctgtagccagattacggccataacatttacggcaaacgccgactttggctttgcaattgagtacggaacggatttttactttttcacgcaacgaagaaatctgatccgccatatcttcagtaacataatcattgatatggtaacagatattaccatcattatccaaaatatcttcagcaagataacgtcctacgatacggtcgcgcaaagattcaataacagtttgtttatttttaccttcggtaatcgattcaatctcaataccttcgattgcattattgcgaactttaacatcgcggacagtaccattagccaaaatagcgtcgataattgcttcgtcataagtcgcaccggcttcgatcagcactgtaccatcagctgccacaacatcttcagcaacttctcggccatcaaaatgatgcatcattgcttctttcaatacagcattagattgttcatcgctgatattaatctgaattgtctcggtttcttctccgctcatatcgtcagtagcatataaaactacttccatgacctttgctgcagctaatttgttatacaaatcttctgtcacaatcgtatcagcttcgacaattaactcacctgtagcaggatcagtaataccagctgccaaattacgtccaataacaatctcgcgcagtttattctgactggaacccaaggttgctttgcaaagacgtccgcgctcttttacaagattgataccaacgatatcacagtcatcttcacgtacgatcacatcctgagcaacgtcaaccaaacgacgggtcagataaccggagtcagcagtacgcaatgctgtatcagccaaacctttacgagcaccatgagttgaaatgaagtattccaaaacagtcaggccttcacggaaattagccttgatcggtcggtcaatgatacgaccggaaggatctgccatcaaaccacgcataccagccagctgacggatctgctgcgtattaccgcgggcaccagaattagccatcatatacacagagttaaacggatccattgtggacgacataagcttattggttacatcatcagtagccttgccccaaagttcgataaccttgcgataacgttcgtcctcactcatcaaaccacgacggaacatacgctcagttttatcgatttctttttccgtagcagccaaaatctctgccttttcaggcggaattttgatatcggaaacagcaatggaaatacctgctttacaagcattgtcataacccattttcttaacaacgtcaaggatttcagccgtacgcaaattgccatacaatttatgtgccttagcaacaagacgtcccaattcttttttatcaagcagtttattcaaatgccatactttaacttttttaccagcttcgtttacttcatcttctaaatggaagtaccgcatttcaaccggcagttcttcattaagtatcgcattgccaacagtagtcgttaccagacttaccccttcgctggaaggttcttcataaatatccttattcgggatataaatcttaatgcgtgcctgcagttcaacttcaccgtggaaataagccagcaaagcttcattaaagctgctgaaacgcatcccttcgcctttagcgccttctttgatgattgtcaggtaatatgaacctaaaaccatatcctgcgaaggtacagcaacaggttttccgtctttcggggccagaatattattaaccgaaagcatcagcatcctggcctcggcctgtgcttcagcagacagcggcagatggactgccatttggtcaccgtcaaagtcggcattgtatgcagtacataccagaggatgcagtttgattgcacgcccttcagacaagatcggctcaaaagcctggataccaagcctatgcaaagtcggtgcacggttcaaaagcacaggatgttctttgattacatcttccaaaacatcccaaacagcagtagtagcacgttctaccatgcgttttgcacttttgatattagtagcctgaccgctgttaaccaagcgtttcatgacaaaaggcttaaacaattccagcgccatttctttaggcagaccacattgatgcattttcaattcaggccctactacaataaccgaacgaccggaatagtcaacacgtttacctaacaggttctgacggaaacgaccttgtttacctttcagcatatcagaaagagattttaaaggacgattaccaggacctgttactgggcggccacggcgtccgttgtcaatcaaagcatcaacagcttcctgaagcatacgtttttcattacgtacgatgatatcaggagcattgagttcaagcaatctttttaaccgattattacggttgatgacacgacgatataaatcattaaggtcagaagtcgcaaaacgcccaccgtctaattgtaccataggacgcagttccggaggaattacaggaacaacatccaaaatcatccattcagggcgattgcctgatttaaggaaagcttcacagacttctaaacggcgtacggcacgaatttttctttgtccgcttacctctttcaattcagcacgcagttccgcagttaatgcagataaatcgatctcttccagcagtgctttgatagcagtagcgcccataccaactttaaaaccgctgccatatttgtcgcgggcttcgatatattcgccttcgctcaacaactgtttttttaccaaaggagtatcaccggcatcaagtacgatgtaattagcaaaatacagtactttttccagcgacctgggcgaaatatcaagaatcaatcccatccggctcgggatacccttaaagtaccagatatgagaaacaggtgcagccagttcgatatgacccatacggtcacgacgaactttggagcgggtaacttcaacgccgcacttatcgcagacgatacctttataacgaattcttttgtatttaccgcaatggcattcccagtctttggtaggtccaaatattctttcacagaacaaaccgtcgcgttccggtttcaaagttctgtagttaatagtttccggtttctttacttcgccataggaccaagttctgatttgttccggtgaagccagaccgatacgcatagactcaaaattatttacatccaacaagaatcgatcgctcccttctattcaatatcgtcggagttatttacatctccgtccaactcatctttagcttccatgttaaagttgccaatatctgcaactaaatcaaattccgcatcttcaacgctattttcatcaacagtatattcatctgtttcaacagcagcaacagccggaatctcgccgtcgatgttcaaatcgaggtcacgtgcagtttcagtgacatcatcatcactgtcgcgcatggaaatctcttcttcgtcttcattgagcaccttaatatcgagaccgatactttgcagctctttgataagaactttaaaggattcgggcacaccaggttcaggaacgttctcacccttaacaatagcttcataagtttttacacggcccacaacatcgtcagatttgactgtgagaatttcctgcagagtataagcggcaccataagcttccagggcccaaacctccatctcaccaaaacgttgcccgccaaactgagctttaccaccaagaggctgttgggtaaccaaagagtacggaccggtagaacgggcatgtatcttgtcgtcaaccaagtgatgcaacttcagcatatatacgcagccaactgtaaccttgttatcaaaaggttcacctgtacgaccgtcatacaaccttgttttaccactcggatctactccagccaaatcaagagtagcattcatatcttcttcatgagcaccgtcaaaaacaggtacggacatcttcattgctttgatgctttcttcaccgaacttatcgatttctacagtttcaggcattccatatttttcaacatcataaccggctttctcaaaacgatcagccaaaccttcagcaccggcttcaatctgcatgcctagagcgcgtgcagcccagcctaaatgagtttccaaaatctgtccgatattcatacgggaaggtacgcccaaaggattcaatacgatttgaaccggctctccgcttggcagaaacggcatatcttcacgcggcatgatgcgggaaactacacccttattaccatggcggcctgccatcttatcgccttcagaaatcttacgtttttgcgcgatatgcacacgaacttgttcatttacaccaggcggcagctcatcgccgttttcacgggtaaatactttaacgctgacaattttaccagcttcgccatgtggcacacgcagcgagctatcacgaacttcgcgggctttttcaccaaagatggctctcaacaaacgttcttctgcagtcagctcagtttcgcctttcggcgtaaccttaccaacaaggatatcgccaggacgtacttctgctccgatacggataatcccgcgttcatcaagatctttcaatgcttcttcggaaacgttgggaatatcacgggtaatttcttcctggccaagcttagtatcacgggcatcacaatcatattcttcgatatggatagatgtaaagatatccgctttgaccagatcttcgctcagcaaaatagcatcctcgtagttatagccttcccacggcatataagcaacaattacattgtgtccaagcgccaattcaccatgatcagtcgccgggccatctgccagcacctgcttctcaactactttatcgcctttattgacgataggacgctgattgacacaagttccctgattagaacgcttaaattttaaaagttcataaacatcaacactgccatcttccgcacgtacacggatttcattgccaacaacacgctcaacaatacccgcacgtttagcaagtacgcatacgccagagtcaacggcgaccttatattccataccagtaccaacaacaggcgactgcgtacataaaagcggcacagcctgacgctgcatattagcacccatcaatgcgcggttcgcatcgtcgttttccaagaacggtatcagcgccgtagcaatagatacaacctgtttcggagaaacgtccatatagtcaacctgattcggaggcaaagacaaaacttcattcagataacgtgccgtaacacgttcacccaagaaataaccgttttcatcaagcggttcattggcctgggcacaaatatattcgtcctcttcatcagccgtcagataaacgatttcgtcagtaacacgtccctcttctttatcaaccttacgatatggcgtttccataaaaccatatttattgataatagcaaaggtagacaaagaacctataagtccaatattaggaccttcaggcgtttcgataggacacatacgaccataatgagaatgatgtacgtcacgtacttcataaccggcgcgttcgcggctcaaaccaccaggaccaagtgcagacagacgccttttatgtgttaactcagctaacgggttattctgatccataaactgagacaactgactgctgccaaagaattctttaattgccgcaacaacaggacgaatattaatcaaagcctgcggcgtgattacatctacgtcttggatagtcatgcgctctttaacaacacgttccatacgggctaaaccgatccggaattgattttgtaataattctccgacactacgtacacgacggttacccaaatggtcaatatcgtcgcctgtacctaaaccatccatcaggttgagcagataaccaaaagatgccaaaacgtcttctacggttacagtacggtgtttttcgggaatatcagcagtacagattaatttcagtacttgttcttttacgcggatgaaaacctctttcaatcctacgccgctgaaaatttcactttgctcgatgatatcaatagctttatcatcaattctagtacctgccggcagaataatttctccggtagaagtatcaacaagcggtgcgtcaagaaccttatccagcaaacgacggcgccagcccaattttttattgagtttataacgacctacactggcaagatcatagcgcttattatcaaaaaatgtagcttcaatcaactgcgtagaattttccaaagtaggcggttcgcctggacgcagtttcttataaatctcaattaaagcttcttcgcgattggtagttgcatcacgttccaaagttgccaaaacggaaggatgctcaccgaacaatgccaaaatctcagcattgctggataaacccaaagcacgcagtaaaaccgtagcaggtaatttcctggtgcgatctacacgagcataaataacatcattaacatctgtttcaaattcaatccaggcaccacggtttggaataacagtagtaccatacatttttttaccactgggatccatggatacattgtagtatacgcctggagaacgaaccaactggctgacaataacacgttcagcaccgttgataataaaagtaccggtttcagtcatcagtggaaaatcacccatgaaaactttagattctttgatctcgccggtgtctttgtaaagcaagcgaacgtttacgtttaatggtgccgagtaagaagcatcacgctctttacattcttcaacgctatatttaggatcccctaacgtaaagccctcaaacgaaagttctaaattacctgtaaaatccttgatcggagaaatgtcatgaaaaatttcgcaaagaccttctcgcatgaaccactcatacgattttctttggatgtcaatcaaatgaggcattggtaatacttcattgattctggcataactgtaccgagtcctatcgcctacgggaaccggtttaaacatgtaatccctcaccccttcatattttgtcaggcaggccaaactcagcccgtttcacgaatgacaaaaaaagcaaggttccagattgtctcaaggaccttgcgtattgtcttcgatgaacgaacttcatctttaccgtatgagcagtacacgattcccaaccactgagccatcgtgaccgttatcaaaatacctgcaattcatttatttactgtagtttattatgatatcacaaagtttttctattgtcaatagcaagtaataaaataaaaaataagcttcctgcaaaacaggaagcttattaaagttctaattgaaattatttcaattctacggaagcgccagcttcttcaagtttagctttcaaagcgtcagcgtcagctttggagattttttctttaacagctttaggagcgccgtcaacgatttcttttgcttctttcaggccaagaccagttgcttcacgaacaactttgataacgttgattttgccagcgccagcggaagtcaaaactacgtcaaattcagttttttcttcagcagcagcagcgccgccagcagcaggagcagcagctacagctacaggagcagcagcggatacgccgaatttttcttccagagcttttaccaattcggaaagttcgagtacggtcatagattcaatagcttcgatgatttgttctttgttcattatatatacctccataaattcaaatgttttattttttgttttaacttgcttggttagacacactgcttatgcggactctttttgctgacgaacagcctcgagtgcataaacaacgttgcggatagtaccttgcagtacattgacaaaaccgctgattggagcattcatgctgcccagcatttttgcaatgaggacttctttcggcggaagttctgccaaagctttaattgcagcttcgtcgataacttgaccgtcgagtacaccagctttgatagtcagagctttgttttcttttgcgaaatcgcaaataatttttgctacagcaacgggatcttcaggagcaactgcaattgcagtgtttttctccaatacaggctctaaaccttcgatgccggcttcatttgcagcaatacgcagcattgtattttttacaacgccatatttgacgccagcttcgcgcattttgcggcgaaatgctgtatcctgagctacggtcaaaccgcaaaaatcaaccagaatagtgcacttggaagctgtcagcaattctttgatctcagcaactttagctgctttttcaggtctaataactgccatgcatcacacctccttcttaaaaaatgattttataaaatcaaaaagacctctcggcctaagccggaggtcgcgaaggtctatcttcatcgtctccagcctcggcaggtgtatttctacttatgcgttaccgcacctgctgtctatggcccgattatcttctgatttataaagttgttactacatcaaaaatcttatttgtcgctgttagctttcaaaacgtcaatttttacgccagggcccatagtggtagatacagttatagatttaatatactgaccttttgcaccagacggttttactttgatcagagtatcgaccaaagtgatgtagttttccaacagttgttgttcggtaaaagaagccttaccaataggagcttgaacattaccagctttatcagtacgatattcgattttaccggctttaatttcgttgatagcacgtgttacatccatagtaactgtaccaaccttcgggttaggcatcaagcctttaggaccgaggattttacccaaacggcctacaacacccatcatatcaggagttgcaacgcagacttcgaaatcagtccagccgccttggattttagcaaccaattcttcgccgcctacatagtcagcaccagctgcttctgcttcctgaactttagcgcctttagcaaatactaaaacagatttagatttgccagtgccatgaggaagaactagagcaccacgaacttgttggtcagcgtatttaggatttacgcctaatttgaaagcaacttctacagtgctgtcaaatttagtaacagaagtttttttaactaattctactgcttctttaggagcatagaatttgtcggcttcgataagtttcaaagcgtcttgatattttttaccaaattttgtcattaaactttcctccttgtggtacaaacggataattcctcccacataaatagtcgactataaatcagtcaacgatggttatacccatgctgcgcgcagtaccttctaccattctcatagcagcttcgatatcagcagcattcaggtcagccattttagcttcagcgatttcgcgaactttatcgcggctcaattgagcaactttctttttgtttggttcgccggaacctttttccagaccagcagcttttttcagcaaaaccggtgccggaggagtttttgtaatgaaagtaaaggaacgatcttcaaatacggtaatttctaccggaatgatcaaacctgcttgttgagcagtacgttcattgaactccttaacaaaagccatgatgtttacaccagcttggccaagtgcagggcctacaggaggagccggagtagctttaccagccggtacctgtaattttaccatttttacgacttttttcggcatttattacacctccttattattcagcttcttcaacctgagtaaaatcaatctcaacaggtgtttcgcgtccgaacatgctaaccagaactttcagtttaccacgttcttcattgatttcagaaacgctgccgacacagccggcaaacggaccagttttcaaacgaaccatctgttgtaattgtaaatcaattttggggcggctttcttctacgcccatggagcgcatgatctgtttgacttcttcatcagtcaaaggaatcggtttagtaccggaaccgacaaagccggtcacacccggtgtattacgcacagcataccaagagcgatcatttacaatcatctctacaagcacataaccaggaaaaacctttctctggacgctgcgttttttaccgtcttttacttcaacctcattttccataggtatcacaatacggaaaatttcattttccatacccaaggaatgaactttacgttccagatttgcgcttaccttattctcataaccggaataagtgtggattacataccaacgtttttctgattccatattaatgatagggaagcttccctttcctccttacgcagccttattgcaaaatcaagcgaaaaacaacattgaagaaggaatcaatgacccaaatcaatgctgcacaaataacaaccgcaatcaaaaccactgcagtattagcaataagctcttgtttggtaggccaggttacttttttcagttctactttagtttcacgcataaagcgtgtaataccgcctgcgttcttcacacccgtagtttccggaacggccattttttcacatccttgcttgaatacctgatactaaatcacacgttaacaaaaattatttagtttctttatgtaaagtgtgttttttgcagaacttgcaatatttattcagttcgatacgatcaggatcgttctttttgtttttgttggtttgatagttgcgttgtttgcactcagtgcaagccatggtaactaaactgcgcatatttaacacctctcttactcatagattaccaatcacaaaatttcactaatatagagtaccacagttaacactctatgtcaacaaactttcaaaaatatgctaagaccggtctatgtcggaccggtcttagcagaaaaccaagttatcgctctcttacttattcgttgatagcagcaacaacgccggcgccaacagtacggccgccttcgcgaattgcaaaacgcagaccaggctcgattgcgatcggagtgatcagctctacgtccatggttacgttatcgccaggcattaccatctcaataccttccggtaattcagttacgccggttacgtctgttgttctgaaatagaactgcggacgatagccgttgaagaacggtgtatgacggccgccttcttctttcgtcagtacatatacttctgctttgaattttgtgtgcggatggatgctgccgggttttgcaagtacttgaccgcgttcgatatctttacggtctacaccacgcagcaggcagccgatgttgtctcctgctactgcttcgtccagtaatttacggaacatttctacgcccgttactactgttgcttttttctcttctgtcattcctacgatctcaatattgtcgcctactttgatgataccacgttctacacggcctgttgctactgtgccacggccggtaattgtgaatacgtcttctacaggcatcaggaacggtttgtcagttgcgcgttccggaataggaatgtatgcgtctactgcgtccatcagttccatgatttttgcttcgtatgctgcgtcgccttcaagtgctttcagtgcagaccctactactacaggaatgtcgtcgccggggaagtcgtagctggagagcagttcacgtacttccatttctactaattcgatcagttccggatcgtctaccatatctgctttattcaggaacactaccattgcaggtacgcctacttgacgagcaagaaggatgtgctcacgagtttgcggcatcgggccgtctgctgcggatactacgaggatcgctccgtccatttgtgctgcgccggtgatcatgttttttacatagtcggcatggcccgggcagtctacgtgtgcgtagtggcgggttgctgtttcatattctacgtgggaagtgttgatggtgattccgcgttctctttcttcaggtgctttatcgatcatggagtaatccatgaattctgcgccgcctttagaagccaatactttggtgattgctgcggtcagggttgttttaccatggtctacgtgaccgatggtgccgatattagcatgcggttttgttctttcatatttttgctttgccatttatttttcctcccttaaattaggttttactttatattaggcttgagtgcctttgtttttggcaatgatagcctcggcaatgtttctcggtacatcttcgtaatggtcaacttccatagagtagttgcctcggccttgagttttagaacgcaggtcggtagcataaccaaacatttcggaaagcggaacaaatgcgttgataacttgagcgccattgcgagcttccataccttcgatacgaccacggcgagagttcaaatcgccgataacatcgcccatgtagtcctcaggaacagtaacttctactttcatataaggttcaaggataaccgggtcggctttagtagcgccagaacggaagcccatagaacctgcaattttgaaggccatttcagaagaatcgacttcatggtaagaaccatcataaacggtaactttgatatcaaccattgggtaaccggcaactacgccgttttccatagcttccttaacaccgttttcgatcggtccgatgtattctttcggaatagcaccgccaacaactttgttctcaaacaagaagccttcacctgcttcacgaggtgaaatttccaaccagcagtgaccatattggcctttaccaccggactgacgtacaaatttaccttcggacttaacagatttgcggatagtttcacgataagcaacctgcggattaccaacagtacagcctactttgaattcacgcagcaaacggtcaacaataatgtccaaatgcaactcgcccatgccagaaatgatggtttgtgctgtttccggatcagtatgaacacggaaagtcggatcttcttctgccagtttttgaagggcaatgcccatcttttcctggtcagctttagttttaggttcaaccgcaacggagattaccggatcagggaataccatggattccagaatgatcggagctttttcgtcgcagagagtatcgccggtagtggtatctttcaaacctactgctgctgcaatatcaccggaataaaccatgtcgatttcttcacgatggttggcatgcatttgcaggatacggccaatacgctctctcttacctttggtagagttgtaaacgtaagaaccggagccgagagtaccggagtacacacggaagaaagcaagtttaccaacaaacgggtcagtcataattttgaaagccagtgcagagaacggctcgctgtcgcacgacggacgttcgtcttcttcgccggtttcaggatttacgcctttgatatgaggaatatcagtaggagcaggcatgaacgctacaacagcatccagcaaaggctgtacgcctttgtttttgtaagaagaaccgcagcagacaggagtcattttgcaagcaatagtttgtttgcggataccagccataacttcttcttccgtcagctcttcgccttccagatatttcatcatcagctcgtcatcgctttcagctacagcttccattaaagcttgacggtattcgttggctttttcaaccatatcggccggaatatcaacaaattcttcttctttacccagagcgtcgctgtaaacgatagctttcattttgatcagatcgaccataccctggaaggtatcttcgaaaccaatcggtaattggataggtacagcattggcattcaaacgatctttcatcatttgtactacattgtagaagtcagcgccggtaatatccattttatttacatacgccatacgcggtacgccatatttgtcagcctgacgccatactgtttcagactgaggttcaacgccgcctttagcgcagaatactgcaacagaaccatcaagtacacgcagagaacgttcaacttctacagtgaagtcaacgtgacctggcgtatcaatgatgttgatgcggtgtccatcccattgacaggtggtagcagcagaagtaatagtaataccacgttcctgctcttgaaccatccagtccatggtagcgccgccatcatgggtctcaccgattttatgaaccctaccggtgtagaacagaatacgttcagtcgtagtagttttaccagcatcaatatgagccatgatgccgatgtttcttgttttttcaagcggaaattgtctgcccacttttttatcctcctcgttatagggatcgggccattaccagcggtaatgtgcaaacgctttgtttgcttcagccatcttgtgggtatcttcgcgttttttcacagcagcgccggtagcgtttgctgcgtccatgatctcaccagcaacacgttcgcacatggttctttcaccacgcaaacgggagtagttgaccagccagcgaataccaagggtggtcttacggtctgcacggacttcaaccggaacctggtagttagcaccaccaacgcggcgagcacgtacttctaaaagcggcataacgtttttcatagctgcatcgaatacttcgagaggatccttaccagttttagcacgaaccagatcgaaagcatcatatacaatgcgttcagcaacgccttttttaccgtcaagcataatcttattaataaatcttgtcaaaagttttgaaccgtatacaggatccggcaaaacgtctctttttgttacagggccttttctcggcatgtgtttccctccttatggattatcaattcgttgtgtagacttgattactttttagctgctttagcacgtttagcaccgtatttagaacgggcttgattgcggttagcaacgcctgcagtgtcaagtgcaccacgaatgatatggtaacgcacaccaggaagatctttaactcttccgcctctaatcaggacaacgctatgttcctgcagattgtggccgataccagggatgtaagcagtaacttcgataccgttagtcaaacgtacacgagctactttacgaagagcagagttaggctttttaggggttgtagtgtaaaccctagtgcaaactccacgtttttgcgggcattctttcaatgccggggcagtggattttacagtcaaaacttctctgcctttgcgaaccaattgattaattgtaggcatatcggcacctccttccgaataaatagattttaatgattataaaaatccttcagcaaagcttccagatccctatcaacctttgagtatcgcggctgtcgctgcaccgacatggattccgcaggctttaccaagttcttgcattgtcgctactttttctacattcacccgagcttcagcgcaggcatcaagcagtggctgcacaacccggacatctgcgtcatcagctatataaaccgtctttgcagtgcctttttgaatcgctttagcggtttgcttgttcccgacaactcgcttcgttgcttgctttaacaactctactgtcatcacaaaccctccttgtaaaagcgcatagctatcccgagatacttacatattgtaacactgccacttggctgtgtcaatactttttcttgatttttttacaagcgcaaacccgcattaaaccgtgttttttgtattacacggaccctagcgtttcttttgcgtaactttgtaatatgttttacatgttttcttttgtttttgtaaacttttattgtaactatttacgctttcggcggatatttttcatctaatatttcctggtttttctaaaattttattacccactaccaaaagaaaacgaaaaacctcaaattttttcaaatttgaggttaatttaagtatttattagcgttctataccactcacatatacttcaaataacttaaatacacattaaaaccacgatagttattatcactgctagtaccagttacagcgccatccttcattctgaacgtttcaatatccaacgacagtttctctgagcgctctttaaaatattgatcaaaaccaatcccgaaagtcgtctttctgcgttgattagttgaaatattcgtcaacggatcatagttttcaccgctgctatttagccaatctaccaacaaacgtatccgtctgttatctgggatatcctttgaccactgcaatccataattcctgccacgtctagtttcgttcattcgatcaaaagtagcgtaacgcaaaggatcttcttgagtatgccaatagtacgcagtaaaaaactgagtattatcaggcgcataattgaaggtcaactccggcttaaattgatggccagaagtatattccaaagtattttctcgggttctttcataagaagtatgggaaagccctgctaaaaattgaaattttttgttcaagtgttgccaacgcatttccttaacccaagcatttcccggttctacccacatactgggcgtgaggtcgtatctacctcctaaagtgtaataagttccgaaaataaaggtgtttttatcgtcacgattataataataccaaatagccggtgtaaaatttaatccttctccaaaacgtgctttctcaaccagatcttcatccataacaggatcaaattcatgcaacgcatctttacctgttggcagatttaccgctaaagaaaaaaccattacatcattctttttagcttttttatgaaacgcaacatttaatgtagtatcagtcagacaatttaccttaccattatcattgctcctattatcagagctgataaatccggttgctaacccatactcccaaggcccggccacaatattataatagaaaggctgataaaattgatgtcctttatttcctttatcatcacgccaagaataatatttgctttctgtaccaaaactgctgctcttacgatcagctatgtcataaccacgctcatactcttttaataaattctgcacatactccaaatcatgtttcagcacttctaatcgggcctctttatcagcttcttccaacgcagggtcttccgctatattttcattattcatttttaatattaaagcgtctatcgtctggttaagagccactatcgtagtatctaaatcattaagctcactactcagcagttcttctttatggaccaacccttcatatataccgtcattataaattatatcttggtaggcaaaataacctttgcggccttccccataaacttcaacgattttattcaactcataatttttgctttcgatgtccgttttccgttgttgtatctcctgtaacctgttctcttttctattatgctcaaagtttgcattggccaactgtttacgcaaactatgcagttgctgcctcaaagtgttattataaacctctacttccacgtcagtattttctagcgcagctatttcctgctctattttttcaacgcctgcttttgtttctgcggtcgcaaaggctttcttctgctgctcctgtgccgaatactgaagcatatctgcaacatctctaacattacttggcaacgttacaccagcccagcaaacattagccgcaataagtccgcaaaaagcagttgaagtcgaaactattaacttatttttcatttcgcatccatccccatcttcttttttactaatctgcaaaaaacagcttgttctgaaggtaggtttttccatgttacacttggatagcgttctaaaaacttatcccaaataaccgacttaccatactcgtctaaaacatcataataaatcaaaaatatctgcgcataagaatcaggataaaaaattccccaatttgatattctaccatcagcttcatcactccagctaaaatcgcctgttgatgtatttagtaaaacattgaaaatagcatttttaatattatcggcaatgttttgataatattcatagtttatttttttgtctgccttttgcgccaaatataaaaaactgttaatcccgccataagcttcacaattatccatcaaatatttcaccgggtagtctggcatagcaatagttagtccatccacttgctgcaaataggaaattgtgtatgccatatcttctatttgttgccagtatttcttaatcaaacttatatcaccagtctgctcacagtatttgttcaacaatactaaaaacaaccccgaataaccatctatcgaatcatattgtggtaagactttctccttatctccatacaaaataacatcataaatagttccgctcataccatttttatcattattattaatacgtttcagataccattccaaaaaagcttttacatcctttcgatgatcagtattatctaaatcatctaaggcatataggccaacctcataaggagttataaacacttcatatggcatcgttctataacgcgaagcaataattctgacaggatggttactgttatcatatgcaaatgcaacatttaaacctgatagaacaaatacgctacatacgagcaaaatgtatttccaattctttcttatcataattttttaccgttagataataatagttattatcttcctccagcttaagataggggctcttttcgacactcaatccttttttaggcaccgctattgttatatcttccagtccatcaggattactcagggcaactgttaacccagtatcatttttaaaggagtatttcgttttcagcatcttttgcaaaaatctggcagcatcagtcatcgtcataacagcaaccgaacctttttgctcttcctcatccagataatctaaaaactcaaaaaaagtttcttcatagacatctaaatcataaggatgcgaataaaataatcgtaaggttctattattacgcccgtagtcaggaatagattttaaccatgttaatactttttcattatcatagtgtcccaactcatgcatctcacccagtgaggcataaaggcctgacgggacaatcggaaaggccaaaaccttctctgataccatctcgccattatagaaagttctattaatactgctaccagaatctcctgtataataataaacttctacgcccatactatccaaagctttagtgttataaggctgaggaaaaactccaataggtgctgaatactcagtcaccttctttttggtaacgctctctatagcttcattgttcatacttatgtatttatcaatatcagcatcatgcaagcgccccgcttcaacgccatatccataccagttatgggcccagccgccatgtgatccgatccgcccatatggaataagctgcaatgctatatctctgcccggatattctgttaccataaaccccatttcatccccaggattatctctgaaatcaccggcagtaatatgaaatgacatcggaatattctttcttagcaacccctctctgatcattcttggcaagaaaaaccattctacgttagagtcgatatgccaatttataacaataccacctttaccatccggaacattaagtacatgtggaactttagcaaaattaaacaagacagttctaagaacagctcgcaacggcaaatcatcagcatcaatcttcatagcccccaaaggtaaattgacataaaacaaacttccctttcctatattacgtttaactatacctggtattttgcggccatcctcaactactgcccatgcgtatatatcttcatcacgaagcgcatgctgcacttcaatattgcgcatagaatatgataactttccataatgataaccactcaaagtaactccatcaacggtttttcccaaaggaatttgaaaaaaatcgcgtttctcttctgtcagaaactccagataaccatgatggaatgcctgccgcctatcttctttaaaagtggaataattaaaaccaagtagactgctaaaaacagcatttcccaaatgcttttctcttttattaaggcttccagcatcatacacaattaagctgtaaccaccttgttccaagtagtcatgcaaccacattgcaatttcttgcggcagattctcagcgaccctgtctggaaaaataacagctgggctattttttaaaatttcagcaggttgtaaatgctgcaagttgtacacatcaattattctataggcgacgccttcttcctgcagcacactttcatagccttttaataccttactatcggttttgacgatattactatttaccgccaggattactgttatttctttatcctgttctatatctttttcattattataagcataaaaagaataaactgaaattgctaaaaatattattagaacaaacacataaatctttttcatatagtttttccaactccctcagtaaggacaaacccatgtatcacgatccctcttccaaacacaatattttttcttactattacagacttaatttttcctttttcacccaacactacattgttccctaccttcagacatccctgcacaaaaaccgtgccagttattcggcagcagtttcctattacaagatccctttcgcaaaatacgttaccccaaatttttacattctcttctaaacacatatttttatatgcttttacacttccaataatcgttgctgaattgtggacgacgaattttttatgtgtaacaatattattaataaaaactgaattttcccttattttttctatatcataatctacatcattgtactcaggatatttttgtagctcactgctatcataatctttaacaaattcttcagttcctccaatttcaatgcttggggcaaataatcgtttaaaaatacagttatttccttttaacaccaatttagtttcgctgcttgcacttataccaaggtcacaattactctctactacaaggcacccctttgtatcaatccaacgaataatttttacaccttgatgaagataaccatcagaatcaatcgcaacagcccgtaattcgcacatttctcctgcttctaattttttaaatgcataaatttcttttgaagatgtcgatttaggcggtaaaatgatatcttcagaaaaaattgtgatcctatcttcaacaaaagcttgcggcttatctgcttgtcctaatattatcagttcttttttagataaatctatttctaaagtctgccctgctgataattccctgatctgtcctaaaaaaggttccaacaaatttctaaaggacaaaccaaaataacgcggatctttaacataatctttttttatataaagattatcgttatcctgtcctcgtttcatttctttatatccaggccagaaaggatatactatcattattaaaaataacaagcagcaaaaaattacaagcatcatgtaaatccacccggtttttcttttctaaaacgttctgtcttttgccatttagcctcgcgcctagtcaaaacatctactaacgcattaaaaaatcctttagttataaaccagagataaaaataaaaattaaaagccagataaggtagcaataatattctctctctagatccgtcaataacatttgcagtcccgacctggtaaaatggtgcaaaatttccaaatgtattataagcgcctaaaaacaacaatacccaccatccctctaaaatatccatctcatctaaaaagaatagtaaaatagagtcaattaatccaaaaaatagaatgactggcatcatataaatgaataacaaaaacattccatcaagtttttgccaaaaacttaaatacttgctttttaccagtttccatacatagcgaaacattacttcattatgtccacgcgaccatctggcgatctgacgggctcttatatgccacgcttcaggagcctcttcataacattcagcactattagcatacaatactttccagccagagcaaaaaagcctgtatgtaagctccgtatcctctgctaagatctttgtattgaaaccgtcagtacccatcattaaatcttttcgatagccccctacagttcctccatactgagggataagatttaagttgtaacgagcctgctgatcaacctgataaccgccggaacgttctaaatccagcaatctggttaaaaaattggctttcgtgttcacaggcacaacccgccccataacggcacctacttctgggtcaagaaaagccgtcgataaattttccaataagcctttccccggtaaataatcagcatcaaaaacaactatgatctccccctgtgccatttccattgctcgatttaaggctgcaggttttcctctttctccactgttacggtgtaaaggatgaatattcccataacgaactgcataatcttctagtatttctttcgtcccatcctccgaaaaatcattgattgggataacttcaaatttctctactggataattactttctaaaagcgcatctaaaacaccatgcgcgactttttcttcattatgcattggtatcaatactgttataaatggaagatcagaatcaataatatcctgataatacagcttttgttcacaatacattctattaaaggtaaaaataaaatgacggatggcgaataaaatcattacgatgacagtaaagatgaaataaaattttaaaaaagcgatcacatacggagtcattaccatcgccatacccccttattacgttttaatttatctgcggtactgctggcaagcaaactataaatgcaaactaaatacaaaaaatctataaatggtccgaaagaaaagaacagcgacgccatatacataagtgatactttagataaaatgaacataaaagtgatataacgaacaatgccaaagataaaagaataaacagcacaaaaagcaattgttatccaagacttaacaaagtttatcggcagcatgcaaaccgcaataccaataataatcggcacaaagaagtaaattcctacctgctgcttaatataaaggctcgaatactcggttgcatcatacgggaaatactcgggtataaacgtaaaaaagatagcagaacaaacatgtacccacaaactgatcgacaaaaaaatagtcaaaggccttgttttaactactgaagacagtaaaaacaaagaaatcaaggttataagcaaattcagccaaataaatactatcgatggaaaccgaccaggcaaggaaagataatatactggcccaaaccactttaaaaaatcagaactttctattgctagtacattttcatggaatatagggctcagaactttcattgtgaactgtgatataaataaagtaatttgaggataataaaataatactaataaacatagcggtattatactaagaaaaacacctaagaatacatttattttatccatttcaatatatctatatgttctgctatattgtatttgttttttcagtatttcttttttcatattttattccttttgttatttccaaattattatttgtattaattta

SEQ ID NO: 9982 - DNA, 48262 bp, Unknown
  gut microbiota DNA sequence
catttttcctccgaatctcttttgttttttataaaataggctttgacgccattttaccatattcgctgtctgcctgtaaactcctgcttggttttatgactataataaaaaaaaccccatcactgaggttttattttttattggtggcggcgcacggatttgaaccgcggacactccgggtatgaaccgaatgctctagccaactgagctacgccgccatatttatttggagctgatgaccaggattgaactggtgaccttatccttaccaaggatacgctctgccgactgagctacatcagcatcgcaaccaaataatcaaaatggttgcgggggctggacttgaaccaacgaccttcgggttatgagcccgacgagctaccaactgctccaccccgcgatgaaaactaattaagaaagtggtggagagggttggattcgaaccaacgaagcgaaacgcggcagatttacagtctgctccctttagccactcgggaacctctccatttggagctggcaataggacttgaacccacaacctgctgattacaagtcagctgctctaccagttgagctatgccagcacttaattagtgacaaggaagattatatattaacataatcattttgtcaactacttttcaattaattcagtaactttttttacaaaactctttaaaagtaaaagtatgttaaagcagctacagcaagtatgatacgataatatgcaaaagatgtcaagctatatttatgaagaaattttaaaaaccacagcacggaccagtaagcaaccacaaaagcaaccacaaaaccaatcgccaacatctgcagatcatctactgttaaaatactgatattttttaaaagatcataaagacaggctacaaacatcaaaggtacagcaatcaaaaaagtataatttgctgcagtctcacgttttaaacctactaaaagtccacccgccaaagtacttcccgaccgggaaaaaccaggccacaacgaaagcaactgaaacgccccaacaagcgccgcctgttttaaagagatcttatctaaatcatccaataattctgcttggttatctttagtcttatattcagcatacatcattaataaagcacccaataccaatcctatcgctactgtaaatggagaaaaaagatattctttaatatatttatatgcaaaaaaagccacgcccattacaggcacaataccaacggctacatgccagacgctcagccctttatcagcctgccagccttcttttgtaaaaaatctagcaaaacgttctttataaataaaaataactgacaaaatcgcccccagctgtacgaaaacgtcaaaaatatctgccgccggaccatcaaaacccagcatatgtcctactataatcatatgacctgttgatgacaccggcaaaaactccgttaccccttctacaaagcctactattaccgctataagattctgatccattataattatctatccttccataattacattgccacataaattttactaacttctacattatacaggttattatcgctaccgccaagtttaattatataaatttacctgaaatttatctgaataataaagaaaaggacagcggcgtccatttccgctgtcctctgaatgttgctgtaaactaaagttcttttgttttacttattgggtcagtcaccaaaacataagcccatttgacgtcctgtgcgaattatatcgctgtctactggtactaaccgtggctcggaggcaaccttctcaataggctccgtaacgatcttatcgttttgcagtgataccataacgttatattccttgcgcatgcaagcctcggccgctgctacaccataacgcgtagaaagaactctgtcgaaaggtgtaggcgtgccgcctctttgtaaataacctaatacagtacaccgcgattcgatacccgttttttcctctatctcgcgaaccagtttttctcctgctccaccaagacggatgggctcgaagctgcccttgaccatgcgcgcgatcgacatttccccgcccacaggtcgtgccccttcagctacaacaataatactgaattgtttcccagcagcctggcgggccctgatttttccgataaccgagttgatactgtaagggatctccggtatcaaaataacatctgctccgccggctatgccggaatgcaatgcgatccagccagcataacgtcccataacttccagcgccataacacgatgatgggattctgccgttgtatggatcctatccaaagcttctgtagccatcgccattgctgtgtcaaaaccaaaagtacgttctgtacacggaaggtcgttatcgatcgttttaggtacccccacgacctttattccgcattctttagccagccttgcagctatatttaagctgccgtctccgccgataaccactaaagcttcaataccatgtttttcaagattagccaatacttccgcgcgtttatcataataaaccaattccccgttttcttctactgcaaatttaaagggattgtcgcggttagttgttccaagaattgttccgccccgcggcagaatacctgaaacatctttgtaatccatcagtcccatccggcctgtcacgaggccgttaaaaccattttctatgccaaatatttcatatccattattaagagctgttttcactacagccctgatgactgcatttaacccgggacaatcgccgccgccagtcaaaactgccagtcttttctttgcttggctcattgcttacctcgctttttaatcaacgttccaaaccgtaaaaccttccgaactgatacggatcgattccgttccatcaaatttatcataacagagttttccttcttcaaggtaacccggccaagctgttacaatcacaaatttctcactaagtttatgcagcaaagcatcaacatcaatatgaaacaccggtacgaacagtgtttgcagacgatccaacaaaataacttcgctgtcatatccttccaatatgtctgccatcatctcaggtgcttttgcctgacgttctccaggaggaacctccaaaaatttttcagtaattaaaaggcggcaatcgatgtaatcccactttttctcttcagcagcttcacgcaatactttacttttaccgctgcccggtttacctgttacgataactacttttacatcgtgatctttaacgccttctacaatttttacaaattcttctacttggctcatgtccattacctcccaattacgctcagcgtaaaatttgcccttcactttctagttattgctatattcgctgtttatttacgaaatcctttaaaaaaataacatcattcagaaaaatctaaatgatgttgcttttttgtttcacatttatcaatttattaatcacgtttacgatgactgaaccgttcgctgggatcaatggctaaaagcccactataaacctcactcagatcagtgttatcattacgatttgtaatgtacttttctaatttgcgtttcactctctgcaaagcattatcaattgatttgatgtgcctatccagttcaacggcaatttcctgataagatttgccatccagataactcatcaaaaccttccactcaaggtcactgagaatattattcatcttattctcaatatcagcaaactcttccctgctgataatcatatcttcaggattagcaactttaacaccggaaataatatccaacaaagttctatcagaatcctcttcataaataggcttattcaaagaaacatatgaattaagaggaatatgcttctgcctggtagctgtttttatagcagtaataatctgtcgagtaacgcacaattcagcaaaagctctgaaagatgacagtttatcgccgcgaaaatcacggatagctttataaaggcctatcattccttcctgaatgatatcctcgcgttcggcgcctattaaaaaatagcttctggctttagcccgcacaaaattacggtatttatgcaaaagatattcctgggcaagtgcgttatcttcttgtttagcctttaagacgacatcttcatccgccatgttttcaaaagcagcatagggattatatggcgtttccgtactcattggcacaacctccgtttcctaggaatttcctgcatctgtcagctttttcattatactccatagttatgtcagcgtcaatttttaggtattgcgccgcagcttttcaaaatgatccagaatatgctcctgcagcctgccaccaagttcattacgtcccaaacccctagcaagtctttcgctgcgctgcgcgatctgtttttttgtaagcagatattcttcacgaaattcacgcgccgaaatcctataggccccactccctaaaacattcagctgttctgcataatcactggtcacaacaaaaacactgcttccgctcttaacaagatcatatacgcgtcgttcaatccatgaatcagcggtttcaccttcattcgtgaaaacaatctccaaagctccgtttttttcgaatgatgcaactccctgtacttcctgggcatcaaaaacaacaattcctgaatatcctttaaaagctatatactcggctaatttttcttttaaaagttcacgggcatgctcaaggttctcttcacggaatttacgaaaatcctgccaactgttgataacattgtaaccgtccactacaagccattctttcatactttaaacgcccgcctgcacccggcgctgacgtacgacctcgtacagcaaaacggcacctgccgccgaagcattcagcgaagaaactcccccctgcatcggcagactgacaatgatatcacacttctcttttacaaggcgtcccagtccttttccttcagcaccaactacaatgaccatcgggccagtcaaattacttttgtaataatcctcaccgttcatatccgcaccggcaatccaaaaaccaagttttttcaattcttcaatcgtctgcgtaatattaccaatttgaactactgggacatattcaacagcaccggcagaaattttcgctaccacagcatttagcggacagctgcgacgcttgggaagcagcacaccatgcacaccagcagcatccgccgttctaatcagcgctcccacattctgcgggtcctgcagctcatcaagcagcagcaaaaaaggagtttcatctttctcttttgccaatgccaaaacctcttctaaactgtgaaagcgaataggtgcagctaaggcaacaaacccctgatgccgcaagccatctgccagtttatccaatctttcagctttacaaaattccaaaactacgcccgcagtcttcgccaggccaataatctcactgacactgccgcctttgattccgtcctgcaccaacagtttattaatagatctgccgctgcgcaaggcttctgttacagaattgcgtccggcaagaatttcttcagacatagctcctcctaattatcactgttgtttttgttttgccgctaaaatagcgtccaaacgtccgcaactcattgcaccttctctgcatataccttcacttacgcaagtaggaccggcattttcaaataataccggtgcggcttttttacattcagccagcattttttctgcaagctgcctgatctcccactgggcacgattacagcagcgcaggctaaagaaattcatcaaagacctgacattaaatgttgccacaattttagtttcagccgcattaggaagtacataacgggcatcctctgccgggattccaaattcatcagtaaattcattatacctagcctgaatatcagccataagctgttcaaacttagcttttgcctcaggccttgaggaaatagtaggaggcataatagtttcaaaatcatgctcttttacataacgctgcgattgctgtgaataagaagcgatacggtgacgcaccagctggtgcgtcaatactctggaaactccttctatagcgaaagtaaatgtaacatgttccaatgtcgaaaaatgtcccatttccacaagtttacgcactaattttgctgcctgttcatcagacattgtttcttcaagctgggctgcaccaacgggagaatagcacagacgtgcgctcatagcaactgtcttttccggttctggtgtgtgtctgagtaattttacttccatgttaattcaccctttcttctgcatagcctcagaaataattacaaaagaacgctctaatatctcctccagtcgttcttccctgtcgctcaaaaataaccagcccaacagcgcttcaaatgctgttcccatacgatattcatgtacggaggcgcttttaggcactatcgatttagtattacgaccgcgcctggcaatataggcttcttcttccgtcaaatccgacagcaatgcctccattgccttcgcctgcataaccgccgataccatttttgaacccaaatcatgtataacacgaacctgccctgaggttggcagcagcctcaaccttacataaagagaaaaaacaacatcaccgatatatgccaaaagtatcggattaagttgtttcggttctccgtaagtcagcccggcagccgtacaggctgccaaagcatgagcttttatttgctgatattgttcaaacttcactgttttttccaacgtacgccttgaggcgtatcctccagaacaattcctatctcgcttaatttattacgtaaagcatcagcctgtgcatagtccttattgctcctggcttcctggcgcatagcaataagcatttccatcagtggttcttccaaaccgcaactttcagcttcaacagcaccttgagttgattccagtactccaataatagaacacatttcagagaaaacactttgcaatatagacacaagctttccatccggtttactgccgacgctgacgatactttgatgataaatattaatttcctttgccaaagcaaacatatgactgattgccaaagcagtattaaaatcatcacgcatggcttccataaactcgttgcgcagttccaaaacttttcttcgcagcttcaggctttcctctgtcgggccagcattcatcaaagccattaaggcctgcagattttcctgagccgttttcaacctggacaagctgcgctgcgcttccgccaacctctcatcactaaagtccaatggactgcggtaatgagtggaaagaataaaaaagcgcagtgtttccggctcataatgctcgaggatatcaatgaccataaagaaattacctaatgatttagacattttctcttcattaacagtgataaacccgttatgcagccagtatttaacaaagggatggcaacctgtacagccttcagattgtgcaatctcattttcatgatgcggaaaaatcaaatcactgccgccgccatgaaaatcaaaggtttctcccaaatatttcatactcattgttgagcattcgatatgccagccaggacgtccttcaccccagggactgctccaggaaggctctcccggtttagcagccttccacaaggcaaaatccattggattatgctttttatcgttgacatcaacgcgcgcacctgccatcatatcttccagattacgcccggaaagttcaccgtaatgctcaaatttttcaacgctataataaacatcgccgtccatttcgtaggcataaccacgatcaataagagcttttacagtttcaatgatttcctccatatgctcagaaacacgcggatatacatgtgcacgacgcacattgagcttatccattacctcaaaataagcatctatataacgtccgcagacatcactccataaaacgccttctttattggcagtgttgattattttgtcatcgacatcagtaaaattctgtacatgcagaacatcataaccctcatgctccaaaaaacggcggataacatcccatgttacaaatggacgcgcattaccaatatgcggatggttataaggcgtaacaccgcagacataaatattagctttacccggatgtaccggtacaaactcttctttttgtttcgtcaatgtattgtaaactctaatcgtcattccaagctctcctctacagagtaatacctgccttagcaaggctcgccctaattctggcttctgtacgttccaaaccaagcaacggcaccatttcagccagttccgggccatgctgatttcctgttaaagcaacacggatcggcataaatacagctttgccacccagcttggtagctttttggatagctttgaaagcagcttttacagcaggtccatctaaaacttccagcttaggcaattcttcgaacagcatattcattactgttggtactgattcttcctgcagaactgcagcagcctctgcattttcaaattcaaattcatcactgaaatacatagcgacacattcagggatctgcgcagcaaaagcaacatgctctttggctgtagcaactacacgtttaagccattccagcttttcgccacactcatcacctgtcatatagccggcagcaaccatatgcggcttagctgcggcaaaaaaagcttcctcatccaactgccgcatatagtgctgattgatccagttcagtttatcgatttcaaaaacagcgggatttttagcgacatgctccatcgaaaaggcctgaatcaactcttccatactgaaaatctcctgttcgctgttcggagcccagcccagtaatgccaggaaattatcaatgccttccggcagataccccaactgacgatactgatcaacagaagtagcgccatggcgtttagacatttttgtgcgatccttacctaaaatcaatgaaatatgaccgaatgtaggctgtgtaaagcccagcgcatcataaataaggcattggcgcggagtatttgacaaatgctcttcagcacgaataacatgagaaattttcatcaacgcatcgtcgattactacagcataattataagtaggaatgccgtcagattttacgataacaaaatctccgattccgttagagtcaaaaacgacatcgccgcgaaccatgtcgcggacaagtatctgctgatcagcaggcacacgaaaacgtacggttggtttgcgtccttcagcttcgtactgttctatttgttcagaagtaagattacggcatttgcccatataacgaggcatttgccctttggcagacaaagcctgacgttctgcttccagctcttcatctgtgcagtaacaatagtaggccttaccttcagccagcagctgatcagtatattttttatacagttcaagacgctctgtttgacgataaggaccgtattccccacctacatcaataccttcgtcccaattcaagcctaaccattttaaggcagccttgatattctcttcagattcgcggctggaacgctcaaggtcagtatcctcgatacgcaaaacaagcttgccgcccattttacgggcaaacagccagttaaataaagcactgcgagcgccgccgatatggaacggtccagtcggactcggtgcaaatcttactctgatttcattagacattagaatgatccctccaaaaatacttatcttgaatattataccacaagggcatgtatgagtgctaagtccgtaaagacctcactaagtactcaaacgataccacaaggacatatatgagtacctcgtttcagtaaagcgaatttacatcatcctctgataatacttacaacagcctctgacgccatcccttcgccccgtccaacaaaacctaatttctctgttgtcgttgcttttacattgacagcacttctttcaatccgcatttcccgggcaatattagccgccatctgttcaatatagggagccagcttaggccgctgtgccataatagtcacatcggcattgtttatctgccagccatgcttttgcagtaaaccaaccacctgcctcaacagcagcatactatcggcatctttaaatttcatatccgtatccggaaaaagcctgccaatatcaccaagacccgctgcgccaagcaaagcatccatcaatgcatgaagggccacatcggcgtcagaatgtcctaacaaccctgattcataaggaatctcaactccgcataaaatcaatttacggtcagcagcaagcttatgtacatcgtacccgcagcctacacgaaactgcggccagttattatttttttctatcatcttacaagacctctgcttttacataaattttctgccaggatcaaatcttccggcgttgtaatcttaatattctcatagcttccttcagcaacagcaacagctattcccaaacgttctaccagtgaagcgtcatccgttacattaccatgctgtttctgcaaaagctcgtatgcctgctttaaaatactgattttaaaaatctgcggtgtctgcacagcacgcagagtactgcgcacaggcgtatactgcacaagattattttcatccacaaccttaaccgtatccttaacaggcacagcagcaatagccgcaccgctatcggcagcagctttcaacactcttttaaaaacctctttgccggcaaaaggacgagcaccgtcatgcacagctatataaccatcactctccgtaactgcagacagagcattagcaacagaatcctgtcgttcctttccgccggcaacaacacagaaaggcaacagcggataatactccttgctgtattcctccagcatcaattctgcttccttgacctcctgtggccgtacaacagcgatcactctgctcacacagtctgtgtcagccagcatcctcatacactgtaccagaagcggcaatcctcccacatcggcaaaagctttatttttacctaaccccaagcggcttcccaaccctgcagccggaacaatcgctatgattttttccataaacgcccccgctatttcagtttcgcgaaaatcattctacctgctgaagtctgcaggacagaagttactacaacagcagtattttcacctaccagttttttaccgccttcaacaacgatcattgtaccatcttcaagataagcaacgccctgattattttctttgccatctttaacgacaaaaacattcatctcttcccccggaagaaccaccggcttaatggcgttagccagatcattgatattaagcacactgacgccttggatctcggcaactttattaagattgaaatcattagttataataacagcttctgtctgtttagccaatttcaccaatttagcatctacttcattcaaatcttcaaaatcagtatcttctacaagcaattgttctttatttttctgctgtatctcctgaataagatccaaacctcggcggcctttggcccgtttcagattatcagacgaatctgccagcttctgcaattcttccaaaacaaagttgggaacgatcaaacgaccttccagaaaacctgttttcagaatatcaataatacgaccgtcgataatgacactggtatccagtaatttatttttactgtacaatctgtcactcagcgccaacgatttaactgcagccggttttaccgcaccttttaagctaggaatactgcggttaaaaaagcctacgatatccttatgcttacgtaaagcaactttcgccccaataatagaaagcaccagactaaagatcaaaggaatatagggaccaataatcggcaaatgcgaaaaaggcccacccaaaaggttagccaaaatcaaaccaataccaataccaagcgtcataacaagaatatcactggtcggcaccttggataaaacgatcgccatacgttccgtataacccataatatgataaataagcaccggtgcaacagctacaccaagaccaccaaaaacaaagatgcccacagcacctgaaacaatagttgccaaagctatgccaaaaaagccgttgtcataaagatcgtaaccaaaaaaatccgaaatataaggcagtaaatattcagtaagtatgagtccggtaagcgcaaacacaacgacaatggtcagcttcaaaatcctgtttaacatctttacacctcctttctttaaataatatggataatataatattttactacaattttcgtattaaaaacagctaaaaaaataaaatacgtcggaaaatccgacgtatttcactaaaaaaacttattcagccagttttcaatatcctgctgttcagcattttttacaagcatcacttcgctgatcaaaatctgtctggctgtacccaataatctacgctcgccggtagataattttttttcattctcctgcacctgcaatgttcttattacatcggcaacttcaaaaacattaccgcttttcattttttccaaatacatattaaagcgtctgttccatgtaatagctttattgtaattatcaggacgttcttccaaaactttttcaacggcatcgatatcatcattttcgataacatgcctcaagccaacacgttccacactgtcgaccggaaccatgaccttcatctctccaagaagcattgccaggatcagatagtcgacactttgaccgtcacgttcacgcttttctattgtttttactactccggcgccgtgcatcggatatacgactttatctcctactgcaaacatcttctgccctcctaaggaacacgctatttttatatgtatttattttaacacctcctgttatttttgtcaaaattttattattttatcatagctccatatttgtgtcaatcattttttatataaattttatgattttattttaaaataaacaaaaagagcggagaaacctccgctcttttaagcaaaaaccttatccagcgcttcttccaaagttttaacctgcacaataccattgcagggttcatccaatgacagcttgcccattggcaaaacaaatcttttaaagccaagattcatagcatccttgatacgcctttccggcgaacctattcgtcgcacttctcctgtaagccccacttcacccatgactaatacgccatgcggaatcggccgattacgatagctggacaccagcgcagcagccacagccagatctgcagctggttcagtgactctcatcccgccaaccacattgacgtaagcatcgtaagcgccaaaatccattcctaagcgccgttccaaaatcgccaaaagcatagtgacccgattataatcaaatccaacagcagtgcgtcggggcatcccataaggtgttttggcaaccaaagcctgcacttcaactaaaataggcctgttaccttccaggcaggcacaaacaactgaaccggaagcatcgttactgcgttcttccaggaataatcctgctggattacttatttcctgcagcccactggcttccatagaaaaaataccgctttcatttgtagagccaaaacggtttttcaaggcacgcagcacccgaaaagaataggatctatccccttcaaattgcagcaccacgtcgaccatatgttcaagcaatcgcgggccggcaatattaccgtctttagtcacatgaccgataataagcacggcaatgccgctggtttttgcaaaacgcagcaatttcgccgtacactcgcgcacctgtccgacactgccggctgcagtaggcagctcgctgttgtacatagtctgaatagaatcaattaccaacaatgccggctgcgcttcctgtgcctgcagtaaaataatattcaaatcggtagccgtcatcaccagcaggttttcaccgctgctgcctaaacgtctcgcccgcattgctgtttgcgcttctgattcttcaccagaaacatacaaaacttttatattattccggctaaacttcatgccggcatccaaaagcatagtcgacttgccaatgcccgggtctccgcccaacaaaaccaggctgccgggaacaatccctcccccaagcacacgatcaaattcacggatacctgtctgcagacggctgagggactgttccgccacctgatgcaacggtttgggcttagcggtttcgcctacaggcaggtaactctgtccaggacgttcaggcacgtccatttcttcgacaaagctgtcccattgaccacattccggacactttcccaaccatttagccgttacataaccacacgactgacaaacgaaacgtattttcggttttgccattacggacgttcctctccagctgcaaccaaggcttcttccttgtgcgcttcttctttatcaaaatagattttaccagcctcatcagtacgggtcaaaatagtatcaccgcgttttaattctgaagccagatacaaatcggaaacaggatcctcaaccagtttccttaaagccctgcgcagaggccgtgcaccataacgcgtatctttgccagcttttaaaagctcggccttagcctcatcagtaaccttgatatcaaggccattttcctgcaaacgacctgaaagttctttgagcatctgttcgacaatttgccgcagttctgcttcaccaagcggatcaaagaccagaatttcatcaattctatttaaaaattcaggacggaagattctttttacttcttccaatacagcacttttgcgtccgtcgtttacctgtttctcaccagtcgcaaatcccaacggcttgctgtccagtaaagctctggcaccagcgttgctggtcataatgataacagcatttttaaaatcaacagtccgtccctgcccgtcagtcaagcggccgtcttccataatctgcagcagcaagttgaaaacatcaggatgcgctttttcaatttcatccagcaaaattaccgaatagggccgccggcgcacaacatctgtcagctgaccgccttcttcataaccaacataaccaggaggagcacctaccaaccgagaagtagtatgcttttccatatattcagacatatcaaatctaatcaaagcacgttcatcgccaaaaaggttctctgccagcgctttagccagctctgttttacctaccccggtaggtcctaagaacaggaacgatcctacagggcggtttttatccttaaacccggctctggctctacggatagcttttgcaacagcgtcaacagccgcattttgaccgaccacacgctcatgcagcgcctcctccaaatgaataagtcttttagattcaccttcggtaagcttacgcagtggaatatttgtccaggaagcaactacttcggcaacatcttcttcacttaccgtcaatttactgcttgatccactgcgctgcgactgacgctcaccatcaagctgttcctgcagcttgcgttctgcgtcacgcaattcagcagcacgttcatacatttgctgagtaatagccgattctttttcaatgcgcactttttcaagctgttgttcgatttcccgctgcggcaaggaaatcttatagctttgcaaccgtaccctcgaacaggcttcatccattaaatcgatagctttgtccggaagattacggtcagtgatataacgatcagacagacgcactgccgccataatcgcctcatctgtgatttgaatacgatgaaaggcttcatatttatcgcgcagtcccttcaaaatctcaattgaatcattaacatcaggagcacctacaacgataggttgaaaacgacgttccagtgccgcatctttctcaatatttttccggtattcgtttaaagtagtggctcctatagcctgcatttcacctctggccaaagccggttttataatattggcagcatcgatagcgccctctgcggcacctgctccgatgatagtatgcagttcgtcaataaaaagaataatatttttattttcttttactgcttccagtaattctttcaaacgttcctcaaattcaccgcggtatttagttcccgccaccagataccctatctccagcgagaacacaattttctcacgcagtatctccggaacattaccgtcaacaattcgctgggccaggccctcggcaatagccgttttaccaacgccggactctccaatcaacaccggattattttttatacgccgacacagaatctgaataatgcgttcaacctctttttcgcggccaacaacgggatcaatttttccatctgaagccagctgattgagattgcggccaaattccgacagcatttccaacacattgctctttatttccacatcgctgtcgccagcattataattgccatctgtcaatggctgattatcataaacagccttaatgaccttcatgacctgttctgccgtaacgttaaagcgccgcaatacctgagcagccacgccttctccttcacgcagcaagcccaacagcaaatgttcggaccctacatagtgcagcttaaaagctgctgctgcttcaccagcaagctctaaggcccgtttggcacgcggggtataactgatcatcagctcagtgctgccagcgggctccatccagctttccagctcttttatgaccgcctgattatcaatgccaagtttttctagaatcttcttggcaaaacaattttcaacattcagcaacgccagcaagatatgttctgttccaacatgatcatgacccttatccaatgcaaaacgcatcgcgtcttccaaaatacctttggcacgttcagtaaaacgattcatgatctgttcttctctagcttttggtttcaacagcccatctaaaaactctttggcattgaaaacagttcccgacaaaaaattagacggagccaattcttcaacacaatccgagcacagccatttgtcgatttgtttatcgttgaccacgcataccacgtggaccacagcttcttttaatccgcatttctgacataacatatcacttcacctcactcacgttctgtcattttagtaatagccgtctccaaaacagctctttttttagcttcatcagcatccagaatttccatcatatactgcaacagtgatttttcgcgcctgctgatcaaacggttagcagcccagtgctcaatcaaatcatgcactgtcggctcacagttctcttcctgcaattcatgaggcatcacccttacaatacggacaaagccgccgcttccgcgtctggattcgaccataaacccccgttcaggagtaaagcgcgtgctcagcacataactgatctgcgacggtgcgcacgacagtttatcggcaagttcattacgctgtactaaaacagcgtcctctctgtcctctaaaagctgtctgatgatgaaattttctattgcatctgcaagatttctcatcttaattaccttccttttatcgtttcagcattaaagtcaaacttttctgccggcatctataattagattaattctattatatttgacctttcgacttttggcaagtaaattattcgtgaacatcttttcagcagaaaaaaaacaagcagacgcataaaactcgtctgcttgatcaatttttttatttttgcagcttcctggcaaattcataaccaagctgccttgctgcttccaggtcttctggctgtgccttccatttacaggtaaaacccggttccaactcaaaaccagccgctgtcagcaaagcttccatatctttctgagctccgccggcccagccatatgtaccgaaaacagctgcttttttacctgttgggtttaagcctttaaggtatacaagcagactgcccatagtgggcagcattccgctgttcagtgttgaagagccgatgatcataccacctgcttcaaataaatccgcaacagcagtactattcggagtttcgttcatacgcagcagcacagcatcactaccggcactgacaacaccctccagcacagcacgagccatttgctccgtagcgccccacatcgtatcataggcaataactacactgctgccgctcacgcctttgccccaggcagcatatttggcaataatttcctgaatatgactgcgccagataataccatgggctgtagctatcatctttaaatcaagcgccgctgctttcgccagcgctttatcaattaatttcgcatatggccagagtatattggcaaaatatttttttgcttcataaaaaagtattcccagatccacttcatcatcaaaacgtttagcagccgcataatgctggccaaaagcatcattagaaaacaaaatcccatcatctgcacaataagttgccatactgtcaggccagtgcagcattggtaaagttacaaaagtcaattcacgtttgcctaatgataatttatcgccatccttcacgacctgaaaatcatataaatcaccataatgacgaattgcttccgcctttccttgagctgtaataaaaaacttagcattcggagccgctttgaccagcgccggcaatgcccctgcatgatccggttccacatggttcactattacgtaatcaatttttccagggtcgacaacacgttcaatctttgccaataattcttcagcaaacatcgctttcactgtatcgatcaaacagattttttcatccatgatcaaatatgaattatatgaagcaccgcgttccgtcttatatccgtgaaaatcacgcacagcccagtcaacaacacccacatcataaattttaggagctatttccaatggcatcattttttacacttcctttctgaaaaactgcttctttatttattatataagcaaatcacagcaaagtaaaaatttcttttaacaaaaaacagtaaattctacttacaaaattctatgcctgatattattttcacaaggcccgttcaataacactgtgctgacctttatcaataaacaaccctatttggtggaaactgctcaaactactgcgatgtccaatactgactacggtagtatccggcattaaagtttcaacaagcttatacatcacagcttctgtctcctcatctaaagcagaagtagcttcatctaaaaacagccataacggttgatagatcagtgcccttacaaaagccagcctctgctgttcaccgccgctaagcacatgtgaccagtctgcttcgacatacaggtcttttgccaggtagccaatccgacattgctccagcaacatcaccaactcttcatctgttttatggcaactgcctggataaagcaatgcttctttcaatgttcccaatggtaaataaggtttttgcggaataaacatcagtttctcggcagcaggcagttccaatttaccatgcacatatggccagataccagccacagcacgcagcaatgtacttttaccgctgccacttgcgcctttgatcaggatatttttatttcggccgggtactaaagtaaaattgacatttttcaacaagatcctgtcatctggtaattcaacctgcaaggacgcagctacgatagtatcgttgcgactttccattcgttcaagatcaatctgcggtttttcctgttttacctcgtgcatatgtaccccaaaacccgtaagacgctctacaactgcccgccattcagccaaagaagcatacatatctacaaaatatgataatgattcctgcaccctgccaaaggcactggcaatctggatcaggccgcctaatgttatttccttacttaagtaacgcggcatagccactacgaaagggaaaataattgcaatctgtgaatagccggaattaagccagaccaactgtttttgtttttctactatcttccagaaattatccagcagcagtttaaaacgcttcttaaatacgccgccttcctgtttctcaccgctgtaaaacgctacactttcagcattttccctcattcgcatcatactgaaacgaaaatccgcttcataacgttgctgaacaaaattcagccctaccagttttttaccaatcaaatgagtaagccctgtaccaacaattgaataaaccaaggctacccaaaccagatagccttcaatatgccacacttgccccgccaaagtaaattccagtgaacctgacagttcatataaaataaatacgaaagacacaaaagtacaaaaagcctttaaaacaccgatactgaactttaacgtcatctcaacaaacaaacgcacatcctcactaatacgctggtcagggttatcagtatcagagccgaacatctgcagacgatagtaggtcttatttttcaaccattcatcaatatacctgttagtcagccaacgacgccagttaagcaccagtacctgctgcaaataaaaggcataaactgccagaataatgtagatcacagccagccagccgaaatgtatcagctcatcaaaaataagttcggtctggtaattttgcagtgcattataaaaggaattgttccatttattcaacagcaccagcatatacactacgcctaaagttagtgctatgattgccgtcaacagcaaataagcctttcccttttcttctgactgccaataacttttggtcaggtaccagacatctctgagaaatttacttttattttttaattcattcatctgcttttacctctaaacactctttgtcagaaattttcagttaccttttttaaataccacataaataaaaaaaatcctgcaaaaaaataatgccccgtctttaagacggggcattatatatttacaaaacacctaaatttattcttcgctgtgtttttttctgttgaaaatacgttcaacgacaacgaataataccgggatcataaagataccgatcatcgtagcaaaggtcataccgccaacaacggcattacccatagaaacacgggcaccggcacctggacctgttgcaatcgccaaaggcacacagccaagaatgaacgcgaaggatgtcatcagaatcggacgcaaacgcagtctggcagcatcaagcgccgctttaactacaggttcgccattttccatgttcatctttgcatattctacgatcagaatcgcatttttagcattcagaccaatcagcatgatcaaaccgatctgcatataaacgtcgttctgcaaaccgcgcagatactgagcgccaaaacagccaagggcagcaacaggcactgacagcataactgccaacgggatagtccagctttcatacaaagctgccagacacaaaaatacgaagatcagagaaataatgaaaatctgtgttgatctgtttcctgcttccagttcgtcacggctctgatctacccattcataggtataagtagtcggcaaaatttctgcagcagtttcttccagtgcagtcatagcctgacctgtactatatcctgtagcagggttaccagctattttaatagctcgtacaccgttgaagcgggttacagtagcagaacttgttttaccttcgtcagtaaccaaggtattaagaggcaccatatcgccgttattgctgcgtacaaagaaataacgcatatcatcaacattcgtacgatattttgcatccgcctgcataactactttccaagtacggccaaaagcattgaagtcattgatctcactgccgccgaggaaagtctgtaaagctgtaaatacgcttgctacaggtacatttagagactctgctttttcacggtctacgttaaactgataaaccggcgtattagtattaaaggtggtataagccataccaatttcaggacgttgattggctttagcaagaaattcgttagcaacttcctgcatccgctccatatcgtcaccgcccagattcatcaggtacatactcaaactgcctgtgctggacgcacccggtaatgcaggcgggtcaaacgccataacgcttacctgcggcatttgggcaccgatgccataaatctgcggcactatatcctgagcactgttatcacgtttgtcataatcttccatcgccgcaacgatcagaccggcactggacttaggggcgccagtaaggatatcaaagccagatacttccataacatatttaacgcccggcagcgacttgatcttatcacccagttccatcatagcctgaataccacgattacttgatgcaccctccggcaaattaaatgacgttacagaataaccctgatcttcacttggcacaaatccggtaggagtaaccttagctacccagcccaataaaataaccataaccagcaaaactgccattgagatttttgcatgacggatacatttttcaacatttttaacatatttacttaaagtattggcaaaccagacattgaacttatggataaatttaccaataggtcctttgacttcgtctttatcatgcggtttcaacagcaatgcacacaacgctggagtcagagacaatgctacgatagctgacagcgccatagaaacagaaatcgttaaagcgaactgtttataaagctgaccaacagtaccgccggtaaatgcaaccgggataaatactgctgccaaaacgaacgcaatcgccacaacaggaccggaaacttctttcatcgcccgataagtagcttcttttggagtcattccattatcctggatgtgatgctcaactgcctcaacaacaacgatcgcgtcatcaacaacgaggccgatagcaagaatcatcgcaaacattgttaaagtattgatcgaaaatcccatcagcacgaacgcaccgaaggtaccaaccaaagaaacaggaatcgccagcagcggaataagcgttgcacgccagctgcccaggaaaataaatacaacaagaataaccagcgccaaagcttcaaagaaagtatgagctactttttccagcgcttcgcgtacgaactgggtattatcctgaacaatagtcagctccataccttccggaaaacgcgtttcagcatcggccaatacggctttgatgttattgacggtttccaaagcgttagcgtcgcttgttaagtaaacagggaaaacaacagaagaaccgccgttcagataaccagcaacgttatcactgcgggcaccagcttcaattttcgcaatttctttaagcttcaggttattgccgttttgagaacggacaataatattaccaaactcttccggagtcgacaaacgcccctgggcattagcagaatattggaattcctgctgctccgctgtaggacgcgtaccaatagaaccaacaggagcctgaatgttctgactcttgattgcattggaaacatcatctgcggtcacacccaactgagccattttatctggctgcagccataggcgcattgcgtattcctgaccaaaaatatcaatactggaaacacccttaacgcgtttgcaggcatcaaggaagtttgtcatcgcataagaggtaagaaacatcgtatcaaacgttccatcaggtgagtgcaacgcaaaatacatgatggtctcggcagatttcttggctgtcgtgataccgtaagcacttacctctgacggcatggaggacgaagcctgagaaacacggttctgtacctctacagaaccgatatctgcatttttatcaagattgaaatatacgtcaagtgtgtattcgcctacgctggtactagtagagttcatgtacagcatattttctacaccattaactttttgttcgatcgcctgcgcaacagattcctcaacaacctccgcactagcacccacatagttcgtagaaacggcaatgtgcggcttggtgatatccgggtattgagcaattggcaggctgaatccggcaatagtaccaagtaaggtaataagtattgccagcactatcgcaaagaccggacggtctataaaaaagcgtgccacaactagttacctccttaggattctttcaaagatacagcagtatccaattctgcctcggtcatcggttcaggttttacctcagaaccctgtttaattttgttgatgccttcgacaacaaccgtttcgttgccttccagaccactttcaaccagccacaaacgaccgatacgtggacctaatgtaacttcgcgcatggatactttattatcatcgccaagtacataaacaaatttcttatacataagctcggttacagcacgctgcggaatcagcttagcgtcatgtacagtaccactgttggcctgcagatgagcaaacatgccaggcagcaggatcttagcaggatttgggaattcagctttcagcgacaaagtacctgtcccctgcgtaatgctgcgattgacctgatcgacacggcctttttcagaataagtactgccatcgctcaaaacgatcgtcagattttccaacgacgctccacctgcatcattatgagcgctcagaagttttaaatattcgttttctgccagactgaattctacaaataccggatctgtattagaaatagtagcaagaacagtctgaccggcagtaacatagttgcctacagaaagatcattggtatctatacgtccgtcaaaaggcgcaacgacattagtttctcccagatcaatattggcattttccagcaaagcctgctgtgcatcaacagcagcctgcgcctgttcggcctcagcgaccctgttatcaagctcctgcttggaaacagcgttctgctcatatagctttttataacgctccagatcacggctggtacgaatcaaagttgcctgggcactggcaagtccggcctgtgcattcagaacttttgcctgatatgtacgctgatcaatagtaaacaaggtctgtcccgcagttattttttcaccgcccaggaaatactttcctgtgatctgtccactgacctgcgccatcaaattgacttctttctgcgcctgcacaaaacctgtatagtcataaacgatcggcgtatcgcgtttgataacttccatcgttttaaccaacgttgcctgtggtgcctgctgctctttgctgcagccagccaaagccatcacggtaaatgccgctaccgcaacagccaaggcctttttccttcggcctttatcaaaaaaactcagcataaatatatcctcctcacgtattcaaaaaaacggctgcgccctgtaaaagggcgcacggctccgctattttcaagaatactcttattatagtttatcgtaattataaacgcaaccgctattttaaccgattaaagccttttttcttaatttttcatattttttctctgtttttcactatttgctgactgaccagtcagttctctttaaaataattccggtttcagtaaaaactttttcagatcgcttgcagccaccgttgcttccaaccactcgccgatttcacttcgctgacaaaacacaaaattagtcccgttataataccagctttcaggaatacctttactgaaatccaccttatctttctttgtcagcaaccttaaaacaggaagtaaatcggcatcacgtaaattcaaaacatcaccaagtgccaattgtgctccagtttgtacatcaatatttaatggtatcttagcaaaaatttctttttcaccttcatccagtacaccaaaaaacaccatactgataaacttttcactgacgaaggtcaatgtataatcaagttcgcagcctccagttgccagattctgcaaataaggaccagcaataatcgcaaaatctccattgagcttattttgcacctcaggcgccgcaatcgcagtaaaaacaggataagttacgctgctgctgtcatgcaccgcctgcctcggtaaaatccgccagtttttttcattatagctgcgatggaatttgtcgtctttatttttgccgccgctgtaaaaagttttactttttaatttccagccactgctgccatcatatgaccacaccccggccagcttcccaagcaggtcttccctgtttaacccactgatgctctgcagcgacaacagttccaaaatcccgtcctgctccatatctacagcaaccagcgaatgtattttcccgacatacgggcgtcgatacccctttaataaggtaccgtcaacgtcataaagcccacgctgttcataaaactctttctctttgggaagcagttcataattagtgctgccgtctgcaaaagcaattttactgcgaaaatccggcacaaattccgcagttgccgctacacctgcattatcgctgccagtaaaaatctccttcaccgccttaggatcagcaaagtcaatgatacgatattctatactgccatcgtcgcctccctgtccaacagacaaaatcagctgttcgcctctgcccgtaaaccttgctttttctaaactgcagtcgtaaccgccattaatacttggtacatatgccgtcagcaattcagagtcactgccttttaaaagcaataaaaaatcattcctgtaactgctgccgcgagtcatctgaccaccatacagttccacagtttccagactgccgttaccgtcaacatccagctgcaacagcgccagcggttcctgctcatcctgctgtgccgaagcactgttcatactgaccagcagtccagctgcaaacatggctgccgacatcatttttttcaaatttatgatatttcccatgcgggcctccgttctaaaaaatactttcatctttatacattataccaattcctttaccttactgaaagttttttctatttttgtctatagatatttaaatatttatttaaaaattcttctttttttctgcaaaaaatactgcaaaaaacttggagatattgtaaaattatgaaagacattattttgtctgcactacatttttgtacttagcgtacaatataaggaagggaaataaatgaaaaaaatcttgattttgtttacagcagtttgttttatgttcttgatggcaggctgcggcggtgaggacaaaaaagccgctgaccccaaagcaaaaacagcagtatctctgggtatgcttcgccttaccagttctgcaccgctttttatcgctttagataaaggctactttgccgaagaaaaccttgaaatagatcaacagtggtttgatgcagctcatcctattgctgtggctacagcttcctctaaagtagacgtcggcgctaccggtatcactgccagtctcttcaatatggctgccagcggtcaacaacttgctatcgttgccgataaaggccgtgaacaaaaaggcttttcttcctcagcacttttagtcacctccgataactacaacaatggaattaccaagctcgaagatatcaaaggcaaacgcatcggcattactcaaaaaggttctaccttccattatatgcttgggcggatgctggaaaccaaaggattgactcttgaagatgtggagatcgtaccgcttggcaaattgagtgctgttatggccgctcttgaaagcaaacaaatcgacggagccatactcaacgaacccaatatcaccaaagtgcagactgcaggctatggtaaacttgtcacccaagtcggtgacgttatcccctatcaaacctctgcccttttcttttctcccaaattcctgaaaaatgaagatgcagcagtacgtttcttaagagcatacaaaaaagcctgcaattactactatgacgcagctattgacaataaagaccccaaaaagctggacgaagtcgtaggcattatcgccaaatatgttaaagctcctgaagccgacatcaagctcggcctgccttatatcgatcgtgacggcaaactgctggacagcgatatcaagactcagatagactggtatacttctcatggcatgatcgagggcaagcttgatccacaagccgtcaccaataccagcctgctcagcaaggctatgcaaaaataatttctcaacaaagttttccttatttttatactttatcaaacaacaccggaggcagtagtttaaatgaaattagttatcgacaatgtcagcaaaaatttcatcgatcctcaaggcaaacagctgtctgtacttgaaaacgtcagccttactgtacacagcgaggaatttgtagctttggtagggccttccggctgcggtaaatcgactctgctcaatcttacagcagggttgctgtcaccaagcgatgggagtatttatttcacagatctgacggaaggccatactcctgctatgggcatcgtcttccaggaaacaggcctgtttccctggcgcagcgtttatgaaaatattgcctttggacttgaagccacaggcgtaccaaagacagcacagaaagaacggatccagcactatatcaatttagttggactcggcggttttgaaaaagcctttccgcaccagttatccggcggtatgcggcaaagagtcggtatcgccagggcgcttgtcataaatcctgacctccttttaatggatgaaccattttctgctttggacgcacagactcgcacgatcatgcaggaagagcttgttactctctgggaaaagaccagactcagcaccttatatgttactcacaatattcaggaagcggtaatgctggctgacagagtcgtgcttttatcaagacgccccggtaaagtcagaaaaatcctgaccattgcaattccgcgagctgacagggaaaaaactgaaaataccgctcagatagccgaatttatccgcatcatctgggaacatataagcagtgatgcccgtgcggctctgatggaggtggaagctaatggctgaatataaaatccacaaccgtatgactcactggcagaaaacttatccggcctggatatctttcgctgcgatagccttcttactggcagtatgggaaataatctgcagtacaggtctgatttcctcattgtttctaccggcaccaagcgcaatccttactgcactcggcaagcttattacaagcggcgaaatcagccgcagtctgacagccagtctttaccgcattctgctgggctttgctttaggcagcatcatcggtttgctggtagggctcgtcaccggcacctctgcgctgatggaccgaataggaacaccgatcgtcaatgccctttatccgatcccaaaaatcgctttactgccgctttttattctctggcttggaatcggtgaattatctaaagtcactatcattgctttgggcgttttctttcccgttgcgatgaatacctattcaggtgtcaaaaacgtcgacacattgctgatcaaggtagctgtcagctttaatgccagctggtggctgacgatgaaaagcgtagttctgccgagcgcattgccggtaatctttgccgggctgcgtctggcagcgggcacttcactgctgctgcttgtagctgccgaaatgatcgcggcacaagaaggtatcggcgctttgatcctgcattatggagatctgatgatcaccgaccgtttaatggccggcgttatcgttctttcactcctgggactcattttcaatttaggtctgcaatggctggaacataaaatagtaccctggaagacccaaagcaaataaacataaaccccgctgcgattaatcgcagcggggtttatttatccaattacatacattctctgatagctttcgccatccgttttacaccttcgatgattttctcttccggcatattggaaaaattgatacgcatattacggtcagttttaccattagggtagaaggcatcaccggtaacgccggcaaccttcatctcgatacatttgtggaaaaccttatcagcactgcatccctgcgggaaagtcagccacaggaacaacccgccttcaggatgtgtccattccgtacctgccggaaattcttccgccatagtttttaaaatcagatcgcggcgttttttataaagggctttgatctcttcaacatgcttatccaaatcataattttccatataagcgtcagctatcccctggtcaaaattagaggtatgcagatcggcgctttgtttgatttttacatattcactgacaacgtccttagaggcagcgacccagcctaaacgcagtcccggacagaaaatcttggaaaaagtgccgaggaacataaccagacctttggtatccatagattttaaggacggtaatatctccccttcataacgcagctcgccataagggttgtcttccagcacaggcagattatgtttattgatcacttccataaactttttgcggcgttccaaactccaggtacgaccggtcggattttggaaatcggggataacataaataaatttacaacggtcggtagtgcttaagattttgtccaattcttccggaatcagaccaacattatcagttggcacttctacaaaagtaggctcataggcattaaaggcattaagtgcacccaaataagaaggactttcacataaaacaacatcaccgggatcaaggaacaatttacctgcaaaatcgagacactgctgtgaaccggtagtgatcaaaatctcatccggatcaacctcagtatgatatttatctttcattctggcagcaattttagccctcagagtcggacgcccttcggtcgtggcatactgcagcagctgctgaccttctttttccaccaggtcatgtgatactttagctatttctttcaccggaaacagttccggtgccggtaaaccgccggcaaacgaaataatatccggctgtgccgtcaattttaacagttcacggatttcagacgattgcatacgttccatacgtttagcaaatttcataagttcttcccctccaacattattagtttgtacaataatagtagctactttgtacgtttataattaaaaattctatcactcttactggagcaagtcaacgtataaaatcaaaacgcaacaactttctcgattatttgtttacatttgtctttttaaagcgcaccttttgcatcagagaataaaaaagagcggcttttagccgcccttttattattcttagtacataccacgatatttcatagcttctgccaaatgacccaaagctacaatataagccgctgtacgcatattaactttatgctccttggcagtatcgtaaactttcttgaaagcatctatcatcagactttcctgtttttcgataacttcttcttcagtccagaaataacgatacaggttttgtacccattcgaaataacttacagttacaccgccgccattagcgaggatatcaggtacaacgagaataccttttttgtcaagaatcttatctgcatcaggagttgtcggtccgttagcaccttcaacgattaccttggcctgtaccttggctgcgttggctttagtcagctgcagttccattgcacacggagcaaggatcgtaacatccatagccagcagttcttcattgctgatgggttttgaacctttataaccaacaacgctgcctgttttctgcagatgtttttcaacatcataaggattcatacctttgggattatggatggcaccgttgatatcacttaaagcaacgatctttacacccatatcatggatcagtttagcagtccagctgccaacattaccaaatccctgcacagcgcaggtagcctgcttcggcttaatacccaaagctttgatagcctcgccggcagctaccataacgccgcgtccggtagctgcgtttctgcctaaagaaccacccagacagatcggtttgccggtaacgaaacccggttcaaactggcctttaatcttgctgaattcatccatcatccagcccatgattttagcattggtattcatatcaggtgccgggatatccattttctcgccgatgatcggagcgatcctgtcaataaagccgcgagtcaagccttccagttctctttcagaaagtttagaaggatcaacaactatgccgcctttgccgccgccgtaaggtaaacctgcaactgcgcatttgcaggtcatccagaaagccagagtctttacttcgtccatgttgactccgggatgataacgaacgccgcctttagccggccccataatggtgctgtgctggctgcgataaccggtaaatacttttgtagttccatcgtccatacgaacaggaatggaaacctccagagtacgttcaggagttgcgataatgtccgcagcactcgggtcaagtttcatgacctcaattgctttgttcagaggaatttttgccatttcaaacagattcataatgatgcctcctttaaatattttttaatttaagcataattttattacatttctagttatccctacattccaaaatacatagttgaattttgtataatgtatcccctcagctttattataactctaagcacaagcggcagtctagctatttttatacgcacaaagaaaattttttgaaaattttagcaatttatacattttctgcaaatttatgcatttttaatattttccacatcacaaacgaggaaattcctcgtaaagcttcccaaaatccaaaccgcaaacgaccttatttttgtattgttcccgtaaatcttccatgccattgcgcaaatgcttcgaactgataccatattctattgaaagataggcttccacaaaagctgccagatggtcgcagcattttaacacagtaccatcaacggccctatatctcttaccgttctcattatattttagcccaatctcttccggcctgcaggtaatcttctcaccgtcaacaacagcccggttactgaattcatcttcagtaaagtacaggatatcctcatgccagctatgcggtagcagcggcagcaatttttctgcaacctgacgtttttcaatatccttgatcagatcgtccagcccctggattgagcgtttgatcggcgaaataatgtcgcgggtcagcacctcaggcaggtcgtggaataatccacacagaaaatcattgacgatacgctcatctgaagcctgcatttttacagcacagaaatatgccagagcagctacgatcagcacatggcccattactgaagtttccggcacacgcggagactgcgcccagcgtttctgaaaacgcagctgacctaccagatcaacaaacttgctggttttacctttcagcgacaatttctgcactcctgcaagatcatagtgatcctcgatctcactttctatagccgctttcgtttcctcaacaccgtaaatgccctgattgaaatgataaataataccaaattcccactgagtggccagataatgtgcagcacgcagaagtttcttttccagataattttcctgtggttcatcaaaatgtctctgcattttagccataaaaacaggatccagatcaggtatccgctgccgcagttcctcataaacccaactattgagttttttaccatgcacacgcatcaattcatggaacaccggcggcttgatatcagtcagcacgatccgatgcagaaattcaaaaataccgccttcgatcagtactcgccagttcagttttgcctgatgatcctgctcctcatactttgcaagcacatacaaaatcatcattttatgcgcttgcttatccagctccgtgaagccgttaggacggatgtgatcgttccagcgctgaatgtgcgccgcttcatataaaaattctacaaaaaccttattcagcatttacttccaatcctttcattatttataaagcagatatggccgcacctgctcagcaaactcctgtgcttccctgtcccaacgcggcagcaggcgctctaatggcacccccacgcgcaaagccatttcgcccagggcaatatctattttatagcctttaccgccatagcgggccgggtaaacaaccttgtcaggatacagttcttcaatgcagcgcaggatattcgccccggtaagcgcggcacgatatatctccgcatcagtaatataaatttccacaccctggcacagctcttttgcaaacgctccgtaagctggaataaaagccgccggtctgaaatacacgcctggcagctgcaaactgttcaatttatccgcaaccgcatctttttcagcaaagggagcacctacataataaaatggttttgttgttccgataccaaccgaaaggttagtatcccccaaaatacccgtagtcacgtaatataaagccgtagcagctgtaggtatctgcggcgaagtgcctacccacggcagccccgtatcctgccagtacattttccgctgccagcccttcatcggaatcaccgtcaaatcaaggccaagcttctgcgtatcgttgatatatctggcatattccccgatagtcagtccatgacgcagaggcaccggataaaggccgataaagcttgcctgttcttgacgcagcagcggcccctccatcaatcccccaatcgggttgggacggtcgaaaacaacaaactttttaccggctttagcacattcttccatagcataggccatagttgaaacataagtataatgccgggcacccacatcctgaatatcaacagtcatcacatcgatcgcatccagcattgccggcgttggccgtcttgccgctccatacagactgtataccttcacacctttgtattcagcgccgtccacatcgtctccggcagccacggcgccgaacaaaccatgctccggcacaaaaatccctgtcagatcagtatgcgccagtaaaatatcctcactgctgcgcagcttactgtcaacaccggtctgatttgtaatcagacccacacgcttccctgcaaacagctgctcatactcgccgatgcgttcgatccctaacgttaccgccggtccatgcaccgattttttatcctgatcacgcctgccggcatcagcgcagccggttattaaaacaactaccaacaaaatcaatgccagtatcaatcgtttcattaataaaaagcctccaaattttggaatttttccgcaaaaaatcatcaaaaactgtcattattgcgtatgagtatcaatattctctgttttttagcaaaatacctctaaattttacaaaaaattattgaattttcgggtcaaatctgtatataataagttgttatctgcataaggataaaatctgcattacgaaaggttgtgacaagcaaaaaatgaaagaaatggtccgtttacagggaatcacaaaaaaatttggtaataacgtcattatcccctctctcgatctgacaatttacgatggagaatttattacgttgctcggtccttccggctgcggcaaaaccactttgctgcgcatgattgccggtctggaaactcctaccgagggcagtatctatctggacgacgaaaacgtcactgccttgccgccctataaacgtgatgtgaatatggtatttcaacattacgcgttattccctcacatgactgttgaggaaaacataaaattcggcctgatgatgaaaaaagttcctgccgatgaacaaaaggaacgtgttgctcaggtcctttatcttacccagctcgaagagttccgcaaccgccgtccccagcaaatgtccggcggacagcagcagcgtgtcgcaattgcccgcgctttggtcaacaatcccaaggtcctcttactggacgagcctttgggcgcgctggattaccagctgcgcaaaaatctgcagctggaactgaaaaaccttcagcgcggtctgggtctgacattcatctatgtaacgcacgatcaggaagaggcattgaccatgtctgaccgcatagtcgtaatgaataaaggcgttatcgaacaggacgacaatcctgataatatttatcattatccttccacaaaatttgttgccaaattcatcggcgaaagtaatttcttcgatactgaaactgaaactttggccctgcggccggaaaagctgaacctctgcgaagaagctgaaagcgaagacaaagccgcagcgcaccccgagcctgctttttacggcaccgtcgtcgatgttgtcttctacggcactatcgacaaagtctttgtccgtcttgacaactcgaaccagaccgtagtcgcatatcagtactttgacgacgtcaaacgctggacgcccgacgaacgcgtcggcatctggtggtacgaaagagacgaggtgaaagtacagcgatgatgaaaaacggtaaactgctggtagcgccggccctgctctggctcagcatctttttcgtcataccgctgctgatcgtcgttgcagtgtcctttgccggacgcacaccgtatggacaggtcatcttttcttttaccattgataactacctgcggtttttggaacccttataccttaaaatttttgcagataccctggtcgtagctatcgtaactacgcttgccacgatcctgatggggtacccgctggcctataccatagcccagctgcctaaaaaatggcagcagccaggtctgatactggttatgatccctttctggatcaattttctgatccgttcctatgcctgggtcattatcctgcgttcacagggcgtagtcaatacgctgctgttgaatctgggccttatcgaccagccgctgcagatgctttacaatgatatggccgttatgcttggtatggtctatgcactgctgccctttatggtgctgccgatctatgtatctatcgaacagctggatacccggcttttagaagcagcatccgatctgggtgccaaaccgctgacagcctttcgtaaagttactctgcccctgaccatgcccggtattgctgccggtacaattctggtcttcatttcttcgctggggatgttcgttgttcccgacgttatgggcggagctaaatcggcgctcatcggcaatctcatccaaaaccagttcctgtcagcccgtgactggccctttggctcggcgctctccatagtgctggccgtactgagtctggtgctgatcatcctgtactacaaagctctgcaggcacaggaaggaggtgacggcgatgcaaaagacgtggcgtagccatctgatggtagcctattctttggctattctggctttcctttatctgccgctgctgatcctggccatgtattctttcaacgaatcaaggatcaacgccgtctggacaggcttcaccttcaactggtatgaagctcttttccaaaaccgccgcgttttagaggcactcaccaacagcctttttattgctgtgatctctacaatagcctctactacgctgggcacgatagccgctatcgcgctcaatcgttaccaatacaagtacaaaccggtcatcaacggcctcttatacctgccgatcctgatcccggaaatcgttatgggtctttccctgctggtactatttgctcaggcacaggtaccgcttggtaaaactacccttatccttgcacacatcaccttctgtgtttccttcgttgtcatcactgtcaacgccagactggaaggtatgcggcatgaactggaacaggcagcaatggacctgtatgcgactccgtggaagaccttccgctacgtcacattaccgctggcactgccaggtatcgtggccggcgctctgatcgcctttacgctatctatcgacgactttattatcagcttctttgtggcaggtcccaattctactacgctgccgctttacatctacgctatggtcaaacgcggtatctcacccgagatcaacgccctgtccacactgctgatgttcgcaacgatcacgctggtcgtgatcgctcagatcctgcagccgcagcacacatctgataaaaactccgattgatatcacaactaactgtgatacaatataaacaacaaataaaatgatgaaagggtgatccgacaatgaaaaaactttttgttttcctcatcgctgttttaacgttggctctcatgggctgcggcggtgacgctcccaaaaaggacgcagcagctcccgccggcggcgacaagcaagtgctgaacctgttcagctgggccgacaatttcgatccggaggtcattgccgaatttgaaaagcaaaacaactgtaaagtaaattacgacgtttttgccaataatgaagaactgctggccaagatccaggccggcggcgcgcaatacgacctcatccagccctccgattacatggtagcaactatgctgaaactgaaccttctggaagagctggatcttgataaaatacccaatgccaaaaatatcgtcagcagcttgaaggctcctgtttacgatcccaccggcaagcattcccttgtttacacctggggcattaccggcatcgtctacaacaaaaattttatcaaagaaactcccacctcatgggaagacctgtggaacccggattataaaggccgcgtgattctgcttaacgacaaccgcgaagttatcggtatggcactgaagaaaaacggctattccaacaattccactgaccaggctcaggtagaaaaagcttttaatgacctgaaaacgctggctccaaacgtactggctttcgacaccgatactatcaagcagaaatttatcgcagaagaagcctggatcggtactatgtggtcaggtgatgcttcctacacctacaaagacaataaaaacatcggctttgtgatccccaaggaaggcgctaccatctgggcagacacctttgctattcccaaaggcgctaaaaacaaagctttagctgaaaaattcatcaacttcatttacgaacccaagatcagcgctaaaaactacgaatatatcggctataacgaccctaacgaaaaagcaatggaattccacagtgaagaattccgcaacgatcccatgctcaaggtcggtatgtataacatcgacaaaggcgaatggctcatcgatatcggcgaagccctgcctatgtatgaccgttattggactgaactcaaaaccgctaaataaacacgtagcgacctctgtttatttaactctgctttaagatcaggctgtctcccatgaggcagccttttttataacacattaaaggggaagtgtttagctttatgaaaaaacttacatatttactgaccgctctctgctttgccgttctgctgggcggctgcggatcggacaactcagctaaagatgccggagcgccccaggtcctgaacctttacgggtgggcagattattttgatcccgatgttatatctgattttgaaaagcaaaacaactgcaaaatcacctatgacgttttttctaacaatgaagaactgctggctaaaatgcaggcaggcggagcccagtttgatatcatcatgccttccgactatatggtaactaccatgcgcaagctggatatgctggaaaaactggatcttgccaagatccccaatgcaaaatacatcagtgctgacctgcgcaagctgccctttgacccgaccggcgaatataccctgccttataccaccggcatcaccggtatcatctataacaaaaaatatgtcaaagaaactcctgccaaatgggacgatctgtggaacccggaatataaaggacatgtactgcttttgaatgactgccgcgaagttttcagtgtagccctgaaaaaacacggctggtctaataacagcactgacccggctcaggcagaagcagccttcaaagacttgaagcagctcaacagcagtgttattgcctacgataccgaaaacctgaaacaaaagtttattgctgaagaaggctggataggcattatgtggtcaggcgacgccgcctttacttacagagaaaataataatgtcggttttgttgtcccagatcagggctcactgatctggtcagataactttgccatacccaagggctgtaaaaataaagaactggccgaaaaatttatgaactatatgtacgaccccaaggtcagcgctaaaaactgggaatttatgaactgcgccaatcctaatgacgaagcactcaaatatcactcccaagcctaccttgatgaccccatgctgaaaattggcaaagaaagcatccccaaaggcgaatggctgaccgatatcggcgacagtatcactatgtacgaccgttactggactgagctgaaagctggtcaataataacaaaacaggttcaccgctaaagcggtgaacctgtttttattaacctgcatctcagccaatcagctgcagcagttcatcgatattctttttaccaaagctgatcttatcattataaatcagacaaggcacactcataattttatattgctcgcgcagctccgggaacaaattgatatcaaatacatctatctcgatcccgtcattttcaactgccagcctgccggctgccattaccagctcggggcacatcgtacaggacaatgaaatgactacctgcagctttttccttccgctcagtgctttgaccgcagccaactgctcctcactgatagcctgacccggcccggccgcattatacagtgtcacgataaatgaattaaactcatgacctcccggcacaccgtgaaaacggaatcctaaagacgttccatccgcacggcagacctcgatatatggcagcccgtttgcagcctccccggcttcttcccagcgcagatgagcgcttaagggtgtcagctcgtttaaaaagccgcgtatttctgctgccgcccggctgttatccaatgcggcccgcagtaataaatcatctgtaaattttgcaaaaacaggcgtcagctgcgttttaatagcttccgaaataaacgcgccgtcatcggcagcagctgcttccgtctgcttaaatgccggctccgtgatttgctttttagttactgcaaaacgcggcagcttcaacttatcgtgcagctgtgcagcatatttctcaagcgaagtagctgctttagcgccgtcagacaccgctgtgaccacctgccgcagatttttgatgcacaagtcaccggcgccataaacgccgtccagattagtcttttgatccatatcggtgaccagataaccttcacagtcagtttccaaaccgttcaacagcgggccgcctacaggaacatacccggcaaaaacaaatacgccgaaggtcgcgtcactggtctcataacgtgtacgttcaccggtcttgcagttttcataaacagcataacgcagtacgtctcctccgccgacttccagcatggcagtattatacagtactgttatctgctcgtgccgtttcgcttcatcggcgatcgacccggcacaggtaaaatcatcaccgcgcaccagcactgtcacatgccgcgcataacgggtcagaaaaatcgcttcttcggcagcagcaaaaccaccgcccacaacaaatacatccagaccagtaaaaaattcgccatcacaggtagcacaatatgctacgccgcgcccgcggtattctgactcgcctgtaaaacccacctgccgtggcacggctcccatagccatgatcacacccagcgacttaaaggttcccttatcggtatgcacctctttgatatcgcagtccagcttactttccaaagcctctgccagtaaaaactccgccccgaagctttctgcctgcagacgcatctgctcagtaagctctttacccgtagtttttaaaacgcccggataatttaccacctcggaagtaatcgtgatcagaccgccgatcttctctttttcgataaccagcgtcttatacttggcccgggccatataaacggcagcggcaaggcccgcaggcccgccgccgatgatgatgacatcatacatccggtccatgatcagataatccctaccagatcaaggctgggtttcaaagtgcttgcgccaggctgccatttggcagggcagacctgatcgccatgttcggcaacaaactgcgaagcctgcacacggcgcagcagctcatcagcattacgtccgacattgccggcaataacttcataagctacgatcctgccttccggattaacgataaagctgcctctttcggccaggccgtcagcttcgatcatcacatcgaaatctcttgccaaagccccggttggatcagccaacatcggatactgtatttttttgatcgtatccgatgcatcatgccatgccttatggacaaaatgagtatcgcaggatacggaataaatctcgcagccgatttttttgaattcttcgtatttattcgccagatcctctaactcagtcgggcacacaaaagtaaaatcagccggatagaaaaagaacaccgaccatttccctaaaatatcttttttggtaacctctttaaaatcgttgcctacataggcctgaaccttaaaatcgttaacttccttgttgatcaatgacataataactgcctccttatataaacataaattcagtcgctttagttagcgttcgctaacgcacctttaatataacatatgtcatttaaaaacgcaagggaaatttatttgaaattaatattcattattgtaattgattttgcagctctacaaatcactgcactgttaataaaaatcccgatgtgaagcacgctccacatcgggatttttattgaataacgctgttttatactgcaatcgccaacctgttaatcacatttttctccattttctcctgtcaaaaaatatttcaaaaacttttcttccggtattggccgtgaaaacagatagccctgaccaatatcacagccatactcctttaaaatctgcagctgctgctctgtttcaaccccttcacccacagtttcaatatttttatttaccgcgttgcaaagattgatcgcctgctgaatgaccgtacgcgacttatcattttcaaaaatggtatcgatcaaacttttatcaaattttaccacgtcaaaatcattttctgccaaagcggcaatattggaaaacccgctgccaaaatcgtccaaagcaatactgaaaccagcagcatgaaaatcatccatcagcctggtaattaattttttctccaggccgccgatactttctgtaatttcgatctcgatcatctgcggctcgatctgatacttgctgcaaatagccaccgccttctgcacgacattcttttttcgtaaagtcgtacgcgacatattaacagataccttgataaattttttgccatgtttctgccagttatgtatatattcgcaaacagtttccagaacgaaaaaatcgacaaagcagatcagtccattctgttccaattccggtataaaatcaattggcggaacaaggttgcctttaccgttcagctttcgtaccaaagcttccgctccatttaatttttcatcacttaaatttattttgggctgcaaataaacggtaaacatccgcttgtgaatttcctgcagcagttttttagctgctttaaaatattttctgtctatgctgtgcaaatgtgtatgatatgtatctttgacttctttcatttttttatttgcagtcataaactgtttttgcatgtccagaccagtacttttccagctgctgcctacagcggtgctgacatttttaatagcttttatcttttccttaaaagttttcagagcttgttcaaattcagctttagtctggtttatgctcaaaacgacaaactcgtcgccgtcaatacgaaagcaatggccctcaaatacttcaagcagacttttaccgacctcttttaagatagcgtcgccaaaaacagaaccatactgatcgttgatccttttcatctcgttgatgttaataacagttacacctaaagtctccggcaggtcatttgcaatactttcagcaacttcttcatagtatgagcggttaaaaactcctgtcagcatatccgtccgacgcatttcttccagtttttcataaatacgtttttcttccagttttatggtttctgaattaataacagataaaacctgaaaacgcacttttttattattcgtacaaaccaaaatactttttaattgcaaatatcgcttcaaaaacggctgataaacctcttctaataagaaaccctcctgggaaagcagcttattctggcaaaaagaacatactgttttttgtccatgcaaaacttcataacactttttgccaacataattcccatcagccaaaaatttcctggaaatatttttggcttcctcattcatatagataagctcatttttttcaatatctatcatgcagacagcgtctttgacctgagtataaacctcaaaatctttttcactggtatcaattttttttattctctgcccgctcatttcgacacccctgttccctcttttctcctgcaaaacaaatgccgcctgctgatgcaggcggcatctataaatatagcgcgtgatatccgccacatccgacaattttaaagttttaaaattcgaatctcaccccggcattgatctgccatttcttttggatctcggccccgaagctgcgttcgatatcgccgtagaactgactggttttactgagtttgatattagtcccaagacccagctcaaaccaggtatcaccataatctttggaagtcgccagagtttctccgttagcagcctgcatcgtgatatcccgttcaccgccgaactcgtgcagcagcgaacccttgatataaaaatcactcctgccgtctttggccttttgacctgctaccaagcctacccggccgatgaaactgttcattcctccagcatacacttccgttccgcggtcagtagtatagtgtgcgcttcctaaacgtcctgctgtaaactgcacctgcggttcgataaacgtgccctgttcccggttcaccttgatcgttttgccatattccacgctcaggctgtacgcatgagctttataatctgccttatccgcatattctccataggatttgatatccgtactaaactgacctatccgtgccacaacgtcagtataattacccttttctccataccatgtaccgtacagactgcctgacagcagcttatccttactgctgccactgctgtagccagccttacctgttccgcgatctatggcaaaaccataagtgcttttttcgttatcggctttatcgtagcccagctggaacaggttatagttgccgtcaaaactgccgctgccaaattttccgcctacgtaacgggcccacaaaccgtcaccatcctgctcattcgtacggtaacgcaagtcgcccaaccgtttgcgcagtgtgtcattggtattacgccacaaagcatagctgttatcggcaccgtccagcagtacttccgtatcgtcattgacagttttttctattttagtcagataccattgctcttcagtgccgacagcattacccgcagcatcaaacgcctcagtccctttttttattgttggcgttacatcccacaaaccgccgttattcaactctttgcctgtgaaaacagtatttttactgtcatcagtgatcaatagcaggttttttatacccgttacctgtatgttattggcaaggctgacatctttaacgctgacgtaagtagtgcctgcatcagcatttttgatatgtactttatcgccattgacctcgcttgctagatcagtatctaaaataaaactgccgccggtgcccttataatcccgtacttccaacttatctgccccagcccgcatatcgaccacagcattatttttattttccaaggtggttgcttcactgtcggcagtcataaaccactgcgaagaattatcaaaactcagatcagtagtcctgtttttatcattgctgacccccaagctggctccacgtaagaatgactgcccatttttcatgctgatatcaataagcgaaccattaaccgcatccgtagttaaatgcttcacatcacccgtcagctgtatggttttcccggccgctggatcaatagtaacgctggctgtagttcctcctgtaaccggtactggcgcatccctataacaatcagtcacgccaacggccagacctttgtttgtctgtacaatgacatcaccgctatactcagcagcttctccggctaccgttgcaacagttctgatcccaataccgccttcactggctataacgacacttacatctccggctgccgttattttgccgctgagccctacagtaccattctgtcccgcggcatctaccgcattgccaagcaggctgacattagtctgcgaaccagattcgaaaacagtttttgccgtacttaaaacacctaaaactccatattcagcatccttatttgccgtacctgtttgcattccggtcgcgtcaatagcaatattcacaacagaaccagccgcatgtttgctctctctagcggtgctataattccagaccccctggatcagtttcgaacgatttacaccacccgcaggcttggcattgatcataatatttgtttctgaaccatttcctgtttccaggctgcccatagaaccggttatcctgtcccccataatagcagcccgtccctgcgccgctgctcctttcttttggtccaaagtgatcagcaggtcattcttccgtccctccaaaagcgtattgcctgtaaagccgacaacatacgttgtataaaataccctcggccctatcaaaaccattttgacgttatctttagcatcagtcatcccgtcatctatatcagaaacaataccgttgacattaaaagacttgctgccgtcaatgaaaacgttcaattccttgcctacagtaagcttgcccttggcataagcacctacggcactctcagaattcgtaacaatatcaatattcaaagcacccttgacaagtagatcaggagcagacgcagtatctgtcacatacagtcctgtgtttccattctgtaattttatattgatattgtccgcagtcaaattactcttacttttgatgcctgtcagcgcataaccacttttcagttcaagctcaatattgacatctttaaaatccaacccgcccgttccggtattcttgataccgtacatactaccgctttcgctgacagcctgaatatcgatattatcagctgcaaattttcctgaattatttataccgataaaattgccctgcatcataccggttattttgagatttttagccaaaaaatctccgccgtaattttcaatgcccgcattatagatacctgttgcattgtaggtctcatccttgccttggctgttgccgcccaaatttatttctgtattctgcgctgtaatattgatcttagaagtttgggaaccgtaaataccgtaattaacagtatagtcatttggatcactgtgtatcgcgttattcgtgatcgataacagctcgccgccaatgtttatggtggcataattaccggcacgaacggcataaacatccttatctgttgctgctgtcggatcgtcaaggtcaacagtaagatttttatcaaaggacagttcgatcctaaaaccgtttccaccagtggaacctgcggaaacagccgaagccgctttataactaaactgactctcaacaaatttatctattgataccgcgtcttgatacgaataatatttatctttatcaccggtatattcttctttggaaatagcatcgccggccaaaacactgttctgctgcagcgctgccagcatcaaacttaatacaaccgcccgttccaacttctgttttctcatttttctctttccttccatattttcccaacaaattttgtatttgctgattgaaatttatgcagtacaagttattattccttttgcaaatattttatatctatttacaatatttttaatatattaccataatcattatctgagcgcaagattttttgcataaatgaaaacttgcacaacttccttctgtcctaaaaaatttacaggcagtatcttctgcttacaacgttagtattgagttactcttttgttaacacttcttggttttacttaaaaacaacctgcgagagaagtaaaaacctaaatgcttttaaaagactctgctaacgtcattgaatagtaatactgtctcataatacatatggcaatgaacaagaccaaagtttacgtgtcaaaatattatttcacatatttttcacaaatatcatgtaaatgctggcaactgctgctaaaaaactcatggcagttataaaaaccacctgcggaaaacttttaaaattttttacagaccacgtaaactttcacccttctcaatgccatatgtatagtgcaggggtaaaacactctatgccaaccacttttgaaaggagcatcactatgcaaatatcatcagcactgtatttttgataaaaaataaaaccgcagacttgcataagcaagtctgcggttcaatttttcacttttcattgttttattgtgcggtaccgtcctgtgttttcatatctatcagaggttcatatccgaccggcggctctgctgccagccactgctgcttacggtcaccggctgcaaacagatgcgaatc

SEQ ID NO: 9983 - DNA, 909 bp, Unknown
  gut microbiota DNA sequence
cacccttgatgtattgaaattctaaccgcgagagtaacgaaatccgggacagtgtcaggcgggcagtttgactggggcggtcgcctccgaaagagtaacggaggcgcccaaaggttccctcagcgcggccggaaatcgcgcgaagagtgtaaaggcagaagggagcttgactgcgagtcaaacacgacgagcaggtacgaaagtagggcttagtgatccggtggtaccgagtggaagggccatcgctcaacggataaaagctaccctggggataacaggctaatctctcccaagagtccatatcgacggggaggtttggcacctcgatgtcggctcatcacatcctggggctgaagtcggtcccaagggttgggctgttcgcccattaaagtggtacgtgagctgggttcagaacgtcgtgagacagttcggtccctatccatcgcgggcgcaagagatttgaagggggctgctcctagtacgagaggaccggagtggacgaaccgctggtgtaccaattatcccgccaggggtacagttgggtagctacgttcggaaaggataaacgctgaaagcatctaagcgtgaaaccagccttaagatgagatctctcatagagcaatctagtaagacaccttaaagaagatgaggttgataggtcgggagtgtaagtacagcaatgtattgagcggaccgatactaatatgtcgagggcttgacttaagtgacgccctgattgtgacgagcgcaagcgaagtcagaattagaggtggcggaacttatatcgaaaaagcgacctgaggggagcgttttcgatgaaagtgaatcgccgaaaagaagtaaaaacacacagcgaactcaaaagtttgtactcttctatatagttttgaaggcttaaagaaaaccttc

SEQ ID NO: 9984 - DNA, 72962 bp, Unknown
  gut microbiota DNA sequence
ttcctttaaaacaaaataaaaaagccgcagatacgctctgcggctaactttttaagtggtcggggcggcgagattcgaactcacggcctcttgtacccgaaacaagcgcgctaccaaactgcgccacgccccgacttaagttacatcacttactgcaacgtgaatattatataaaataacaaatagtttgtcaatgatattttttatatttttaaaataaaaagcttccctgctgccagagaagcttttcagacatcagccttgtgtaactacacgaatattagtaacgttgaatgcttctgcgatagcaggcagacattcgcgttcgatattagtacggtgcagctcattatcggcgaccagcatgattctcggtccgctcaaattgatattatgcacattactgatcaagcgtttgaaactgtcttctcccaagatctctttcaatttggcaaggccttccatcagatacggcttttctttagccatacgctgttccagcggagtaaacggcactgtaactacacgcgcatctttagccagtacaaaattttcctcatgctcgcctggtactactaagtcatctctcatggttttccctccttcactgcctaattgttacagaattattataaattattgacgatttgcagtcaagccggcaggattattataacttaaagcgaatatatataaaatattttgaatttatgatgggagttgttaatatgtctttttttgaagagtttaaaaaatttgctatgcgcggaaatgttatcgatctggcagtcggcgttgttatcggcggcgccttcggcaaaataacatcgtctttagtagataatattattatgccccctttgagtctcttatttggcaaagtagatttttccggattattcatcagcctgaacggacagcattacgatactttaaaggctgctcaggatgcacatgcccctattttagcctacggtctttttataaatactatcgttaatttcctgatcattgcttttgctatttttgtactgatcaaacaaatcaacaggcttacgcctccgccggctccggctccagaaccgcgtttatgccccttctgcaaaactgcaatcgctgacgatgcgacccgttgcccgcactgtacttcgcaattataaaaacaattcatttttgtgcatcaaaggcgcttctttcagtaagcgtcttttcttatttgcgaaaccagcccattcgttgtataatgtttagaagatttgcttcttcactttatcacgaggaagtttccagtaatattaggaggttatttcatgtccgtttatgacgtattaaaggaacgtggttttttaaagcaactctcccacgaagatgagatcaaagagctgctggaaaaggaaaaaatcactttttatattggtttcgaccccacagccgacagcctgcatgtaggtcattttattgctttgatggttatgagccatatgcagcgtgccggacatcgtccaatctgtcttttaggaggcgggaccggtatggttggcgaccccagcggcaaagacgatatgcgtaaaatgctgactcctgaatttatctctcataacatagcctgctttaaaaaacaaatggcacgctttatcgatttttctgaaggccaggctattatggtcaacaacgccgactggctgcttgaactgaattatatcgaactgctgcgcgatgtcggtgtacatttctcagtaaaccgtatgttaacagcggaatgctttaaaaaacgtttggaaaaaggcctgtctttcttcgaattcaactatatgatcatgcagtcttatgacttcctgcagctgtttaaaaaacacggctgtatcatgcagctcggcggtgatgaccaatggtccaatatgctggccggcgttgaactgattcgccgcaaagaacagaaaccagcatactgcatgacctgtaaattacttactaccagcgatggacgcaaaatgggcaaaacagaaaaaggagccctgtggctcgatccagaaaagacttcaccatatgatttctaccaatactggcgtaatatcgacgacagcgacgttgaaaactgcctgtcactccttaccttcctgcctatggaagaagtacgccgcttaagctccctgcaggatgctgagatcaacgaagcaaaaaaagttctggcttatgaggtaacaaagctggtacacggagaagctgaagctgaaaaagcacaacaggctgctgaagcactgtttggaggaggaggcgcacttaccgatgtcccgactattgaaatcactgctgctgacaccgaaggtaaaataattgatgttttgaccgcaggtaaaatattcagcagtaaacgtgaagcccggcaaatgatccagcaaggcggactttatattggcgaaaatacagtgtccgatcctgaggcaagctttgcgccttcaatgtttgatgcagaaaaaagcctgcttatccgtaagggtaaaaagaaatatttccgcctcatcatccagtaatttaaaggctgcctgagggcagcctttacttaatagtagaattatcagaattttatatctattcacgatgggagactttttatgaaacagaacctgacgttttgggaaatcttaccagtagggttgatgctcttttcgtcctttttcggtgccggcaatctaatctttccaccggcattaggccaagccgcaggcgaccatttctggtcagctgcgattggcttctgcgttaccggcgtaggtatgccgcttttgggtattattgctatggcactaactaaaaacgataaccccaatgccctggcagatcctgttcatccgaactttgccaaaatcatagttatgctggcagtactgacgatcggcccgttgtttgcgattcctcgtacaggtgcggtgtcttatgacgtcggtatcagaccttttgtccctgaagactactataccgcaggtttggctatttattcgcttttctttttcatcgtaacctatgtcttatctataaatccatctaaactggtagactggcttggaaaagttttaacgccaatgctgctattaagtctggctgtacttatcatcaacgttctgcttgctccaatgggtcctatgcagctggcaacaggcagttatataaaccttccttttctcagcggctttcaggatggttataacacaatggatcttctggcgacgcttctcttcggcgcaaccgtcatcaatgccattaaactcaagggtatcaccgatgaccgtctgctgacaaaaatctgtgtctactccggtttgatcgcagcatttttcctagctcttatttatgtagcattggcttataccggcgctaccagcgtcagcattcttggaatttctcctaacggcggtgtagctttagctgatatcgccaactattatcttggtgcggccggcaatgttgttttatgtctaatgatcttttttgcctgtctgaccacaagtattggcctgacagcttctgcagcctcttattttaccaaagtaacacacgaacaggtccaataccagaggtttgtagtggcgatctgtgttttcagctttgctgtttccaacgttggtctgactaatatcatctctttttcgatacctattctctgcgccctttatccgattattattgctttagttctgttgggagtaacctctaagcttttccatggcgataaacgagtttatcgctgctgcctgttctttacaactatttttgccctgctggatggactaaaggcagcaggtatcaaactttcagccttagaaaccatacttggcaacacaatccccctttatgccgacggcttcggctggatcgtaccttcagtctgtggcgctttattaggattgctttggaaacttctggttccagcacaaactaaataatccattttcaaatttatgcgcagtttttttaactgcgcatttttatttcacaaataaaacagcatctatcaagcaggaaaagagttataataaagaaaaggagtgtgatattatgacacagacgaacggcttttttactacctcagaccaggcgcatctttattatgaagttcatggtaaaggtcagccactttttcttgtacatggctggcagtgttcttccagattttggcagcacaatattccagaactttccaagcactttcaggtaatagttatggataaccgcgggcacggcaaatcctccaaaggtctgcagggccaaatcgttgcccgttacgcacaggatatccgcgaactttctgaatttctgggtctgaaaaattttatcctcatgggctggtctttaggcggacctacagtgctttcctattggcagcaatataaaaccgacagcaatctgatcggtctggggctgatagatatgacgccattccctttcagtcctgaagaatggaacagtcagggtttgcgcaactacaatatggaagggttcaatgcacaggtcaaccgattggtcaacgaacgggaagaatattttgaattttttgcaaacgcaatttttaaagacggcaaacgaccagccggcacagactgggtaattgaagaattccgcaagctgccgccctggctctcagcagccatctacagcgactatattgcaacagatttcactaacgttctgccaacaataactgttcccacgctggtcgtcaacgccgacggacctgtttttgcctggggaatcaagcagggcacttacctgacgtctctaatccccaatggtaaatttgtagcttttacagaaagcggtcatatgctcttttatgaagaagcagaaaaattcaatcaaacagtcagtgattttatcaaagactgtctgccccagaatgtttaactaaaaaaacaaaaggctcccgaaaattcgggagcctttaactttttaaaatcggcgtaagtgcttcagcaatgctgcgcatcccgctttgatctccgcatacgtaatttcaaaatcaccagtataccagggatcagcaatgtcacgcggcaactcggtaaaatccagcagacgatgcaccttttcctgcgggtcactgcctatgatccgcagaatattactgatattggcacgatccatacccaaaataagatcatatttttcataatcttctttggtaagctgcacagcatatttacccgccgcactgatatgatcctgcgccagttttttacgtgttccctgatgcacaggattacctatttcttccctgcttgtacctgccgatgcaatcacaaacctgtccgcaagcccttcttttttgatcatgtccttcagcaaaaattctgccattggcgaacgacagatattaccgtgacaaacaaacatgatacgatgagttcgttccataaaacctcctcaagttctgcaaaacaatgtaataagaacaatattttaacgttgtcatatcaatagtttttgatatgcaaaattaatgattatatgcttagtaatctggctgcttttattatactaaaggctgataaaattagaaagaaaaaactttatgttttatttattctctcccccatgctccgtcccaaacgatacgccgataattttctttatcagtatcgccttcggtattaaagcacaacaccaccgagttttcgtccagctgcaaggcctgtttcagatcacttaagcgctcgtcgcgcatggcttctgccaccagtcccacggtcgccgcaccgctttcaccggcactgactctcgtatcacccgccagcggatttcccaaaatacgcattccctgagcagcggcataatcaggacagctgataaaaccatcgctcaaatttccaagtatttcccaagcaatactgtttggctctccacaggccagtccagccataatcgtctcaagacggcctgttacactatgcaagctaccgtcatttgccgcggctgtctgataaaggcaatcggcccctttgggttcaactataaaagtcagtgggcatgaactgccataaatatcagcaaaaaatccctgtacagaacctgccaaagagccgaccccggcctgcaaaaagatatgcgtaggcttgaccggcagctgctcatacgcttccaaagccattgtcatatagccctgcatgatccacagaggtatccttgtatacccatcccaagctgtatcctgtacaatgatccagccatttttctgtgccagctcactggtatatcgtactgtatcgtcatagttcatatctgtgatttcggcctgcgcaccttcggcacgaatattggccagacgttctgccgcagagccctgaggcatataaactatcgcctgctgcttcaatctgttggctgtccaggcaacaccacgcccatgattaccgtcagtagttgtaataaatgttttgctccccaacaaactgcgcacctcatctgagaccagacgcatataaggtaaatcatctatatcttcacctaattcattagcgatataactaccaatagcaaaactgccgcccagaactttaaaagcattgagtccaaagcgataggattcatctttgacaaaaaggtttttgataccaaaatgctgcgccagactggtaagttctatcagcggtgttggactatactctttgaaactactgtgaaaactccgcactcgacgtgcctgctgctcagtaaaagcttccgttttcgctgcaattttccggttgcgctcacgcagcacccacttaaaccttgctttttccatagtttcctccctgcacatcagttaacattataaaaaatgccgcgacagaagttaccatcacgacattctcatcatttaaccaatatcaaattctgccgctccggcagcctataatatgcaaacacaaatagcggtatttattcaccgagaagcctttataattatgtcgacttcctccgtaaaattctgcattcctgttcaccgcagcaccttcagcttacagcaaacgatacctgatctagaacattatgtcgccgggttcataatcaacggtcgttttgacaaaggccaattcgttgcaatacggatattgcgggcaatatacacattctttccaaaccttctgcgggagcttttctttcgccgtttcgatataatcacattttgcaaaaaatcccggctgataagtaagggtaaagaacatcttcactccgcgttcaatgccttcagcttccagcagttcaaccatttttcgtccaatcccctgtgttttacgttcaggatcaacagctaaagaacgaatctcagccagacgatcccaaacaaagtgcagtgcgccgcagccaatcacatgattgttctcaacggccaccacgtaatcgcgcagattttcatagatggaattacgcgaacgcggcagcatcaggccttcggcagcataatcattgagcagtttatgaagcttctctacatcatcaaaagtagcagagcgataaataaccatgggcgcactcctttcattttgtattttctcaatattaccattattgagccgtaaacacaatatatttttataagcgtttttttagcaagtcggcagccgctgtcaaagcaataagcatagccgacggtcttggcggacagcctggcacagctatgtctaccggcaatactttatccaatgcaccgacaatagcataggtagacccatacgttcctccgctggcagcacaggcaccacaggccattaccagcttcggttcttccattgcttcataagtcatttgcactgcctgcgccaaattacgtgttaccacgcctgtaaccattatcatatcagcatgtcgcggtgaagccacaaaagcaataccaaaacgatgcagatcatacagcggattactcaaagcacccatttcaaaatcgcaggcattacagctgccggcatccaaatgccgtacatgcagtgaacgccccagcttggccctgatctctcgttctatggtcatctgtacatctgtcaatatctccggcaaagtatcaatatcagtatgcagcagcacacctgcagcacacgcttctacacatttaccacaaaaaaggcagcgtttataatccaatactggtttgccatcacacagcgcaacagcaccagtcgggcaaacagccgcacattttgcacagccattacagtcagttccacaagtcagttgtccccgcattcttggagcaccgctggtcgttacatcttctgttgttatcttattggccaaaatcccctgtaacaatttaagcattattgttcctccctaacgatccagacaggcatagcataattcaaagcttttattgatcagcggaaaatccggaataatatctccctgcacagctatggtaagcgccggccagttaggataggaagctgaacggataaataatctttcgatacatccgtctgcatccagcatcagccaatgcagattactgccacgtgctgattcgctgatcccccagctgccagtcagagttttatacgccagttcaccgcaatgcagctgcgaatcgtcttgctgcaacagcttcaatgcttttctaatcaaagcgatcgattcggcaacctcacccatccgtacctgcagcctggcatagacatcgccgtcggttttcgtaattacattaaaaggcaattcggcatataaaccatatggcagatccctgcggcaatcacagtccacacccgaagctctggctccaactccgaccagcgccaggtcaagcgctacatttttactgataataccagtagttttagcacgattcaaaaatccgtcctgctcggcaatgatctgcacaatatcgttgtattcattctcaactttagttaaagcaactgttagttcagtgcataaagactcagttaaatcatattttacaccgcccggaactatcaggccacgcagaaaacgattgccggctatcgcctcattacagcgcagcagtatttccttcaagcggctgcccatactgataacaggcgcaaatccgactccggcacacatattacctgtatcgccgatgtgattataaagacgttccaactctgcagctattgtacggataagccaggctcgtctgggtacattctgaccggacagcttttccagtgcctgacaatacgacaaggtattggccacagaacaggcaccgcaaatccgttctacaatcagcagtgcttcctctggagttttaccttctactgctttttcgattccccgatgagtaaaaaacaacttggcatctaactgcagaatagcttcaccggcctggctgaatcgaaaatgccccggttcaatgatacctgcatgaataggaccgacaggtacttcgaacagcccatctccgtgcgaaacagccatttcatactttcgctctccacgcacatcggcatcaatatcaacacatttgcgcagcggatgaaaatcttcaggataagtttcatgcaaaaccaacggccgcagatccggatgatcatccggtataaacccgaacatatcatgcagttcacgttcataccaggcagcagccggtaaaacaggtgttaatgctggataatgaagatcactgcctgcatcaaattcagcctttaagatatctatatcatgcttttctttattttcaaacagacagtaaacagcatacccgccgccgaagctggtttcatcggccccgaacattgctgtcagcggatgcctgccaccgcgtgaataaatattagcagccccccgcagaccttctggtttaaccttcatcaaaattgaccgcctcctactatccgtaccgcctgagccagcagtttttccaaataaggtatttcaccgattccggcacctatgatgacgctgcctaaaagcagcgctgccagaaacggcgtatccgcatgctcaagcaagtctccgacaggctttcgtttagctttatcacacagcattcgtaaggcatggtacaaaataccgatcagtatcccggcaagcagaacaatgatcactatacccaacagatagtgcccgcttaaaaacaaactgtataaaatataaaatttactaaaaaacaaacccaacggcggcatacctaaaattccaataatacccagaagccaaaacgtcgcagtatgaggtacatcaccgatcattccatgaatacgcatcatatttttagtctgatattcctgcactatagtaccagctatatagaacaatacaaatttgatcagtgcatgattaaacatatgcactaaggtcgcgccaatagaaagctggctgaaaacaccgatacccgctatcatcagacctatattttccattgaggaataagccagcatacgcttgatgtcgcgctgcactactacaaacggtacagctacagcaatggtcagtgccgcaaatgccaggcacagcgtactgataaattctacacctacagtcggtatcacaactactatgttacgcagcaatacataaatagcgcaggtacataaagctccggataaaaggccgctggtcagagacggagcttctgaataagcatcaggcagccatgtatgcatcggagccataccgattttagtaccataaccaataaaaataaataaaaaagccagctttgtcagcgacgggttaagaagttctgcatgttcggtcagccacagccagctcaaagccttttcagccccaagtgccgaaatctgcgcataatacaggatcattgttcccaaaagtgccagacaaataccaacagtacaaaccatcacatatttccaggtcgcttccagagcactgcgggtaaatttaaatgataccagaaaagcagacaccaacgttgtcgcctcgatagcgacccacatcaatcccagattttttaccatcagtaccagaaacatagtccaaacaaacatctggaacaaagcataataacggccaatcaaaccaggcgtacggctaagatagccacggctgtgctcgcgcagcagatatgacttggaaacccatgctgccgctacatataaagctgtaatgatcagtattacccagacattaagcgcgtccagataaacatattcactgttaaaaggctgtgttggcgtaaaactctgtgctaaaagaataactgcaacgcctacagcagcagcagtcaagcgattaagccagtgcagcaaactgccgctgcctaaaacgccgctgacagctaaagccgcacaaaccaccggcaaagcaaaaattatataaatcagctccagcatcccgtcaccccttcagctttctcaacacattggtatctgtcgtcataaacgacaaacgcagacggttagtcagtattaccagtaccatgacagcaatcagcacgtccaaaaagatacccatttctataaccagaggcagaccttccgtcatcgccatccctaaaaggtaaatgccattttccattgttatcaagcctaccatctgcataatagctcggctgcgcataacgatcaacgtcagaccagtcaaaatcattacgatggaaagcgccagaatatcgcgaccttccactccgggcagcattttatcaacaataagataactcagaaccagaaaaactgcacttgcggcagttgaataattaacattgatctctgaaatgagctcacgctcatcagccagcttactgacaagccgcagcattgcataaggcactaaaaggacttttacgataattgtcagcagtcccggagcataaatatgaatcccctcgccatgcgcaataccggaaataaagcaggcaagagcaataacagccgattgaacactaaggcagatgattgcccggcgcaggtccataatacgggtctgcaaaaagacaacgaacaataagacgattaccaaaaaattcatcatacccctccttactgcgctacaattgccagcagcagtaaaataccggctgcggacagatatacgcgaactttgaacagacgcattttattcttcagagtttccataacacttaccgctgtcgctgccaagagcactttcactgccagcggcagtgaaagcggcagatacaacaacgcaaacaagaccaaaaatactaatgttttcagcatgcttgcccaatggatcactgccagcaaccgtccggaatattcaaggagcatacactcgtgaatcattgtcagttccaaatgcgtatcaggattatcgacaggaattcttccattctcagccagcagcaggcaaaagaaagcaatacatgtcagcacgctggctacgcttaaataaaccgcctgaaaatcaagcgccattcccgctaaagttgtgctgccactgcgcagcgcattcaccagtacagccagcaaaattacaggttctgctaaaacagaaatataaatttcacgggatccgcccatgccgccaaacgccgtagccgtatccagagacgataaagtcataaaaaagcgccccagcgttagaacaccaataaaaacaaagacatctccaaaactgaattgagttccaaaaaagttaggcagcatcgccgctgccactactacactggcaaaatataccagcggcgcaataataaaaaccagactggtataaggcgtaagtattgtaggcttctgccaccatttataaagatcgaaatattcctggaaaatactggaaccgatacgattctgcagcaaggctttcactttttttatgataccggcaactaaaggagcgctgcacaaaagcagcaacacttgtgccagcatccagcccaaatcataaatatgcatagccatttacatcgccccccaaatcaaaaccaaaagcatagccaccattacataactgatatacagacgtacgctgccctgctgaatacgacgcagaaaagaagcagaccagaccatatagtgctgaatcggtacatatagcttttctgtaaactgatccgggatcgataatttatattccagctgccgcccaaaatacggattgccctttttcagataggttgccgttcgctttggcttcagcaaaaaatcaaaagcccggcggagcggcttggaaaaaccagtagctgaatattgctggcgcgctgtaggataagtaccgcagttccaagtaacttcacgatgaacaaagcttttatcgccgcaggtcataagggccacagccagtaaaacaaccgacaatactgtcaatagcagtaacggtgcataaactgcataacttccgctgccaaaccaccaaaccttctgcatatctgcaaaactgcgccaaagagtttgctggttctgcactgccgtttgcagcacagcgactaccggccccgggacaataccaagcagcaataccaatattgccgccaaccccattcccaaacgcatcgaccaatcgctttcgtgagcacgttctacgagcctgcttcgattccgtcccaaaaaaactactccataaagacgcacaaagcaaccaactgctaaagcacttgctaaaccgaacagaacaaaagccagtgctcctaaaagccgcagcccctgtccttcactgctgccggccaaagtaacaaaactctgcattgcgagccactcccccacaaaaccacctgtcagaggcagggcagacaaacccatcgaacctaccagtgtaaaaaccgcagtccatggcatcaatttacccaagccacccattttttcaatatccttactatcggtagcatgcattacagcccctgccgacataaacaacagtgatttcatcaccgagtggttcaaggaatgtacaacagcggccaaaaaaccaattaatgcatagtcatgccgtggcgttgtcataagtaccatcccacaaccaaaagctccgaaaataatccccatattttctacagatgaatatgctaagatccttttgatgtctttttccatctgtgcatataaagcacccaaaactgctgatagcagacctaccaccagcacaaaagccccccaccagaattccatcgggccaagaaactgaaaaacaaaacgtccgaaaccatataaggctattttcagcataacgccgctcatcagcgccgaaacatgacttggtgcagcaggatgcgcattaggcagccacacatgcagcggcaataaccccgcttttaatgcaaaaccggcaaaagcagtgataaacgccgcattacgaacattatcactcaacactccctgaccgagcacagcaaaatctaaagaccctgcctgactgcctatcatcaaaaaagcaatcatgattgccgctgttccgatatgggtcataaccaaatattgatacgctgcattatgtgcagcttttttttcagcttcgtggttgaccagcagaaagcttactacggccatcagctcccaagccagtaaaaaactgaaaacatcagcagccagtaaaaccagcaccatagaaagcaaaaatgcattccagagtccgcccaaaagtctcagccttttacccagatagcttttagcataaccccaagcataaatgctcgtcactgttcctgccaagcccgtaatcaataaaaaaactgcgctccaccgatcagcattgaaagtaaaaaatgcccagctgccgctcagcaggctcccacttccctgcattagataagccgcagactgatacagcagagctccgctgccaaatactgctgccaaaaccgcacagtaatgtgccgccatctccatttttttaggaaacagtgccgtagcggcacccataccatacacagcaagagttatatatataagttccattcccatctacctcacattcaaaactcaaaaaagctcataaaaaaacgtatatattataccacattcttcataatttagcactcataaatattaacaaacccttgtaaaatctacgttaatacaaaaaaatcctatttgcatacgcaaataggatttttgtagattttataaaattttctgtatacgactataaacccgcaaagcattgctgtaaaaaaatgcttcctgatgttcttccgggatcagttgacgcattatcgctatataatcaggaatattgattaacggccaatcactgccatacatcaatttgtcccagcggttcatataacgcagccacatacccaaataatcaaaataaccctgattctgcctataaaaatgcggccccggtattccttccagtaaaccggacagatctacagctacattatcatttttcgtagccacctcagttgcgtcaagcagccatggatttccgcagtgacagataacaaactgcacgtccgggaaatcagcagctacctcatccaccgtcaacgggtgggcataacgcagtttagcagcaggcgttgctgtatcgcctgtatgcactgccacaggcacattataatgccgggccaattcaaacagcggataatgacgttcatcataaataaatacaggccggtaacctggataaaactttatgcccagacaatgaggatcactcagatagtgctcaaattcctgagctgttttttcagcatttgccagtgtaatatcttcacttttgacgcctaaacaataccccattgaaagaggctggttataatttttctcatcaaaaggaccacttagattaatcagtctcggtgtactgccgccgtaacgactgggcgcatcttcagaattacccatcgccacagcaaaaacaatattattctcttggcatatctgctgccaacaagccgcagtattttcatgtcctgcattttctgcgacctcataaaacttgtctatatcataataatgcatatgcgcgtcaatgattttcataaaatgcaccttctttcatacaattccattataacacctttgacgatagccgatgcagttttattatttacgaaaaaacagcccttatttataaagggctgttaaaaaatcatttatcaggctcttaatttagctttatattcttctcctactttatcaactacatttttaattaccgtatctatctccgtatcagtcaaggtacgatcaccggcctggaaagtaagattaaaggccatggatttacagccgtctgctacctgcttaccggtatacacatcaaacacctttgcatcagtcaaaagctcgcctgcattagcgcgaatcacgccttcaagctcgcgcatacttacttccaacggtacaacgacagctatatcacgcgaagtaccggggaatttaggcagatgtttatatttaggcaccttaacagcagcagcgaccaaaggttcgattgccagctccagaacataggtttcactgctcagttcaaagttagcagcaaccgtgggatgcacttcaccgaaataaccaatcagctctccctgatattcgattgcgcagctctttcccggatgcagatatggctgtgttgccagtatcagcttgtaatcagtgacctgtaatttgctcaaaagcccttctacgacacctttcatatcataaaagtctacattatcttttccctcagtccagtttaacacattacgtttaccgctcattgcagcgcacaatacacgcttttcaaccgggaactctgtcaaaggcagcgctttcggcagataagtgcgcccgacttcaaaaattttgacactttcactttgacgtgccaaattataagcaactgtacttaaaatacttggtactaaagtagtgcgcataactttgaattcatcgctgataggattcattacttcaataaaccgacggcgttcatcatctgcaggtaattccagcttgtcaaaagaacatggatggataaaactgtaagtcataacctcactcagtccgaccgaagccaaataatcctccacactgtcgcgtacgtcctcaatcacatcctgacgcccctgtaccaaaggcagagcaggcatatgtgaggcaatcttgtcatacgaatgcatacgcgcgatctcttcactgatatcagcatcacaggtcacatcataacgccagctgggcgctgtaacgaccagatcttctccttcctcatgtacttcgaactgaagcttctgcagaatagaaatcatttcccctgtctctatctctacaccaatgcgggtattgatagcagacggattaactttaacaacagccggctgcgcctcagtcggataagcttctacgataccgcagacagtctcgcaggcacccatctgttccagcaaatgtgctgcacgattaagcgcattatgagtcagcacggtatcaacaccgcgctcgaagcgccctgacgcttcgctgcgtaatcccaatgctttcgaagtacggcgaatcgaaggtccgttaaaagtagcggcctctaacataacatttacggtatcggcagtaacttctgtttccaaaccacccataacaccgcccaggcctaccgcatgttcagtatcagcaatagtgatcatgctggaatcaagactccgctcctgattatccagcgtcaccagcttctcaccttcagcagcacgccgaacgatcagcgtatgtccactgaccctgtcataatcataggcatgcatcggttgccctaattcaagcattacatagttagtcacgtcgacaacattactgatgggacgcataccgcaggcacgcagatgtttctgcatccactccggcgactgaccgattttaatatttttcaatatccgcacagcaaaacgactgcacagatccgccgcctgcacatctactttcgccatttcggcagcattgccgccggcagtttcctgtacgctcatatctggcattctgaattccgtacccaaaacagcagcagcttcacgtgccagaccaatgatatttgtacaatcaccgcggttggcggtcaggtcaatatccaacaccacgtcatccagtcccaaaaccttttttatatctacgccaatcggtgtatccggcggcaggatgaaaataccattgcgctgttccggcagcaaaagcttagcatcaatgcccagctcttcagcgctgcacaacattccaaaagaatcaagtccgcgcatttttgcttttttaagcttcatcccactgggaagctgcgacccaacaactgcaaccggtacgatatcgtcttgatggacattttgcgcaccagtcagaatctgtacgatctcaccgctgccgtaatccatcatacaaatccacaaatgatcagaattaggatgccgctcaatctgtgttactttgccggtaacaacgccttccaaccccgctcccagatagttcacactttcaacttccaaacctacgcgtgtcagtttttcagccaactcttcaggagtgacattaatatcaacatatttttttaaccagtcaatagatgctaacataatcttcctccttatttgaactggcggataaaccgcaaatcattttcaaagaataagcgcagatcgtcaatgccgtatttaagcatagcgatgcgttcaacacccattccaaaagcataaccattaattttatccggatcgtaaccgctcatccgcagcacattgggatgaaccatacctgaacccaaaatctcgagccagcctgaattcttgcagacgcggcagcctttgccgccacagataacgcaggaaatatctacttcggcacttggttccgtaaaggggaaataactgggacgcaagcgtatctccacactgccgccgaacatctctttacaaaaggtttccagcgtcccctttaaatcagcaaggctgatattttcaccaagtaccaaaccttctacctgatgaaacatcggagaatgagtagcatcataatcgttgcggtaaactgttccaggggcgatcatcctgatcggtgtgtcaggctcacaggcctgcattgtacgagcctgcacaggtgaagtctgggtacgcagcaaaaatttttcagtaatataaaatgtatcctgcatatcccgtgccggatgatcctgcggcaggttcaaagcttcaaagttataataatcgctttctatctcagggccttccatgacatcaaaccccatccgcataaaaatctttttgatctcgcgcagtgtcagtgtcaccggatgcagatgcccgcagttttgtgtgcgtccaggcaaagtaatgtccactttttcatttgccagccttgcttttaaggactctgcttctaaaacctcggttttggcattgatagccgtttccaaggcgctttttacttcgttgacgatttgtccgattttcggtctttcctctgccggcagtgcgcccataccgcgcagaatttctgtcatcgggccttttttacccaaatatttgatgcgcaaatctttgagttcgtctggagtcgttactgctcccagctctgccagcgcttgttccttaagtgcctgcaattcttctctcatattcttcctcctataaaaaaataaaactcccgcccctggtaaggggcgaaagttatgcttccgcggtaccaccctaatttgtactctgctgtcttaacgcgactgacgttgcgcctacaaaccaaagccttcagcgcaaacactcacgagtgaacttccgctttagtgtatcgcaaggcttgcagccgtggcctcgctctctgtatcgcacgtctggcgtactctctcggtcatagtgtcgaaaaaatggggcgtattcaattaacgttacttattttatcacaacttgcctttacctgcaagccgttgccgcagacattcaaacataacgattccagctgccacagcagcattcaacgattcggcctgcccttccatcgggataaaaactttttttacggctgcttccagcaagccgtctgaaacaccctctgcttcgctgccgacaacaactgctaccgggccctgtaaatctgtttgatataaactgtctgcattttccaggcaagttaccgttatttcataaccgttcttacgtgcccagctgataaagtctgcttcgcatataccttcagctaccggtatatgcagcagtgatcccattgtagaacgtactgctttcggtgcaaaaatatcagtacagccagccagtagtactatgccgctgatacctgccgcatcagcagtacgaatcatcgttcccagattaccaggatcgccgatgcggtctaatacgagcacaataccaccggctgcagccagttcctctaaggccgcactttgtctggcaacaacggcagtcagagcctgcggcgtttctgtgtcggcaatttttttcattacaggttcggtaacctcatacaattcaactccttctgccgcagccgctgctataatagcggcctgccttgccgaagcagttttagttcctttaagcacaaaaagctgtttcactataccacagtttacagcttcctccaccgatcgcattccctccactaaaaaagcctgctgttctgtccgatattttttttgtttcagctctgcggcagctttaacgattggattacttacgctgctcaattctttcatcagaccacttcctccagtgctttaatattactatgctcaccgataatgatcatttcatcgccgaggttaagtaccattttgggatcgggattgaccagagtttcactgccgtgcttgatcgccacgatattgacattatagcggctacgcagattggattcgatcaggtttttccctgccagacttggcggcacagtgatactcatcaagctgatggtatcagacagttcgatataatcgacgatgctgttggaaataaggttatgcgctacacgctgtcccatatcacgttccgagtaaacgatcttatcagcgccgatttttttgagcatttttccatgaacctgattgatagctttaacgacaaccacaggaacaccaatttccttaagcagtaaggtcgtcagcatattcgcttccaaatccccgatcgccacgactgccacatcaaaattctgagcgcccaaagaacgcagcgtacgttcatcagaagaatctgccgttacaacatgagtcagctcatgtgccagacgctgaacattatcttcatcagtatcaacacccatgacctgataaccaagttcgttaagtgtcaatgctacactcgtaccaaaacgccctaacccgaaaacagcatattgtttttcacgttgttttttaatcattatcgttaccgcctttaaccaatcataatattttccgaaggatatctgatcttatcatctttagaatgaaggaaggataaaacaaaggtcagcacgccgatacgtccggcatacatagtcaaaaccagaatcagtttgccccagtcgttccagtctggcgtaatcccaactcccagaccaacagtcgcaaatgcagaaaccacttcaaataaaacgtaatccgcccgatgcagcccaccatcgcagatcaggagcagaaaatacgctccaagcatccacaacaggcaaactgtaaaaacattataagctttatcgactgtttccgaagctatcctcctgtcaaacagcaccgtatcacgcttgccatgcagaagtccccacgtcgataccagcagaacgagcacagttgtcgttttcataccaccgccagtagacgtcggcgaagcaccgatacccattaaaagaaccataaaaaacagagaactggcccgcatatcagtcaaatcgatcgtattaaacccggcagtgcggcaggtaaccgcctgaaaagcagccgccatccatttgtccaattcgttgggcatgccgccaagagtagccggattcgtatattccaaagccaagatcaccagagtaccgccaaaagtcaggatcgcgctggccgtcagcactattttactgtgcaaacgcagcttcttccatttccggttacgacgcagatcatccaaaaccgtaaaaccaataccaccgatggttatcagcgccataatacacaaattcagagttatatcgttataatgccctgtcagactggcataatctccaaacaagtcaaacccggcattgcaaaaagccgatatagcatgccagtaaccccaggcaatacctgtaagccccatgtccaaagcagaataaaaatgccaggccagaatagtcccaaaaataaattcgatcgtcaaagcgtatttaacaacatttaacgacaaccgtactaccccggaaggttcattcagattaagcgattcctgaataaacagcctttctctcagattgatccttttaccaaccgccacgctcagtaaggtggtcagagtcataatgcccaatccaccgatctgaatgaaaacgatcatcactaattttccaaaccaggaaaaataatgccctgtatctacaacaacaagtcctgttacgcatgaagtagaggtcgctgtaaacaaagcgtcgataaaacgcatactgctgccgtcagcactggccattggcagcatcaacagcagtgaaccgcataagataagcatggcaaaagtaaacgccaccatctggctgccattcaaactgctattaagcagctttaaccatttgtgcaataaattgatcaaaaacaacaaatttttcaccatcctgacaaaagccgctaaatattacttattgaatataaatcaagtttactctcattactttatgcttgtcaattttacttgcttactaaaagaccgctttatttaattacaaatcaaatgtgcagaaatgtaaaaaacagcgtcatcaaaataatactgagcacaatagttatggaattagcaaaaccggccagttccacattaccgcccattctggcaataaagatcgggccgatagccgtagaaggcgccaaaaaaaccagcgtcagtacttccttgacctctgcactcagcggcacatgataaaaacaaagccatgccagggcaattccaaaaacataacggtacagcactacctctcgcacttgcttcagcttatctaaatccaacgtcatttcaaacatcattccgatcatcagcatcgataaaaaagtattggcaccgccgataagaccagtaagagtataaacaggctgaggtaaatgcagctgtagtaccgcacagaccaacatcagcatataaacaacaaaaggcacagatacaagaagtttagcagctatactgcgcagattcacaggctcgtatttttcacctgtatgcaccagcccactggtcagagcataagttccgccagtacacataatcgaattacccacatcaaacatacaagtagctactacagcgaaagggcccaaaaagctttgtgcaaacggtaaagtaaaacagccgatattataaccggccagattaaatacgtaaaaaatctttgccgcattcgtctgataacgcgtcaatataaatccccaggcaatcatcagcaaatttccacaaaaaccgatcagagtcaatataaacagcgtataatccattttaaaagctgcaaagctggtaataacggcacatggcagcgtaatatttaagactattttggcaataagttcatagtcatgcggtttaaaaaagccgcgcttctttaagaaataacctaaggcaataacggctacaaacgccagtgccttagttaaaacctgttccatatggttccctcattttcatcaaaagaaatcttgtctttatctactgcttcataaaaaacttaccttaaattatactgctgacgtaaaaattaagcaaaattctttttatcttaaaaatattccttaaacaaaactttgcttttaccattttgtttgctataatagttcacagaatatacacaaagggggatatcaatgtttaaaaaatctaaaataatagtaggtgcggctcttttagccgtatcagtactgagctttactctgccacagcaggctgaagccatcaaccttggcagtattgccggcaaagccgtaggcgccgccaaggaacagcaggaaatcaacaaggcactgaattattatgataacgaaggccgccatgagctgttcgaagccctgaaacaggaagacggcgtcaacagcgattataatgccaatgccatgcttggccgcattatgcagcgtatgaccccggccatcgccaaaagcgacgcaaccatcaatagtaaaccatataattatttcgttaataatcaggaatttttcaatgcttactgtgcattagggcacaatatgtccgtaaatatcggcgctttctggttcctggactacaatgaagataaactggcggccgttatcgcccatgagcttgtacacggtcagaaagaacatccaatcaaaggcgcaaagaaaaagatgtccgttgacttcgtgatgaaaactgtaggctctgaaatcggcggtgctaacggtctggcagcacaagtagtagcagtccatgccaaaaacaccggcgttaccaaacccaacgaatgggaagctgacaatatcgccttcacttatatggctgatgccggttataatgtaggcgctcctgcagctgtttggcaggcagttatcgaaagctccagcgacagctctaaaaaagatgttctcagcgacatactcaacccgtctactcatccgaaagacagcgaccgccgcaataattattccaaaaagcttaccgaatacagtaacggcaaagttactgttgacgctaacagcggcgaagtgaaaattaacggaaagacctttatgacaccggctgctgcaggcaatatgagcggtatgcagcgttcttacttcgtagcaggcaatcttgcagcgatctatcatgcaggtcagaatactcaaaatgcctatgctgagggcggcactgtaaaaatcgcaggcaaaggtattattactcctgttgccggtgatatcagcgctggtgaattagttactatccttaataacattaaataacaacttaaaataaaacagtgtaagtcctaagacttacactgttttttattgccgcagcagcaattcaattcatttgtactgtaagcagtaattcttacagagcagctttagcagcttctaccagtttggtgaaagcagctgcatcataaatagccatatcagccaaaactttacggttcatttcaataccagctttagccagaccattcatgaaacggctgtagctcatgccgttagcacgggtagcagcgttgatacgagcgatccacaaacgacggaattcgcgttttttagcacgacggtcacgacgagcatagctcaaagctttcataacagtttcattagcttttttgaacagcaaatgtttagaaccgcgatagcctttagccagttttaagatttttttatgacgacgatgagcagtaacgcccactttaattcttgccattatagtcagcctcccttatctattatgcgtacggcagcatttttgctacgcgttcatgatcagttttgtgaacaagtgcagccttacgcaagtttctcttgcgggaaggagatttatgttcaagaatatggcttttaaaagctttagcacgtttgaattcaccggtaccagtctttttaaaacgtttagcagcagctctgcgggttttcattttaggcattgttaagtcctccttatttggtagctttaggcgcaacaatcataatcatgtttctgccttctaatttaggtgcacgctcaatgacagccatgtctttgagctgttcagccatttttttgagcaacacttcgccaagctcaggatgcgataattcgcggccacggaacatgatggtgacttttactttgtcgccgtcttccaggaatcgcactgcatttttgaatttgacgccgaagtcatgatcctcaataccggggcgcaatttgacttctttgatatcaaaggtcttttgctttttacgagcttctttatctcgtttttgctgctcgtaacgatacttgccgtaatccataatccggcacaccggaggtttcgctgtaggagcgatctccactaaatcaagatgtctttcctgcgccagctgcaaagcatcacgaccggacataatacccagctgttcgccttcaccggcaataacgcgcacttcccgtgcccgaatttcttcattgatacgcaagctttctttgctaataaccgttcacctccaaaattaaataaaaaacgcgagcagataatactgcccgcgctgaaaatcatatccgaccctgtcgagcttttgctgcaaggtgagaagcgagcggcttctgctttgttacttggatataatatcataatgttaactttgtgtcaacatatttattaatcttttcttgctcccagctgtccgtcaagataaaacaatccggaaatattatcgccgatcatttccagcttttcaacaatctcagaagcattggcttcttcttctacctgctcatcgataaaccatttaagacaactttgagccgcgtaatctttttctttcaaagctacttcatacatatcataaatacgggaagtaacatatttttcatgctctaaaacttttttgaacaaattcagaggggtactgtaatcagccgccggcatattaatctgcagaagctgaggctgcacaccgcagtcctgcataaattttacgaagcgcaaagcgtgttcacgttcttcttcatattgcagataaagccatttagccatacctttataatttttagcttccatatccaggctcatcgcaagatacatatatgcagaatacaattcagcctggacttgttcattaaaaaccttataaacttttttattcatgataacatcctccttaacagcttaaaatgccgtttttactgggtatattataacacttttcattcgttttttcaataattattatctatttccgttgccacttatctagcacgacattcatatctgattattttttatcggcaatttcttcttgcagcatggcaataaaatcttcctgcttcatagctccgatatctccttcgccgcggcggcgcacagcaactgtaccgtcttcaacttctttatcaccgataacaagcatatacggaactttctgcagctgtgcttcacgaatcttataaccgattttttcgttacgatcgtcaagataaacgcgcagccccaatttaaacatttcatcactcaattttttagcatactcataatgcttgtcggtaatcggcattacacgcacctggcagggagcaagccaggcaggaaaagcaccggcatagttctcaatcaggataccgataaaacgctctatagaaccataaaccacacgatggatcataaccggacgatgcttcaaaccgtcttcgccggtataggtcaaatcaaatttttctggcagcagcatatccagctgaatagtgccgcactgccatgtacgaccgatagaatctgtcagatgaaagtcgatcttagggccatagaaagctccgtcgccttcattgataacataatcaagtccaaaatcttccattgcgctcttcaaagcattagttgtagtttcccaggtttcggcatcacccattgaatcttccgggcgggtcgaaagctcggcatgatatttcagcccaaaggttgcataaacctcgtcaaataaacgaataacattttggatctcgtctttgatctggctcggcatcataaaaatatgagcatcatcctgcgtaaagcagcgcacacggaacaagccatgcaaagcaccggacaattcatgacgatgtaccagtccaagctcgccggcacggatcggtaattccctgtagctatgcggatgagttttatagaccagcataccaccggggcaattcatgggtttgatagcgtaatcttcgttatcgatctcagtaacatacatattttcacggtaatggtcccagtgtccagaagtctcccataacttacgggacaaaatcatcggagttttgatttcctgataaccataacgtctgtgcacttcacgccaataattgatcagctcgttgcggattaccatgccattgggatggaaaaacgggaatccaggaccttcttccatgatactgaacagatccagctctttgccaagttttcgatgatcacgtctggcagcttcttcaagcatatgcagataagcgtccagttcttccttactaggaaaagcagtgccgtaaatacgctgcagcattttatttttttcatcaccacgccagtaagcgccggcaatactttgcagtttaaaagcttttaccctgccggtcgacggacaatgcggccctgcgcataagtctgtgaaatccccctgcgtataagtgctgataactgcatcttcaggcagatcattgatcagttcgaccttatatttttcatctttgtctgcaaacattttcaacgcttcactgcgcggcaattcactgcgtacaagcggaagattggctttaacgatcttagccatttctttttcaatagcaatcagatcttccgggacaaaaacatgctcgctgtctaaatcataataaaaaccattagcaatagcaggtccgatagcaaatttagtatcggggaacaagtgttgaattgcctgggccatgatatgtgccgccgtatggcgaatcgcatgcagtccttcagagctttcaggaacaacaaattcaactgatgcatcatgctccaatttatctgtcaaatctttattcacaccgtctaccacagccaaaagcgcctgtttgccaagtttctgcgacaaaccttttgctacttccagcaatgtcgttccggcagcaacttcttttacactgccatcttttaaggttactttaacatttgccattttactagcctcctaaaaataaataaactccgttccctggaaagggacggagttgaccgcggttccaccctaattgacctgccgctggcaagtccactcggtaccgttaacgccggcatacgacactgcatactaactgccagagcagaggttccgcaatgtggtttgaaggtggtaaggtctatcatttttccaaagcgcttacagccagggcgcctctctctgcaggaaagatatgttagcctcttccttcgcataaccgattgattatgtgactatgtttaattataaacttaacaataattattgtcaataattttgatttgtaaaattcttgtagccaaatttatatcgttaccttataattatattaagattagtaatagttttaggagatgccccgatgaagatctggaataatccattcagaaaaatactgctgttttccctgctgcttctatcttttagttcggctcaggcagaagaaaacaaaaaagaaactctgttgtttttacctttggataaccgtcctgtctgttcctcttatgttgccaaaacaatggaagcagcgggctacaaagtgctgcttccgcctgataaatatctggcttcatataatcgaaacggcagtcctgatgaattatggaaatggctcgtcagccgtgcgcctcaggcagacgctgccgtcatttccacagacagtctgatctacggcggtctggttgcatcacgtactcatcacgaaccgcaggcagttttagagcagcgtctgcagcgactcgaaacactgcgtgatcagttcccagtacggctttatgctttctctaccttgatgagaactccgcgcgccagttttggcgctgttgagcctccatattattcgaaaatcggtccggctatttttcgttattccgagctttgtgactccgaagatttgattggactcagcctcaaagatgctttaacgaaaaaaactttgtctaccaacctgcctaaagcagatttgcaggactggctggaacgacgccaaaaaaatctcaatatcaacagcaagctgacggaaatgacccgcagcaaccgttttcactttctcgcaatcggcaaggacgataatgctccgttatcgcatacacatatggaagcacgcaagctcactcaggaaacctatgatcttacgcagcgaacttttcagataatccccggtgtcgaccagctcgggctgctgctgctgaccagagccggaaacgaactgaagcgttatcagccacgtgtttacgcctattatgcagatggctggggaccgcgaacgctgccacaatattctgatatgaccttgggtcaatcagtgccacagcagattttagcagtagacggacgtactgctaccagtgccgctaacgcagacgttgttttggcactaaacacgccctttgacggcataatgatggattctaccgctccttccaatcagtttttctcttcaccgcaaaaccgtacctatatcaaacagctcaagctgcttatggataacggctaccgggtatctttggccgacgtagcgtattctaacggagctgataatggctttatgaacgaactggccaaacaggggcagttggaacggctgacagcctataatggctggaatactgcggacaataccgttggatttgccatttgtcagggtatactgactccgcagatgtcaaaaccggatgctgaaaaactgatgcgtatcagagttatagacgactggtattatcaggccaatgcccgacgcagtgctactgcatttttggaaagcaaaaatcaaaaaaatgcagtttaccttctcggcccttatcagaaaccagttcacgatctggctttaggcgtttgccgagatttatcaggacgttataaatttacagaaaaaagtaattttgatatttctttcccctggaacagactttttgaaattgatgtagaactgaaaaaagataaaaagaaataactgtcttaaaataccgttgaccaacttagtccaacggtatttttttatattatctgcctatttacttaaatatttatcgtttttcaataaattatttacttttaataaagaattgctatattatttacttaaggaggtttttatggacaatattgatactgcaattctatactgtttaaaggaaaacgggcgtgtcaccgcttctgagataagtaaaaaagtaaaactgtcaattcctgctgttgccgaaagaatacgtaaactcgaacaaaattcgattattcaaaagtatacaatcaagctcgaccgctggcagaccgggcaaaaacttttagcttttatttttgtaaatattgataaaaccgagcatatcaatgctttccgcagtcagataaccgttcttccgggtgtacttgaatgtcatcatcttgccggagcttacggctatttgcttaaagtaagcgtcagcgataccgatgctctggaaagctttcttactaataagctaaaaaaaatcaccggcgtcagcagttctaatacctttattactctggcaacgctaaaggaagagttaaattgctgaactcttttatacgcggtctgcgccttggtataattttacagctgtcaatcggtccggtttgtctttttattctgcaaacagctattgcccggggaataaccgaagcgttgaaagccgtactggcagtagttttggttgacgctttctatatcctgctggcattatatggtttaggaacttgcctgaaaaattatccgggcatacaaaaaaaactacgttattgcggtgctgccgtgcttctctactttgcagttactgctttagctgatatttttcatccacagatttcaactgccactattatgccgccacaaatcagcagtttttacgctgcaggactgcttacgctcagcaatcccctgacgattattttctggttaggtatgctttcagcacaagtttcccagtaccggctcaacagacagcaacttctttctttcacctgtggctgtataagtgcaacgttcttatttctctgtctgcttgcttttttaggtaacagcagcgcacctctattgtcaccttcactacagcaattaatcaacatctgcatcggatgtcttctgattttttttgcataccgatcagcaacttgtagataaacatttaataaatttaatctaaacatctctctttctttaactttgagctaaacaccagaattccacaatacagaaaagccatctgcaaatacacagatggcttttgctgttttcctgaagcattaaaaactgtagtttataccaatttgatagttacgcccaggttcggcataccactcatcaaatccaagaaatccgccgctctcattgtcccaattggaataaaactgattaaaaatattattgaccttcacataaagcctggtatttttctgcagtttatagttcaatgaagcattccatacccagtaattattattggcaaaacgattttcaccacggccgttagcctgatcaaaaactccgcgcccctgcagcagcacactatacttatcatattcgtacatcaaatcaagcaacagttcaccgtgaggtatcatcgtacttacagggcttgaatttttacgttctgtatccactttcgtctgtgtataagccaccagagaacgccacttttctgaaaaccgtttcgatgcggaaacagtaaatcctgttgctttctcatgcgcaatattggcatatcgacgaagatattttggtaaacttatatctactgcaatgacatcagttgcatcacgatgaaaaacattaatttttaatgacgaagactcatccggtatataagttaatcccgcttcataaaccctaccttcttctggcttcagcgcctcgtcaccataatcaggagaaaatatctgcagctgcttgggcggcgcaaaatattctgtataggccaaagtatataataccttttcagagggctgatattccaacgaaaaagcaggagaaagcttgctccctgcataagaattccaatcctgacgcagactgccgacagctttgacgctgtcagccagctgccagacatcctgcagataaacagctttactgatcacagttccgtcactatattttgctgccagatcctgataattaaggaccttatccttgtaatattccgcaccgccggtcaaagtatgttttgggtgccactgtttactgtaacggtcaaaaaaaccttccgtctgtaaatcaagcagccatggtcgttcaacatttaaacttctatcataggcggaattgctgctgcgtctgtaaatacccacaatattattttctgtatccgaaaaattacgctcatattccagagttagattatcttctgtcttgcgggcatcggtcataaaaatatttttaactaactttggcggcttagtttcatcaggttccgtattcttataattgaagatctttgatttatacctgccgctgaaaacgctgtagcttaaagtcagatcagcagtttcaccccaggctttggtcaatttgataccagcattttcaacattttcgtatgaaggtatactctcccttgcactactgtaatcgcccataatactttttcgggcataaaccgaccagctccattcaccgcttttgcctaaatgtaaaatattctcttgctcacgtccataactgcccgtttccagattgatactggttttaacaccttcaacagcttttttgtagttatcctgatcacaccgcctttagcagcattaccgtaaacgcttccggctgctgacggcaaaacctctacactttccagcattccagccggcagtacaccgaaatcaaaatcattataactgctgccgttccagttagaacgcaaaccgtcaataattaccaaataacggtcagaaccattcagcaaaatcttactataggcattcataccaccgctggcgccccttgccatcaaagtaacacccggaagttgctgaatcacatccaaagcattatcataattgccgttttccagcttcttttcatcaactttatagtaacctggtttacctgcactattgtcataacgcgcggccgtaactatcatcggctccaaataaaattccgcttcacccgctgcagccgcggttttcattgagaaaagcaccaggtaaaatatagccaagaaacacaaatatttttgctgcaaagcaacctctccttgataaaagtttcttttgttatgacttcagcaaatactatcagctaatgcagaaacttttcaatacttttatacaattgttccacatcgaacggcttgggaataaaagcattcattcccgcagccagcgctttctcacgatcttcctgcagcgtattggcggtcatagcgataactggtatttcctgtgcgtcgtccctgctcaaagacctgatctctgcagcagcttcaagcccgccctttaccggcatctgcagatccattaaaatcaggtcataagtgcctggcaaagtttcctgaaacctgtctacagcctgctgtccgtttacaacgcgttcaacgtgtaccccctgcatttccaacatcgttacggcaatctcggcattaagatcattatcttctgccaacaaaatatttttacccgctaaataactatgtattctgacttcgttattattctccaggatttcatcaaactgtttttcgtaaacaggcagcttgatagtaaagaaaaattcagaacctttttcaacctcactgcgtacacttaaaataccgcccatcaattctaccaaattgcggctgatagccagccccaacccagttccctgctgattgctgcggctttttcggaaaacctgctcaaacgatccaaaaatacgttccagatctgtttcaggaataccaatgcctgtatcacaaacactgaaacgcagctcagaaaccccttcttcagcagcactttccagaaccgtcaccgttatctcgccattgttttctgtaaatttatgggcattggagagcaaattaatgagaacctgctttaaacgcagctcatctccaacaaaatttttatgtgtaaaacagcatttaaactgtaatttgattttcctctcttccgccatcaccagaaaaatattgctcagctgccgcagcagattatccatagaaaaaggtctgctttcgatctggatcttgccgctttctatttttgacatatcaaggatatcattgacgatcgataataaaaatttagcagaagaatcaattttggaaatatttttctgcgtcacaggatccccttcaccggaaagccgcatcagattagccaatccgatgattgcattcaaaggagttcttatttcatgtgacatcctggaaaggaactctgaacgcaccttgctgatgttttctacttttttcattttaaaataaatgacctgatttttcattttaaaccaaaaatacataaaaacaatcgttaccacaagtaaaataaacccaattatgatcagagaaaatatgactggattagaataaaccaaagccttgaaagacatttctttcttgccagacatcaaggtattattggataaaatctgcgcagtctgctcattggtcaggttgaccagacttttattcaaaatagaatacagctgtatatcattactgctgctgatccccaaagacaaatatatctcaggactctctataacaggaatgatattagtataataatcactcatatacagatcttccaaaacaacaacaggtattctgctataagaagcttctcccgaatctactgcattcagacattcttcatatgtatcaaaatgcgcaacgtctgtatgtttgatattacgcgatgcacagctgccgtttatgactgcagcaatatttttatcatttgggaaaggtgtatacttattacgcatgatgatagaattaagcatcatataatttttggtgatatttaaaccatcaggattaaaggcgtcattttcattgatataataaccaaggatatctgcctgaccgcttttgaccaattccaaagtctgcccataggaagcagccgttatatactcaaactccgctccgatctgagcagcaatcaatgcaaaaatttcaggaacgatacctttaggttcaccatccttaatataataaaaaggataattgttttttactacagctaccttaaatgggccatttttatgtataaacgtactttcctgttctgagaatacagcagtgttactgtaattaacaggaaaatatttttgaaacagggcttcgccaaaattcggattgactgcataaatcttttttatagcttcattcagctgcgcacttgtttccggatcgtcctttctggcaacgatataacaaggttcagaattaaaacgcaatgcgacattataatcagccagcttgttaaaaagatcgcttactaaaagcagatccacttcaccattatccaaagaactttcaaattcatcagaagtaccgtaatatttgatatcgctttttatatcattgaattctaaaacattatttaagcgctttattttatcagtagccttggcaaaaacaccaatcgttttcccttccagacttttgatatcaaatcccttgatattctggtcatttttgttataaatcagcaaactgtagctataacccatcagatgttcaggataatacaggttttcaccaaatccaggtgactttaacacagcacccataagatcatatttattatgttccatattttttattgactggctaatggaatctccaataaactcatattcccaacctgtatatttagcgatttcaactaaccattcatagacgacaccgccacgtgtgccatctgcgtatgtctcacatataccgcgtgtttcagggaatgccacctttaaaacttttttagcctgtgtttctgcagcattcgcagtcacacaggcacaaatagacattattatcgctaaccaaacaaaagtacttttaagaagcttcatatgaaaattgttaccttatctttcctgtcaatcaagcttgtttattatattttaatatttatattcattttaacaaaattatatcttttgagcaattaaatataagttttattattaattttacaataaaaaacaaaacaccctccatcaaataattattggtggagggtgtttaaattatttccgcggcaaaaagatttttatagtagtccctttgtccagttcactttccagctcaatgcgacctttatggaacatcaccccatgcttgactatggaaagtcccaaacctgtgccgccggtttctttaaagtgacttttatcaaccctgtaaaagcgttcaaaaacccgctctttatcagcactgccgataccgcagccggtatccttaaatgtcagtactgcttcaccgggaattacggctactgtaatctcaacgctgccgttttcacgattatacttgatcccgttgtcaataaggttataaataacctcgctcaaaactgcaggtactccttctacctcagcttcacagccactgacgcttattgcgacattttttccggcagcctgttcctgcagacgctgaactgtaccttcagccagctttttcaattcgataatttccaggttgttcatattattcgccgactcgtctaaacgcgacagtttcataatattatcgataagcacaatcagatgcccggcctcactgtagattttttccagaaagcgctgcttatctccttcctgaactaacccgtttttcataatctcagcataacccaaaatcgactgcagcggtgttttcagttcatgcgaaacatttgcagaaaactcacgccgcagtgtttctgctgcacgcttttcagtaacatcaaaaatcagcaatacgctgcctttaccgccaacactgctgccgcatagctgataaaagcgcccgtccttctgatacagactttcaccgctgccgcccacagctaccttctgcagcagctcctgcacttcctggcctcgctccaaagtcagaatatttttaccaacgacttcatgatcctgcaaaccaaataatttggcggcactgtcgttgatcgataaaatattctgccggtcattcaaaaggatcagaccctcattcatactctgagtaatagccgccagttcattctgcttctgccgcagctgctttaagccttctgaaacctgcctctgctgctgggcgatccgtgttaaaaacggtgccagttcatcataagtatcattttccagtgggttttccagatccacctgatccagcggtaaaaccattttatcagtaatccgccgtgccagaagcatagccaccaaagccaccaccagcactaccgcgatcatatagggaatactgccggccaccgtcgcaaaaacagagtctgtcgttcttgcaacacgcagtatatcaccattatccagccgcagcgcaaaataaaaagttttttctgacagagtatcgctcatacgctcggccaaaccaattccacttgctaacgcttcctgtacttcctcacgatctttatgattaagcattttttcggctgccacatgattgtcatagatgaccctgccgtcaggagcaatcaaagtaacacgagtcagcttaccgctttccatggtcaatgcctgcagatagcttttcccgctctgttccagacccatttttataaaagttgcttcctgtctcaaatcacgctgcattgtggtcatcgacccctggtacataataaccgcaatcagcacggaagcaatgataacagccgccgttgacaaaaacagcagaccgctgaaaattttatttctcatagccagctcctatacgataaccgacgccgcgtacagtttctaccaatgctcctgcttcgcccagtttcagccgcaacgtacgcacatgaacatcgacagtacgtgtctcgccggcaaaatcataaccccagatatcagttaaaagctgttcgcgcgtaaaaacctgtcccggccgctctaacagcttatgtaaaagctcaaattccttaaatgtcagaactacctcctgaccaccggccatcacgcggtgtttatcgatctccattaccaactcgccggcagtaagcctgctctgcttatcctcctgcttataacgccgcagtacggctttgacccgcgacaccatttccatcatgccgaaaggtttggctatataatcatcagccccattatcaagaccatgaactttgtcgaattctgagcctttggctgttgccatgatcaccggcacctgtgcggtccgtttatcgctgcgcagccgcttcagcagactaaggccatcttcacccgggagcatgatgtccagcagaatcagagtcggcttgccgcattccagcgctttgaacaactcatcaccgctgcctacacccagagctttaaaaccaactgactgcaatgtataaacttctaattcacgaatattaggatcgtcctccacgcaaaagatcatgcacagtatcctcctcatgtgctcctgtaatcataaacagcacccattgggaaatgtttaccgcatggtcgccgattttttcaaaatacttggcgatcatcaggtaatcaatagcctgctctccgctatcctgcgtgctgcgtatgacctggatcaattctttttttgccctgctgaacaattcgtcaacgacatcgtcgtcacgctctacctgctgagccaggcgcagatcacccttcacaaaagcgtccagactggtactgaccatctttttcgccgctgtcgccatttgctgcaaaagcgttgtatcgtaatccctgccaaattcagccttgcctaaaatctcagcaatattgcccgcctgttcgccgatacggctcaaatccgtaatcattttcagcgccgctgaaatctgacgcaaatcagaagcgacaggctgctgcttcaaaagcagatttatacaaatattctctacttcccgctctttttcctctgtgcgtttgcctaaaataataatttctctgttcaaagcatcattatcttcctgcaaagcctgcatcacatgctccaaagcattctcgcacaaagtgcccattacgatcagttctgtgttcaaaagctccatctgagccgcaaatctgctccttaccatcagccaaacctccctgtaatataatcttcagtctttttctcctgcgggttcgagaacaaagtatcagtatcgttgaactctaccacttcacccaaaagaaaaaaggctgttttatcagaaatacgcaccgcctgctgcatattatgcgttacaatcacgatagtataattttgcttcaattccaatgccaaatcttctattttcagggtcgaaatcgggtccagtgccgaagtaggctcgtccattaacaaaacctccggctgtaccgccagcgcgcgggcaatgcagagccgctgctgctgaccacccgaaaaactcaaagcgcttttatcaagcctgtccttgacttcatcccagattgccgccttacgcaaagcctcctccaccatatcatccagcttagctttgcctttgacgccatgtgttcgcggtccgaaagcaatattatcatacacactcatcggaaaaggattcggcttttgaaaaaccatgcccacacgtttacgcagcaaattaacatcgtcattggcataaatgtcatcattgtccagcaaaaccctgcctgtaatacggcagccttcgataagatcgttcattctattcaaagatttcagcagtgttgatttgccacagccagaaggacctataaatgcagtaatctctttttccggtatccgcatattgatattttttagcgcatggaattcactgtaatataaatccaaagtttcaatagctattttcgtatccatattattttcccttcatcaattgttttgccagtctgctcgacagagcgttgatagcaacaacgatcacaactaaaattacagccgtcgcataagcctgtttcatgtacaaaccctcgctggccagcacatacatatgtactgccagagttcgtcctgacgacagcaccccatcaggaagtgccgccaccgtaccggctgtataaataagcgctgccgtttcgcctacgatcctgccaatggaaagaataacgcccgccagaataccgggaaccgctgaaggcagaactacggcaaaaacggtccgcagcttgcctgcccctaagccataactgccttcacggtagctgtcagggatcgcttttaatgcttcttctgtcgtgcgcatgataagaggtaaaatcatgatcgcaacagtacaggcgccggcaagtaaggaatagccccatttcaaataagtaacgaagaacagcataccaaacaaaccatatacaatcgaagggataccggcaagagtatcagcagttacacgtaccaagcttaccagcctgttgccgcggctggcatattcgaccagatagaccgccgcaaatataccaagcggagtcgcaatagccagcgccattattaccatcagcactgtatcaaccaaagcaggaaacagagaaacattttctgaattatactgcaaagcaaacaaacctgtttctatatttggcagcccctgccacaaaatataccccagtaaaaaactcaacaccatgaaagtaatcagcgctgcagcaatcacacagcccagtaaaaacaacgacagcggatcgcgtccgcattcatgcagcttacggttaagctgcgcttttaaacccgtcattgctgcaccaccttacctttcaggtacgaaaaagtcaaattaataatcaggataaatacaaacagaacgacagccgttgcaatcaacgcatcacggtgcagatccgcagcatatcccatttcaatgacaatatttgttgtcatcgtgcgcacgccttctaaaatacctataggcattctggcctgattgcctgcgaccataattacagccatcgtctcgccgacggcccgtcccattcccagaatgatcgccgccataatccccgacttggcagccggcacgactgtaaaaaatacactgcggacatgccctgctcctaaagccagagccccttcataataactgtcaggcaccgcacgcagcgcggcttcagcgacgctgatcagtgtcggcaaaatcatcatgcctaaaagcagtgaagccgtaagcatactgctgccggtaccgccgatatgttcacggataaacgggaccatcactaccagtccgaaaaaaccatagacaactgaaggaataccagccagcaattctacagaaggcttcagcacattgtatattttctcaggacagaaacgcgccataaagacagccgtcaaaatcccgaccggaactccaacgacgatcgctcccagcgtaacgtacaagctgcccaggatcatcggcagaatgccgtagacatcgttggcaggacgccatctttctcctaagaaaaaatctgcagcgccgattttgccgatagtcggcagcccgttggcaaacaaaaacagacaaatcatagctactgtagcgatagaggcacacgccgccagcagaaaaacaaacttcattatttcttctttacgcttctccatactccctcacattatacaggcggctgcccctagaggcagccgttagtttacagtgttcagttttatctgcttacagtttattccattcagtaatcttaccggtaaagattgcttcgacctgttcttttttcagatcgctgactttattatctttatttactattaccgcaataccgtcagtagcgataacagttgcttttaagccctgttccagctcgctcttcttcaagtcgcgtgaagccataccaatgtcacatataccgctgacagcagatttaacgccggtagtggaatcactgctctggatctcgatattagcagccggattgattttcatatacgcttctttcagtttctccattgccggagttatggaagacgaacctgctacgactactttacctgccggtttggttcctttataaggcgcagctttgtcatcgccgatgcagccggccttagctactacctcctggccttcttttgacataatgaaagcaacgaaatcctgggcaacttcgctcaaaccatctttcgtacagatattgaacggacgggcgattttataagcaccgctttttacattggctgcacttgcttctgcaccatcgattttcagcgcttttactgtatcgtttaaagagcccagagaaatgtagccgatagcgtctttattaccggctacagtagtcatcatgaccgaagtattattggtaatggcagcattatcagtagtatggtcgatttttttgccgtcagcatccttcttctcaataccgaacaattctataaaggcaccgcgtgtaccgcttccatcctcacgggagataacaacgatcttactgcctgctgccgcattatcagccttcttttccgattcactgctgccgcagccggtaaaaattatcgtactcattgctgctaataaaatacctgctgcttttttgttcattttcatcactatagcctccaaaatttttatgatttatttttagttttctgactatggctatagcatatcccagcaaagtaaaatccgttagcgcagttttgtaaaatcaatgtaaagtttgtaaagcgaactgttttacaaaaaacagcctccaacaagttttattacttgttggaggctgttaaagattatttttaaagcggaagcttgactgaaatcgcttcgccagctctgaacagtatggcatctaacgccttctgtgcaactgatccgctgccgataaagaaatagtcagtagaatcttcagctttcatcaaatattttttattataaagttctttatcattctttaaatccacgatccgcaaaaccagcccggtttccacatttttatcaaaatatataaaattaaaatgtgtttcttttgtaatgggctgcagctcggtataaacaaaataatctgccccgcagccatcaacctgcgccgtcaattctgcaaatgaagctttttcaaatgacttttctttgaagttttcaccataaggttcagcatcgatttcaagataaattccttcgattttcttctgcagcttttccaatgctatttgggtaagcttttcatcataacgtgttccggcgatattgttaaacaccaaaagcacgctgcttttctgtcgcaagcttttagccgcttcagcttcgcaggccgcagtaaaaaatacaaatatcattaaaaagacccccataagccttttatcaaaatattttttcattatagaacctattttttatcagcagctaccgcaacaggtttttcttccggcaatctgacagttaaaacagaagtgatctgttcgttgatcttattcagggctttcatggcaaccgatttattacctatgccgccgatcattgtgctgtcggaagctttctcagtaaacttgccattatataaatatttaccatttaccaaatcaatgattttcaatggtacagtagtcgttatatctttaccaactgtaaagaacgtcactttgtctcttgctataaacggctgcacttcaataaaaacgacataatcaacatcttcaccttcaaaagcatcaactatatcggctctttcagccgtagtaatatcaacaataccaactttgtttaacttttcgatatatggttcaccattgatataaatatatttatcatcattgatgcatttttccaaattgcctaaaaccactccatctacttcgtcattataagtagtctcggcattatttacataaagcacagctactttaggcatattttccattcttttggctttttctgcctgatataccgggtcgctctccaccctgattttttccattctttcacgcatagacacaggagcgtcagcaggttctgcagcaagtgccgtagctgtgctgagtgcaaagatcatagttaataaatacaaaattactttcttcaccattatcccaccattcttattttatggacttccataaattctttactgtatctgataatttatcacatcttaattctacaggtaaaacttcacccaattattattcttatagcaaaaatactatgcaaatacactttaaagttttgcttgtatttttataaataaatcataacacacatacatatatccagcaatactgttaaaataaaattacaaaaaaataatcttatcacacatttttcaaacaaagccatctatgttataaaatcacaaagcggcaacacaataaatgtgttgccgcttttgcagacaaacctgaataccttgttacgaatcattaatcttctttttgaagttcttcctgtacataattaggcagagcaaaagcaccgagatgtaccccgggattataataacgattttgcagcccaaattcagaccagcgtttaaagtcagcatctttcactggatcaagacctttcgaagcaaacccgaacaaccagtgtccagaagaataggtaggcatataaaattgataaactgttgctatgggaaataccgaagcaagttttttatgcgcccggcgcatttcatacgcatattctttatagtaaggtgattcgtgctgattgatcaagatacccttatcattcagcgcccggtaacaattgcggtaaaactcggtcgtaaaaagaccttcgccaggtccaagcggatctgtagaatcgacgagtatcaaatcatatgcaccctcaggcgcgtcttgtacgaattttaacccgtcgccaaaaatcagattgatccgcggatcattatccagcgcacaagcagtctgtggaaaatatttctggcacagacgtacgacacgttcatcgatttcgaccatatctacctgctctactgttttaaagcggcagacctcacgtgcagtaccaccgtcaccgccgccaatgatcaagacctttttgatgtccggattaactgccatcggcacattactgatcatttcatgataaataaattcgtccttttcggtaatcataatcagcccgtctaaagtaaaaaatttaccaaaggtttccgaatcaaaaaagtctattttctgaaaggaagtctgctcgctatataattgctctttgaccaaaatcgaaagtttggcgtcgggagcgtgaaattcagaaaaccataaatccagcatacttactcctccttaaagattgatgcggtccatatttttgccgtagaagatctcgtccatttcatgacgcagcttggcctcaatccgttttacttcgcctgaatgcagctgttctttgctaagcccgaacagatagttatcaaggtcgaaatctttgagcttacacttggtatggaaaatattttcctgatacacgttcacgtctatcatctggtaatgttcctttaccagctcagggatataatcttgaattgaagtgatattgtgatctataaacagtttatgtcctgtaatatcacgcgtaaaaccacgcacacggtaatcgatagtcataatgtcggtatcgaaactgtggatcagataattaagcgctttcagcggtgagatctcaccgcaggtagatacgtcgatatcggcccgaaatgtactgataccaccgatagggttatattcgggataggtatgcaccgtgatatggcttttatctagatgggctaaaactgtttccggtaaagggcccggagcggaactgttatcttcagcaccaacgctgtgcagacagccttcggcaatgaggatagtgacactggcgccctgcggctcataatcctgcttggcgatgttcagaatgtttgctccgataatgttggaaacatttgttaaaatttccgtaagacggtcggcattatactgctcgtcgatatactgcaggtaagcctccctgtctgctaccgtcttagtgtagcaaatgtcgtacatattaaagctcaggcttttcgtcagattattgaaaccatgtagctttaatctccttacctctttctccaattcaacaaatcagctccttgtcaccaaatttattgcaagtttgcaatatggattatatttattatatatgcaaactctggcaaaaacaataaaataaaaaaatacttcctacgttacgtaggaagtatcaaaatccagtttagcgcatattgatgaattgtaaatctacgccgaagtcgcctgctttcagcgtttggataacagcctgaagatcgtcttttttacctccgctgacgcgtacctgatcgtcctgcatctgagcattgactttcaatttagtcgctttgatcgcggctacgatcgctttggctttttccttcggtataccctgcaggatagtaagtgtctggcgaactgtgcctttggatgccggctctaccttacccagctccaggcagcgcagcgggatatcgcgtttagccatacgggcacgcagcatatcgatgatagcgttcagcttgtattcgtcttcagctgccaatttgatacatttttcttctaattcgatgctggcatcactgccgcggaaatcataacgctgggcgatctcctttttcgtttgattgaccgcattgtccatttcctgcatatcgacctgcgatacaacgtcaaaagaactgtctttagccatgatgtcactccattcattgatttgttaataataatattatatcaaaaaatcgggagcttgtcatttcgtcagcgtcaccgtatcgatcagcttaccgtcctgcttcaggctggtcactgtcagcttaccgtcattaacagtcagcttcatataattaggctggtcaagcacgccgtcaaaagcgacctcctgcggcttggaacgcgaaccggcccaggttttatcaccactgcggcccgaagaaatatagatcgttccctgtgatgccacattaccgtttttaaacggagcagaacggccgtaggtatgattatgagcagaaaaaactacatcgacattgccacggtcaataactggtaaaagtgccgagcccagttcattgggtctgccgtcctgatagcggaacagattacggtgcaccaacacgattttccatttcttatcactggcggccagatcgcgctccagccagctcacctgacttgcgatcagttcaggctgccactcgtttaattcctcctgctgcgtatcgattacagaaaaatgcacatcgccgtaatcatagctgtaagcctgcttctgcaaaccctccggcccattcaggggcagatcgaacaaattaagatataaatcgccgcggtaaggtttccattgcagcgaataattttcatggttgccactgataggagcaaccagaatctgcggcaacagcccggacactccacggaaccaactgcgccactggctgtattgctcgccgttatctacaagatcgcccatattgatgaaaaaggcggcttccggatcgtgactgtaagcataagcggcagtcttacgccagacattataatcaaggctttgcgaatcgccgaagatcaaagccgtaaaagcgccgccggtatctgttttcaacgtttgccatgcagaaaattctttgccgccgccagccctgtattcataaacagttcccggctccaaagctgtcagcgtcacactttgctgataaaccgtccctgaatctgttgcaaattctttgccctgcgcccacaccctgtgaagctcattttcgccctgcagcttatattccacccaggcatcgctttccggcgcctgcgtctgccacataatagtccgcgaggttttactgtcggcagtaatcacctgccgcagctgctgcggctcgtaacgcgcaggctgttcggcgccgcaatattgacgttcataaaaaaagataccgatcccgaccacggcaagcatcaatgccagcaggccagtttttgaaaaagctttactccatctcattttttcccctctctcccgctaccatactgttttatgccaagctataccgctcccaaaagaccgtaattacctgccgcataaaaagcagttccgtaaaaaatgttgatatcattgcggaaaaggacgacaacagcgccctcttctttttccttgtttaaattatataagtctggtctgcgctccagtcaagaaaacattttgtgaaaaataataggacccgccgataatattttccggcggatccaaaacgtatatgctttatcagtcgatgatattttgcttgtaatcgtgataacagcttctcagcttctccattgtttttaccatttccagctttaacttggaggcggcatcaaaatcgccgcggctaaaagcatcgcggatcatagtaaagatacacggagcctcgacagaatctttagccaacataacacgcagcgctgcgatcttctcccacagctcatcgtcacatttattatagaagccagtgtcatgcagacatttcattgccacgatctcagcatggaattcggggatgatcctgtttaagagctcggtctgccagcgaaccaaggcacctttggcaaaagaatcgataaattctgcgcgcaggatattgccgctggtaagagcagctttcttttcgggatatttattaaagccgcacatattttcccacacagttgcaggcggtttaccaaacagacggctgcgttcttcctcgctgaagtcttcaaaaacatcatcttcgctgcggtattcgcggtctttttccagatagaagccttcaacgccggcctttttggacaattcggcttccagttccttcaaatttttgcctgattccacacaagccttgattccatcccacattgccagatagaaagcagcgatagcaatataggtattagtataaggattaggcgaacgcatttctatacgggtcgccatcggactgtcgatatcgcggatcaaacctgccagaatcgtacggttacgggaagggacctgcggactgatacccaaagaggtaacgatacagacaggggcttcaaaacctggcttcaagcggttcaatgaatcgatcgtagctgaaataaaaggattgattacctcatagttcttcaaaaggcccatcattgaaccgtaaccgatagcagacagaaaatccgctttcatatcgccgggcgcaaacagattgaccattttaccatttttgagttttgcggcaataccgacatgggtatgttcgccgcttcctgcaacgccggggatcggtttagcctggaaggaaacttccagaccgttcatccgaaaaacctctttaacgataatgcgggccagcagttcgttatcagcagtttgcagaccgatgttaaatttccagtctacttccagctgttccataacatgcgtcatatgacctgcgccgtcgatctgtccacgtacgccgccgcattctttatggcccatttccggttccagaccataagcttccatcatttctatagtctgttctaaagcggtacgcacgttaccgcgggtacgctgccagtattgctcctgcatcatctgcgaagaagaaagggcttcgatcggtgcgtcttcacgcggagatttaacccagaattccagctcggtagcacaggtaaagaccagtttttcaatctgagacaggtcaacatgttcaagacctgctatctgcggatgttttttgaacatttccagcatttgtgcttccacataatccaggctgttttgcaggatcgaacgggaatcaacaaagatttcgttgtggatcaggaaacagggtatgcgcagggttccgaccattttacctgtctgagcatcaaaatgctcgtaattataatcaatataccagttgacacttttgtcgaccttcatatcgacgcgggcgttatttaaagtagcaatgcccggcaaaacaacggaagaaccatcagtctgagcagccataccttccaggaagctgttgatatcttcgataaataaattgatgggcactttttcgtcggtatcgttaccggcaaagtccacacccataaaagaaacaaatttgatttccgggtgcatttccagcaaagccttcagttcctccggggtttgctgttcggggttaatgtaatacaacatttctttgttcatcatagcaatcacttgcggcactgtgccgcgctcctttcccaatgctgaagctgaaatacaaatataaaaaggaccttcctatttttaagcaataaaatagaaagatccccattgatctatcgccatcattataacaaacaacagtcaggcttgtccagtgtttaaaacaaactttaaacactttttttaaccaaacaccaaatatcacttgctcaaaagccggatcaatatttcttccagcttttcaaactgccggccgccatagcggatttcgatattgagctgtgatagttccaaaagtgcccgttccagttcacccaagccaaagcggcggctctgctccgccattttttttacagcaaaaggcgcggcttttaactctgaagcgatctcggcctgcgaggcccttccttccagaagttctttgacacgtccaagacgtcgcaattggaacgaaaccaggccgcatagcgccagcacagtattaccgtgcttacgttcttcacccaaaagctccaaagtctgccccagcttcttttcggcaatggcgttcagcagcgcaaagcgcgaaacttcaggcaacgcagcgaaagtctgctcgatatcatctttcgtccaaatcttacgttcaccggcgtaaaccgatagtttttcgatttcctgttccagcagcagcagcggcgcattgtcagttaccgacagatattccatgatcgtttgtgacgcttcataatcaaaacggcagccgcgcagcgcagcctgttcgtccagccagggcttcagctgataggatttgagagacttgcattccaccatcgcagcagttttaagcaggcttttataaagtttaccgcgtttatcgattttttcgcctaacagcagtacctgacaatgttcaggtacatcagccagcagttctgccagctcttcctgctgctgtttgcgtttttcgccgccatccttacctccccacagcttttcatctttaatgataaccagactgcgtcctgagaaaaaagggtaggtattgacagcagcagatacttcctttatatccgtatcacgctcaaaaacagttatttccctgtcttccagcgcggcgtcgccaaaaacagcccgcggtaaagcagcggctattttatctttataatagccttcttcgccgaacactgcgattacaccagctacctgtgtaccggcacttaattgctgcataattttttctgccgtgatttccatgtttgtactccttcaagccactaaaaaaattccttctgataccgataactataacattttacctggctgccgtcaaaagtgattttaagcgctccgtcctgatctgtacgccgcacctgagccccgcaggctgccagacgctgcagcgtttcactgccaggatggccgtagctgttggccgcaccgactgagataaccgccagctgcggactgactgccgctaaaaacggcattgaagaagaagcattactgccatggtgactgaccttcaatacctgaccgggctgaatctgccccgctgccagcagttcctccgtttctgttgcatcacctgtaaaaacaatgctgccgtcagcagatacaaccctcacgatcagcgagctttcatttgcatcgctgtcagcgctaccgacaggcgcgctgatgatctgtattgcagtattgcccagggaataatttgtgccgctctcggcatatataagctgcgctttggtattcttcagcagtgcctgtatatctgctgaaggctgttcctgaggcataatgagcctgcgtataggtatattttcagctactgcggccgctcctcctgcatggtcgtggtgtccgtggcttaaaagcagcatatccagactgcgaatccccaggtaacgcagatagggcagaacgatacggctgcccgtatcatagtcaccacgcagaccaccggtatcaatcagcagcgtctgacgctgcggtgttacgaccagtgccgcatccccctgtcccacgtcgataaaatgtacggtcagaggctgcggcctgaatttatcataaagcccgatccccaccagcatacagcagcataaaccgatcagcaaccgtctttcgcaagcagtgaaatcatcccagtcgctgctgccgaaaagcagcaacaacagtaaataatagacagcgccgcataaaagaggccagctgccaacagtgacagttgcccagccgccggatgccagccagtgaatgatattcagcaaggggtgcagtaaaagccctgccagtaaaaacagcagctttcccaacccaaataccggcaggagggcatatcccgccagtgtcagcagtagtgccagttccagcagcggtactagaagcagattagctgccagcccactcagtgaaagctgatgaaaataatggatcaaaaacggcaaagccgccagctgtgctgttaaagatactgccaggatctcggcaatccccacaggtaagtaacgggtacacaggccgctcagtaccgggtagaaatacagcagccccgctgttgtggtaaatgataactgaaaacctgcgtcccaaagccagcgcggttcatagcagagcaacagtatgaccacagcacagaaaatattactgcgctgcggcagcctgccactaacgccagctccaaatagtgccagcgacataagcaaagccctcagtacaggcggtttgaacccgcacaaagccgcataaaaaaataaaatccctgccagcagcgccatagtacagtggttacggcgccgcagcagtacaagcagaaagcctgtcaccactgctatatgcgtaccagatacagccagcagatgcgccaatcccacagcagcaaaatcttcccgcgtctgcgcgctgataccgtcgtaaccacctaaagtcataccggctaaaacagccccggcctgtcccggtacagtatgctgcagatttgaacgcagccctgcagccagtccgccgatatactgcctgatactttgtccgtccccggacaaatacagctcactgccttttatagacattcgcccctgtaaatcctgcaattcgttccacagcccgccatcccaaccacccggattggcaaaatcagtcagtggtttaagcgttccctgtacaataacgccaccggttattttctcgctaagatcctgcccttggacgaacacacgtactttaccagatactgcgattgctgtatctggtaaagagctgccaagttccgcactatttgtctgcaccgcttgacaggcaagcaccagactgattccctgcggcgttactttgacactgccagcttccactctgccgaaaatacgtacttcctgaccggtaaaagtctgcaaaggcagctgcggctgacgcatggccccgctgccgctggcagcgccacaacaaaaacacaaaccaatacctgccgcggccaacaactttactccagccttttggcggcagcaccaggcaagcagcagcagaaaaagtgccgccagtatcaatgctggtatcaacggcaacagcttactgagccctgcgtggcagccaagcagaaatgccagtgtggcggcgacaatgatctgttccagctgacgctgcatcacagctccagataaggctgcattttgctaaacttggccttaccgatccctttgaccttcataacatcctcgatactggcaaacccatgcgccgcccgatactcaagtatacgctgcgcggtaatatcaccgaccccaggcaacgctgtcagttcggcagccgtagccgtattcaaatgtaccttgccgccagcttttgctgtgcccctgccactctcagcagcagtctttaccgagaccaaagtatttgcgcctgctgcctcagcagctgcacctgcatttaccggcgcagtctgctcacgcaattgcctggcacttaaccgcggcacatttacctgcataccatctttcagcagctttgccaaattaactttatcgggattagcttccagtgtcattcctccggcagcggcgatagccgcagtagctctgctccctgcggggatttcatataaacccggctttgctaccgcaccgcttacatataccttaactccccgagtctgtaccgcactgataccagctgccggtacaggcacaacagcagcagtatcctgcgggctgcttcccagcagactgccgccggcacataaaactacggcagcccccaaagctgctacttttcctctcagccctcgttccatcatcgctatccagcccctttaaaacgcaaaaagcagagttcctgaggtcaacaataaattcgttataccttaggaactctgccatagcgtctttatgatttgatcttactgatccagctatttaatttttttctgcgatttaaggtctggcaacaatattgaccaaacgtccgggtacgcagacgatcttcacgatcttgccgacatcgaccatagcagcgatatgttcatccgccaaagccagtttttccagttcttccctgccggcttccgcaggtacaaccaaacggcctttgaccttaccgttgacttgcagcacgatctcgacattatcgaccttcatggcctctgcctcggctttaggccagctttgtgcatgcacgctgctgtcagcgtcgatgacgccatgccacaattcttcggttacgtgcggtacgaaaggagcaagcaaccgcagcaaagcggaaacggtttcataaaccagaccggcattgtaatttttctgagcttccttataaacatataaagcattgaccaactccatcatcgcactgattgcagtattgaaattaaatcgctgctcgatatcgtcggtaacttttttgatcgtattatgcagcacgcggcgcagctctttatcagcttcatccagttttgaagtatcatagccggtgaccttttgggccagctcaccctggaagtggctgacgatacgccagacacggttgataaaacggaaggaaccctccacgccctgatcgctccattccaactctctttcaggcggagcagcaaacataataaacagacgagcagtatcggcaccgtatttggaaatgatctcttccggagaaacgacattacctaaagatttactcattttcgcaccgtctttaatgaccatgccctgagtcagcaggttggtaaatggttcgtcgtattttacaaggcctgcgtcacgcaataccttcataaagaaacgtgaatacagcaaatgcaggatcgcatgctcgatacccccgatgtactgatcgaccggagcccagtaatcaacagcttctttactgaatggagcagtatcgtttttcggatcggtataccgcagataataccaggaagaacacaggaaagtgtccatagtatcggtctcgcggcgggccggtttaccgcatttggggcaggtgcagttaacaaagctttcactggttgccagcggtgaaacgctgcccgcatcaaacttgacgtcttccggtaaacgtaccggcagctctgcttccggcacaagaacttcgccacagtcaggacagtaaataatcgggatcggagccccccaataacgctgacggctgatgagccagtcgcgcagacggtagttgacatgacgggaaccaaagccttgttcttccgcataatccataatagctttgattgcagcatgcatctccatgccgctgaacttgccggaatttaccagcacgccctctttttcttcataggcggcagtcatatcttcaacttttaattcctggtctttaggagtaacgacaacgatcttatccagaccgtatttatcggcaaacatccagtcgcgctgatcacctgtaggtacacccataacagctccggtgccataatcgtacaggacatagttggtgacccagatctctacctggcggccattgaaaggattgacagcatatttcccggtaaagataccttctttttccgactcgctggaagtacgttcaatatcggactggttgcgcacacgggcgcagaaagccctgatctcgtctgccttcggattatcccggcacaactgctctaccattggatgctcggcagccaggaccacgaaggtaacgccaaatgccgtatccggacgggtagtgtaaacaggtagcttagcattgatgcagggcacgtcaaagctgaattccagaccttcactgcgcccgatccagtttttctgcatcgtcttaacgcgttccggccagccgttcaaaagtttcagatcatccaaaagttcttccgcataatcggtaattttgaagaaccattgttccagatcttttttgacgacctcatggtcacagcgccagcagcgtccgtcgataacctgctcattagccaaaacagtgttgcattcaccacaccagttgacagcagattttttcttgacggccaaaccgcgcttataaaacagctcaaagaaccactgggtccatttatagtaatcttccttacaggtggcaacttcgcggtcccaatcataggacagtcccagttccttctgctgacgggtcatgttggcgatattttccatcgtccatttagcagggtggataccatgtttgatcgcggcattctcagccggcataccaaaagaatcccagcccatcggatgcagcacgttaaaaccgttcatactgcggaagcgggcaactacgtcgccgatggaataattgcgtacgtgccccatatgcaggttgcccgaaggatacgggaacatttccagcacataagacttgggtttgcctgcatcaatatcagttttaaatgccttgttatcttcccaatatttctgccatttgctttctatggcatggggagtatacttttcttcgatcattcttctcataacctcctaaaatttgcttaccaccgcagcgcggcaaataaaaaagtccccggctgttaggccagggacgaaatagctttcgcggtaccaccctgattgccgaaaaaaaatctcggccactcaaaacctgtaacgccggttatgcgtccgcgcttttgacgcggctcctccgcggcgagttcaccttgctcccgtattgactcgcagctgccgtcaactttctgcaacagggatctgtggttactactccgcttcaccgaatttgttcattctgcaaatactttaaccattatatcacaaatccgcggagtttcaagtcttttcttccccatctgcctagtacgcactgcaggcggcttttaatgctcttcgctcatctggagcctgcttactctccctcaagcttaatagtatgacgctgctgcaccaacagccaaaatgccagtgtgatcaccagtacgatgatacctgacaatgcaaacatattggcatagcccaatatctcggtaataaaccccagacccatagcgccgacgacgatgccgacttcaataaaagcagtaaaaaaacccagtgctggtccacgttcttccggccgggtaacatcaacgaccagtgcagtaagcgccggcactaaagctccatatcccagtccgaataatattgcgatcagcccaagcgtccaaacgttatccataataaagaaacacatagccgccagtgcaaccaaaagtgaaaacggcaaaatcaccagacgcctgtcgacatgatcggacagcttaccggcaaagaccctgctgcccatcgtcgccaaagcatagactacgaaaaaaataccataatcacttatattccgctgctgcgcataaatcggtaaaaaagtaagaatcgcgccatagaccagtgatgcacccaaaaggcacagcgaagacataaaaattacccgccgcctgaaaatcggcagcagatccagtttttgttcctgctcataaacaggattcgtttccttgagcggcagtaacacgaaaaagcatactaatgccgtaacaaaagtcacgttgaacaaaaaaggataactttgtgtatgctgaaggatccaaatgcctgctgctggaaaaacagccatagaaaccacactgcaggtctgataaatccccaacacctcgccgcgcctgtctaccggcgcataatcggctatataggcagccgatgccgccagatacatcgccagacaaacaccatgcgcaagcctgagtacgaccagcggcaccacgccggtaactctgccgaacagcagaaacaacagtgcaaaagaaatcgtacccagaagcatcatacgcttacgaccccattcgttggccagtttacccaaatacggccgtataataaaggacgacaggccgaaagcgccaccaaccagcccgatatcggcaggtgtaccgcccaacatctccacatactgcggcaataccggaatatacaaataaaaagctccgtaatacaaaaaattagccaggcaaaacaaaataaaattcattgaccacatactgaaatcctgctgctttgtcatagttgcccctcccctgcgttttgatactttcattgtataaaaatgctgaaagcggcaacagcaaccagggatagaaaggaaaaagattctcgcatcctaattcagactttatatctatattaaacggattaatcagactttggcagtagacacaggcatttattttcgcgctgaggtcaaacctgtcagcaattccttgcattccttcttaaaataagctaacataaagttaacattaagcagcaaaaatggagcataattcatgaaaatttacgctatcggcgacctgcacctttccggaaagcctccgtccaagcctatggaaatcttcgggaaacactgggcagaccacgccgccaaggttgcagccaactggcatcaacttatcagcagcgacgataccgtcatcatctgcggcgacacctcctgggccatggacctgcaagacgctctgaccgacctgaactggatcgccgcccttcccgggcgcaaaatcattctgcgcggcaaccatgactactggtggtcatctttaaaaaagatgcagactgcgacagaaaataatttcagctttctgcaaaacaacttttttacctgcggcacgactgccatatgcggcagtcgtggctggctcctgccttcatctgacaattttaacgcggacgatgccgctatctaccgccgtgaaggactgcgcctggaggcttcactggaagctgccagacaagccggctacagcgatatcatagccgcactgcattatccgcctctttatgacgctgcaaatgaatctgtttttgccgaactgctggagcgttacggcgtcaggcactgcgttttcggccatattcacggcagcgatgcaagcatggtttttgaaggtatccgcaacggcatcacctataagcttgtcagctgtgacacgcagggttttataccgcagctggtaaaataaacagcgaagaaggcgttcctatgcccaaaaatatttccgcagcaacactgatggttttatccgcctgcatcatttggggcgcacagccgatgttcgtcacttttgtcgtccgcgagttcgacccgatccctctggtcagtatccgttattttacagtaggcgtagtgctgctggcagcgctggcttacagcggcgaaaaactgctgccaccacgcaaggcctggctgccgctgtttttgatgggcgtcctcagcgttggcggcaacaatgttgcgcaatttacaggcctgcaatactcgaccgtagccaaccttactattattgcctcgctgacgcctgccgtgaccgcactcttaagtctggtgctgctgcatgaacggctgcacaagctgcaatggctaggtatcgccgccagtatcatcggcgccgtttacctgatcagcaaaggttcgctttcaacgattatcaacctgaactttaatttcggtgatatcctgttctgcgtcagtatggtcgcctgggctttttataccattcttgtcgcgcaggtcagtaaatatgtatctgcctacagcgctgtagcctgggccgggctgcttggctcgctgactacggctgcttacagtatcctgaccgggcagtttgcactgccctatgacctttccgctttagcttgggggtcctatttttacgttatttttatcggcagcctggtcggtatgctgttctggaacaaaggcatccgcgttatcggccccagtcaggccgccgtgtttatgaatctgatgccgttagtaggcatcatctgcggcatcgcctttctcgacgaaagcttctatacttccgaagcagttggcggcgctcttatcatcgccggtgtgtatctgactactcagtaccgcctgctggcctataaactggccagatatctggtcaaacgccggcggcagaaatcattgaacgactgttaaacttttaagttacgggcagatgcccggcactttataaatcatcatcgaaaggtctgtcagcactgccatgcaaacgaacaagcttaccgcctcggcacttttgatctgcacttgcgtcatctggggcattcaacctatgttcgccaaattcgttgtcagggaaatgtcgcccatacctatggtcagcattcgctacactatcgtagccctgacgctgtttgccatgcttgcctggcgcggcgaaaagctgctaccaccacgcaggacctggccggccttatttaccatgggcatcctcggcgtctgcatcaataacgttacccaatttaccgggctgcaatattcgacagtcaccaactttaccattatcgccacactcacgcccatcgtgacggctctgctcagctttgtgctgatccatgaacgtctgcaccgcctgcaatggctcggcatctgcagcagcctgtgcggcgcgctgtacctgctcagcaacggttcgcttgcggccatattgacgctgagctttaatatcggcgacgtactcttttttaccagtcaggtcgcctgggcactttactctatcatcgtcgtgcgcatcatcgacgatgtttccccctttgccatcgtcgcctggtcgggtctgttaggttcgcttaccacggcagccggcgctgcttattttggtcatttcgaacttccctcactactttcaccgctggctcttggttcatatctgttcgtcatttttgccggcgggctgattgccatgatcttctggaacaaaggtaccggcatcgtcggacccagtcaggcagccgtatttatgaacatcatgccgctggtcggcatcgtctgcggggtgctgtttcttgacgaacaacttctcatctcccaggctattggcggcgtacttatcctcggcggcgtctatctgaccacacaataccgtaccgtcgcctatcgactggcaaaatattttacgcatcgccagcgtaaacgacagccgctgcgctgacatatcgatgatgggcgacctaagcacaaacagatcaaaatatctctcacagtcaagcttcttctgctcgcgtctgcaacggcggcgagcctttttattttaacaggtactatgtcatccccgactttattgacacaggctgcgaacagtgctatgctaaaaatgtttacggcatatgtcgcaaactcataacaattacagtaaaggagcggtataacaatgaaaatcgcagttacttatcaggacggcgacatctttcaacacttcggacacaccgaattctttaaaatttacgacatcgaaaacactgacatcgtcaaaacagaaatcgtcagcaccaacggcagcggccatggcgcgctggcacaatttctgcacgaacacagcgtcgatactctgatctgcggcggtatcggcggcggcgctcaactggcattgtcacaagcaggcatcaagctttatggcggcgttaccggcaaggccgatgatgcagtaaatgatttgctcaataataaactgaactatgacccggcagtaaaatgcgcccaccacgaacaggaacacggcggcgcaggccacacctgcggcgcacacggctgcggtagcaatagtcaccacggacattaagcgccttgccctgcatgatttacctgaacagcaaaattcagtacactacttactcactgctacggcagtgggtttttctttttccggatttttcaacttattatattaattttctctactataaacaagatcctatctcatgataagcaacactacttttccaacgtctgagcttttttattgctgttttagttttgaaataaaatttatttatattgttgactaaaaaagttgcatcctttcaaagtcgtagtataataggcattataataaatttaaagtttttgaggggatgcacttatgcaaacaaaaaaattaaaatacctgctgctgtttgccgttatcgcaatagccgccgcagtggcatggtactttgcctactgggtcaaaacgccgcagtattcgctgggccttattggcagcgcagtacaaaagcacgattttgcggcttttgaaaagcacgtcgatatggaaacactttacagcagtgcttatgacgatgtcgttgttgcctcttttggtaacgaacgcctgtcaagcccgattctggctgcgttagtacagaatatcaaaggtgttgccgtcccgatcctgatcgaccagaccagacaatacgtcaacggcggtactatggaagaagcagatccaagtgatgctgactcgccgatgctgcaaaacaacggtactgatatcgtcaataatctgaaaaacaagacaggtgtcaattctatgcagtatcagggtgtggaaaagattcagaaaaatggcagtgtcgctgtcgtaaccatcaaagttttcgacagcgaattagacaaacattttttagtagagcttgctatgcagcagcttgctgacgatacctggcagataactaagatcaacaatctgaaaactttgatcaatgaacgtgatcaggccttacaaaacaaactggctgaaattaacgctcctgtacaaaagcagatcgacgacgctgttgccgtttctccgcaaaaaatctttataacttcggctccttattccggcgttatccgcctgttagaagcagatattcagctgactaacaacgcgatgaaggagttgcagtattttaccggtgttctggagctttacaacgctgataacgaattattttacagtggcaattttgccagcagcaaagatcttgccgccaaacagaccgcagtttataaattcaactgggagctgaacccctttctgactgatgatgccaaggttatgaacagcgatttcagcaaagtgacctggaaggcttctctaagcagtctgtcctttgccgatggctctacaatcgaacttttaacgcagctgcctgttaaagcagcaactaaataaaaacgtgaaagccgtaacgccgatccaacagcgttacggcttttttattaccactgacagcaggctttcgctttgctgcggatcaaagcaccgccatcttgcaaagttccgtcggcagatgccagcttccacagatcccatctttcaaaagtcgttgccggcccataatcatcaaggtcagccgcttctgcatgagtcataacataattatcgtcgatcggcaaatccagtccccggcacaaaactgctactacccgcgccaaggtttctaactgctgccgtgtaggcggcacgctgccaaagtccacactgccatcggtataagccaccgcgtcggcgcagcagcagatgcttaccgcaactgcgccgctgttacgatgccatgtatgctctttatattctgtcagtttcccgcagctgctccacactgtaccgtcacctgtgatgttcaaatgatagtcgtcataagtattgttataatgccccgccgtccagtgcaaataaatccttctgatctcaccctttgcgttttcagccagcgccgccaattcctgcaatgttatttcacgcattttctatccctccgtctcaggctgcctgcgcctgctgctcatcataaaacttctcaacagttatatcacaggttttgccattgctttttataataatatcgccgcataaagcagtattgaaaacatcggcctgtaaattgtacagtctttgtaccacttccgggctgggatgcttatatttattaccttcgccgctgctgatgaccgctatcttcggtttgacagcagctaaaaattcattgatcgatgatgttttactgccgtgatgcgccacctttaaaacctgcgcctgcagtgcctcagagtcagtttgcagcagatcacgttctacttcggcctgaatatccccggtcagcagcattgcaaaatctttatactccaaccgcagcaccagactgttgttattggtgtcagaaggagtccccttatacaacgcctgcggactcaggaccttcagcttcaccatttcattgaccggaacttcctgaccgccgcgcagcacttcaaaaggaatctgttccttttcaatctgcaaacgaaagtcgttatacattttagttttataattctgaccgctgtcataaacctgttttaccggaaacctgttcagcaccgctttcatcccgccgatatggtcggcatgcggatgtgtagcgatcagcatatcgatctgctcgacatgattttcttccagcttagtcagcagcctggcagcttcgctgcggtcgccgctgtcgatcaggatatttttcccctgcatttgtaccaggatactgtctccctgtccaatatccaaagcagtaacggcaaggatatcgtcagcagttttcacagcgtcctgtgtttttgcctccgcttttggcggcatttctttgggtactgcagtatccattgcctgcaactgctccagcaaaaccggcacataactttttaccagctcgctgtctttagtaacaacgccggctgcaagcaccagcgcagccaaaagtatcgctaaaaatgaagtcttcttcatatgttccgctccttaatttaaatgcagatcgtgatgcagcggcttaaaaacactcattttaccaccgtgctccagcactgctgttgcaaaacctgcgtcataatccggcagcttcggcattttgctttgctgaagctgttcattgccgggcagcagcaatcttaaagcataatctatttttaccgcgcccagccacatcaggtactctatctcgacatcgtggaagccgtccatatcggtccttagtgcagcacacagctgttccacctgcaatagctgttccatattcattcctctggttccacgctcgcgccaatattctatgatctttcctatcccacgacctaaaataagctgctgatgctgtttcacctcaaaaagcagccggcggcgcagatacacgacctgatccagccctactgccaaagtgcggttggcaagctccaacttgctcatgtgtgaattatcccacaaaggttggcttgcaccggatgcatccagcatcagtaatggaacaggcgatttcagcatactttcgctgcccagattatcataaacgccgccatcagtcagatagagcttggccggattttccggtttctgcgttcccgtaccgtaaagatccctgaattctcttgcctctacatccagctccaaaggtgcgaagcctaccggataagcagccgaagccgcaacggcaaaagcaatggggatatcgtcgatatcactgctgcgccccagcagataaccgtaaatatcactacttttaaacctgaatctttttaaggtattgatacatgtagcattgcagctccattctgtcgctgcctctgcctgcttcatttttctgccttcaaacagttcttcgtctaacacctgtggaaaagctttactcatcttcggccttaaagcagccgccagagccaactgctgcagcttgggcagatatggcagcagataagcgagccaggatgcttttgtcatgatacgcctgcggaaattgcactgtcccagattgatcagtttcgttgtcacccgcctgtcaaaatcaagcaaactgctgaaatcaccttctgccaaagcgctgatgacagcacctgccgcaatactgccgccggacacagaggttatttcgttgacatgtttttcaagtcccagctctactaatctgcggtaagccccaagacagtaaaacgtagctctgaaaccgccgccgctgaaaccaagattgatcttattatctatttccacttcattttccctcctttgaaaaaagccgcccataacaggcggctttcttaatcttccagccataccggccttctggcaaaaccaacatggtaaactatgtactgcatcaccacctgatgctcaccgatattcagcaaatagaagttcttctcctgtccgatgatccgtccgcgcggagaatctgacagacagcggtttagcagctgacgctgcttttcaatgtcttcctcatttactgttttttctggatcggtattgccgataacaacacgttttacatagcccaccgcacttacatcaaatggtttcgtcatcatagttacctgcctttacacctcatcaggcaacatcattatcagctgtataatgttcttgcccctgtgctcctgctgccgcagttttctggatacttgtggggttgatcgccgtattgaggatatccaaaacacgggacagaccttccggcatctcgccctgagtagcgcggacctgcacatgatattttgcggaattatcactcttacgggtattttccttatgactggagatagatcccttaactttggctttcatgctgaaaggaccgatctgcaaacccatctctgcttccagctcgccttttttatcgtcgatttccgactgagtttccgaagattttacttccatatcgaaggtaatatctaccagatcgatcgacagagacggaactttgaccatcgccaaaagcgggatattcatttccactttttcagaagcgggaccattgccgtcatcgccgttagcgctgcgggtaaagctgaaccctacggtacgtacgacctgtttatcgccttccttaaccaggccgacctcttcaataaagcgagccgttgcgccggccagcatcgtctgtgcgtcacaggcagcctgcagcggaccgccgatcaaagactccattggcaaaccgccgaattcttccgccatttttactaatgccataattaactacatcctttctgtttgtactttatcagggcagtattttcaccatctgatcattgattttcataactgcttcaggaggatcgttagactcaaacagcaattctacatcgacaaaattatcggtatccgttttgttggaagacaaaatatttgccagcagaccgctgtcattgcttttaccatcatcccagctgctcagctttaccttaaacttcagcttcatctccttcagcttcagagaattcatcggtaccagcgcaattttcggcacctgcaccagtacatattccagttcgcctgtgtcaggattgatacgaggatattggatatcaaaagtcagcggtttctgcgactcgtcaaaataacgtttcataacattcaagtgctgattttcaatcatgctgtgcgcttttaaaattgattcctgcatcgctcccaacaaattctcaaagtattgctttttcgccatcacggctcctcctcataatcaaaatttacggctgtaaagatcggtcaccttaacctgcagcgctcttgccaaagcgtcaagaaccggaacagtcggatgccgttcgcctaattcgatcgcactgatcatacttgtactgatacctgataatttagataaatgcttttgagtcatacgtttctcagtgcggacctggaaacagataataacaaatcataagccagcccccctttctaggtgcctttttctttagctcctccccgcagcttcaaaaagttttccataccggctttggcaaaataaccgctgatgataacagaaaacggaccgtcaacataatctatcagcctgtccggtatttctctgtatattaaccaagtgccggccgaaaacattatgatgccgacaaataaccaggtcaccgttccgacaacctttttggagaagctcagtttttcatcatcaagttccatagctttcacctccctggctttacattactattatctttatccacaatggtggaatattataagaaatactttattattttaatgttttacgaatttttaaattgtgaaacatttttatttttgctttttatcctttcataagtcctcgcagctgtatcccagtacttagaaagggcaataaaaaagccccgcttacaaaatgtaaacggggctttcgcctttttctgtatttttccaggcctcagcatgtaaaaaacatgtatcaatattcactttattacttttaatttttttagattacttaaagcgttttaaacgcagggcattgcttactaccgaaaccgagctcagcgacattgccgccgcagcgatcatcgggtcaagcagaggtccgccgaaaatgtgcagcactcctgcggctacaggtataccaataatattgtagccaaaagcccagaacagattttctttaacgttgcggatcgtagccttacttaaacgcagggtagtactgatattacgaatatctccgttgaccagcacgacctgcgccgattctatcgccacatcagtcccgccgccaacggcaatgcccagatcagcctgcgccaaagccggtgcgtcgttgataccgtcgccaaccatggcgacgatctccccaccctgctggaagcttttgatcagctcggccttatgaccaggcatcagctcagctactacttcgtccacgccagcctgctgcgcaatataagcagcagcgcgtttattatcgccggtcaggataacggtacggatattcagctcgtgcagcttctgcattgcttcctgggtttcttccttcagcgtatcggcgatagcaaaaataccgcacaaattacggccgatcgtcagataaacgatcgttttaccaactgacgctaatttttcgccaagttctatggcattcggcggaatcattgccacaggctgtacaaaggacaaatttcccaaccgtacgttggtattttcacaacgggcagcgataccgccgcccaccgtagttctaaaatctgtacaggtcggcagttccatccctgcggcccgttctttgacagctactgccagcggatgagctgaaccttgttcaattgccgccgccagccttgttatcgcttcttctttggctccattccagccgataacgtctgttactatcggtttgcccttcgtaatcgtaccggttttatcaaaaaccgccattgttacattatgagctgtttctaaagcttctgcatttttgaacagtacgcctttttcagcacccttacctacagcgaccatgattgccgccggtgtcgccagtcctaaagcgcaggggcaggcaataacaagtacggcaacaaagacctgcatggcaaatttactgccggcgccggcaaaccaccagctcaagccagcaactaaagctatcaccagcactaccggcacaaaaaccgccgcaattttatcagccgttttggcaatcggcgctttcgagccctgagccgcttcgaccatctgcatgatctgcgacagcatcgtatccttaccgactttttcggctttaaaacgcagatacccgtcggtaactactgtagccgcaaaaacattttcgccgacacttttacctacaggcatactttcaccggtcagcatcgattcgtcaatactggcgtgcccgtctgtgatcaccccgtcgaccggtatctgattgcctgggtggacgataactatatcacctgtcaggatcgcttcgcgcggaatctctacctcttcgccgtccttccagataaagcctgtcttcggcgccaggttaagcaggctgctgatagcgtgtccagcttcacctttcgcgcgcagttctaaaaacttaccacacaaaacaaaggtcaaaatagcgccggcagattcaaaataaagactatgcacagcatgaggatttatttttgccagaacttcgtaggttgaatagctgctgtaaataaacgcagcacccgtacctaaagcaaccagtgtatccattgacggaacaccgtttttcaagctgatgataccatttttgaaaaacggaccgccggcatacaatatcggcagcgttaataacaactgcacaaaagcatagacatcgctcatctgatccggatctatcggtaccggtaaaaatttaccaggaatcatcggcgccatcgccaaatataacagcggcacaaaaaagaaagccgccactttcaaacgtttctttaaatcaagggcatcctgttccgccctctgttccgctgtcgattcttcgcccggcgcatcatggacaacaccaaagctcattctggtcacagcttcttccagctgctctatggtagcctgattttcatcataacgcaccaacgccgactgagtcgccagattgacttccgctctgtcgacgccgggaaccttcttcaatgaacgttccacaccattagaacaggcagcgcaatgcattcctgaaattttaatagttattgttttcataagctttatttttcaacagtgaaaccagcttcttttactgcactttccaactgctccactgtagccggggcttcatattctacaactgccatgcactgctccaggtctactgctgcgtgttttacgcccggtacatcctccaatgccatttttacactggcaacacaacctgcacatgacataccaaaaatatacatactcgctttttccataatttatgcctccatttcgaaatttaaatttgcttcagcgttaccattaaaaaccagcaacgttaatttaaggttagcgaaagctatccttacacatcttataaatcaatcttaacaacctgtaaagcctttgtcaaataatactgtaaagtaaaaagataacttaagttcttttagataatgtcagcaattcattccttaaatctattataacatatgagtcattattcatatatctttttctgcaaaacctttgtgaattatttttctgactgccgcattattaccacatttacctgctttttctaactgtcctgctttatttttcaacttctgtctattttacacaaaccagttttgttttatactatattttgtagatttaactgaagaaggtgttttttatgcgtaatgacaatattaccaagctgacgctggcaggtatgtttgcagctttggctttcgtttgttttacttatctgcggatcgagatccccatgggcggcggtatgaccggcaaaatttatatcggtcatgcttttatcctcctgtctgctctgattctgggggcaaaatacggagcgcttacaggtgcaataggtctgtcactggcagacattttagccggttataccacatcagcaccgccgacttttttagtcaaatttctattgggactggcggtagcctttattgctcataaagtttttaatctggctgcggcagatgacaaaaaagcgactaagatcgtaactatagcggctgttttcggctgcctggtcaatgttattaccgaaccgctgattcgctatggcttcaaagtcttcgttttaggacttccgcaccagatagcctatctatctgcaatcaactgtgctgtttccatggcggtaagcgctgtgccctctgttattttagcagttttcctgtataaagcagtgcagcatagtatcctgaaaagctataaatttgtttaaccttacattcacaatacccctaaaaaa

SEQ ID NO: 9985 - DNA, 23991 bp, Unknown
  gut microbiota DNA sequence
tgcaggaaatcttcttctccctgctctgagcaggctcacataaagctgctttttctttagctgaagcatcgataaacgctttagcataatatccatccaactcaagcagactgtattccccattctcaaattgaacggccagctgatacacagatgctttaggaggttttaacactgcccccatgagctcctgaccatattcttctgtcatcccctcaagtgcacaatcagactttcctgcaaaagcatctttgatagcttcctcagttacaaattcccacgtatgaattgtttctttgctgatgataattccttcatcaggttctttaaaatgcatcttcgttacgatcatacaaactggatttaagaaaacagcactgccagatagctgccccaggatcactttatttttagccataaaattttcatccttctttacgacagatttttactatcattacagacttggcaatttacactttctccccttcttcctgttattgatccgtaattttctctgctattgctgctgtttatttctagctttgcggcaaagctcctgcctgcctcctttcacttttacacgaaatttacgacaaaaggcacagtactttatcagtactgtgcctttatctgcaagataaccaaactacgcctgtcttaatattttttatctgatttttacaccgctctgattatttctcagctctgttaatagcgcataggatacccaaaagcgcagctacgttgatattactgtcgataccaacaccaaagatatgtccattaccgggaatcttcagttctatgtaacaaatacccttcgcgtcagaaccgcgggaaatagcatgttcgtgataattaacaaattcatagccctctacgccgattcctgccagcgcctggaagaatgaatctatcgggccgttgccgacaccggcaacttctttcatatcaccacaaacatcgattttaccttcaaaacgagtatgtgtagtgccatccaactcccgttgttccaggaagctgtgagaagccagtttgtatttaccatcaaactctacatattcacggttaaacaagtcaacgatctgttcttccttcaattcatcaccaaaagcatcggaagcagccttcacaatattgccaaattcaggatgcatttccttcggcagcctgtaaccgacagcatgctgcagcacaaaagctgcgccgcctttaccggattggctgttgatacggataacaggttcgtattcacggctcagatcagcaggattgatcggaagatacggtacttcccaataaggagtatcgctttccgccatatattcgtaacccttacgtatagcatcctgatgcgaaccggagaacgcggtaaacgccaattcacccgcataaggctgacgctcgggcaccttcatcttggtacaggcctcataaatttttttgaccgccagaatattggaaaaatcaagctccggatcaacgccctgagtatacatattcaaagcaactgtcacaatatcaagattgccagtgcgctcgccgttgccaaacaatgttccttcgatgcggtctgctccgcccagcagggcaagttcagccgcagcaacacctgtcccgcggtcattatgcggatgaatgctgataatagcagcttccctgtttttcatcttagtacagaaatattcgatctgatccgcatatgtgttcggcgttgacatttccactgttgaaggcagattcagaatgatcgggttctcattcgttgcccccagggtttccattaccgactcgcatatttcaatagcaaaatcgatctcagtaccggtaaagctttcaggagaatattcataccgaatattcataccgctgctggcaatttcttcctccgtcagctgacggataagttttgcaccctccactgcgatcttgataatgcctggcatatcttctttaaatacgaccttcctctgtaaggtagaggtagaattataaaaatgtacgataacgtttttagcgcctttaactgcttcaaaagtttttttgatcagttccggacgcgcctgtaccagtacctgaatcgttacatcatcgggaatatgatgcccttcgatcaaagtgcgcaggatctcatattcggtttcagatgcagacggaaaaccaacttctatttctttaaagccaatatctaccagagtcttgaacatcagcagcttttcttccagctgcatcggcgtaaccaaagcctgattcccgtcgcgcaggtcaacactgcaccaaatcggcgccttggtaatagttttattcggccattggcgattcggccactggagcggctgaaaaggaatatactgtttacttgcttgtttcataaatatttgcctccaatctgtttatgccggcacagcggcccaacttcggaagcggaaataaaaaatccccgctccctacgataaatgcataggggcgaggaactgttatccacgcggtaccaccctaattcagctgccaagcagccctctcagcctcaaacaaggcccaggctcttaacgttgccacacgttctgctctacatatcaagcagacaactccgggatgagctatccataaaacttttgccatcgacttgcaccaaccgtcgactctctgaggcctgccagttttatcttgttcccttcacagtctttgaggtgaaaatttttgaattgttaaaagttattatacctacttgcctgatacttgtcaagagaaaatatacgactctaaaacgtcaccttcattaaaatgattacataaactaaataaaaagcatacttttactgcatattataacaacagtatttatttttttaatcctgtttagttaattcaaaggagtcttttcatattgacaaaaagaaaacccgcacaaattgtgcgggttttgaacttctgttcccaatgattaacgtttcgagaactggcttgctttacgcgcttttttaagaccgtatttacgacgttctttttcgcgcggatcgcgagtcaggaagccagcttttttcaaagccggacgatattcagcgtcaacgtcgagcaaagcacgagcgataccatgacggatcgcacctgcctgaccggaaataccgccgccaataacatttacgagtacgtcgtatttgcctttggtttcagtaatttcaagcggttggttaacgatgagttccaatgttttcagaccaaaataattggtcagctcacggccgttaataacgattttaccttcacccggaaccaggcgaacgcgagcaactgaagatttgcgacgaccagtcgcactataagtaactactgccatttacgtttcctcctccggattatcttacgttgatttctaaagtttcaggtttttgagctgcatgcgggtgttcaggaccagcatatacatgcagtttagtgtagatctggctgccaaggcgatttttaggaatcatacctttaactgcgagttctaccatttttaccgggttcttagcgagcatatcgccagcttttgtgtagctgtcgccgccaaggtaaccggaatgacggaagtaaactttttgaaccagttttttaccggtcaaaactactttgtcagcattgattacgattacatgatctccggtatccatatgcggagtaaaagtcggtttgtgtttgccacgaaggatttttgcaacttcggctgccatgcggccaagagttttatcagctgcgtcaacaacgaaccatttacgttcgatattggacggattagccataaaagatttcatccttatgtccctccctaaagtatttcctgttcgatgtaattttatcgtttctctccggggctagtggagataggcgtaaaatcacgtatgtatattgtaaccatcttgacattttttgtcaagtaaaatcaggattattttctgattttttcaatatctgccagaaaatgcggtatataaccaacataatctaaataaagtccctgaggaggcgccggggcaaccttaaaatgacgcttgcctgctgcaaattcacttttaaatgcagcaatacttttagtgcctttgccgacttctaccagatgccagacgatattacgcaccatatgatataaaaatccattaccttcaatgcagaattccagttctccctgctctttttgcagccattcagcgcggtaaatcgttttaacaggcgaactttgcacactgccggccgaacggaaaaacgaaaaatcatgtgttcccaaaagcagctgtgctgcctcctgcatcgcttcaagccgcagatattcccgcatttgccagacatagttacgcaggaaagggtccgcatgtttattctgcactatgcgataacaataacgtttccaacaagcgctgtatctggcatgaaaaccttcgtcagcttcctcagcctgccaaagcacgatatccttcggcaggattcctgcacaggcctttaaaagattctccaatggaatactaccgctggttgtcagcgacactacctgcccccgtgcatgcacacccgtatcagtacgtccagaaccggctgtaacgattttttcgccgcagagcaaggatagtttctcttcaagcacctgctgcactgtaagagcattagtctgcttctgaaaaccatggtaattagtgccgtcataagccactgttaatttcagagtacgcataacgcgttcccccagcgaataaacgccatcagaccaatcaaaacaaacactgtcgctaatgccgcatagtcacgtccataataaacgagctcgtgcatacggctgcgtccttctccaccgcgataacaacgtgcttccattgctaccgccagatcatcggcacgtctgaacgcactgataaaaagaggtatcaaaagcggcagcatatttttggctctctgcatcagattgccgctggaaaaatcagctccgcgtgcggtctgtgccttcataatcctgtctgtttcctcaagcagcgtaggtataaaccgtaaggcgatagtcatcatcattgccagctcatgcgctggtacgccaaaacgtttaaatgggcgcagcagagcctctatcccgtcagtcaaaactattggtgaagtcgtaaatgtcagtatcgaagaaataagcagcagcagaatcagacgcatcgacattttcaggcccatttccagaccttcctgcgttactttaaaaaatttccaggaaaaaattacattttcaccctgccctgtaaacatatggattaccattgtcagaacaatgatgatccacagcggctttattgattttagaaccagcatcagcggcagacgtgataaaagaataatcaaaaatacgaaaccccaaagtattccataagatacggctcctgaggccagaaaaatagcgacaatgaaaaataatgttatcagtatcttcgtccgcgggtccaacttatgaatcagagaatttcccgggtaatattgtccaagcgcaatgtcagtcagcatttatttcaacccctttgctgttttgatctgcgcttccagtgcttccgcagtcatggtatccgcctggatttccatcccgcgtgcacgcagttcatcactgagtttaaaaagctgcggtacgtccatgcttaccgccaaaagttcatttttatgattttgataaatttcagcaggacttccgtctaaaatgacgcgtccaccggaaataaccagcagccggttactgtaacgggctgcttcttccatactgtgcgtaactaaaatcacagccatccggcgttttttatacaaagccatgatttctgcaaaaacagcatcacgtgaacgcggatcaagtccggcagaaggttcgtctaaaatcagataatcaggatccattgctattaccccggcaatcgccacgcggcgcatttgtcctccggaaagctgaaacggagaccggctggcaaaggtttcaaaatccaaacccacaaatctcatcgcgtcttggacctgctgcttaacctcattctcctgcatccccttattccgcggtccaaatgcaatatcctcaaaaacagtttcagcaaagatctgatgttcaggatattggaaaaccataccaacctggtgtcttgctttttttacggcttcacctttgccgctgatatccagtccatcaatcgttactttacctgccgacggttttaaaagaccattcagatgctgcactaaagtcgattttccgctgccggtatgcccgatcacagcaacaaactctcctttgtccacagtcagcgaaacaccttgcagcgctttgcgttcgtagggtgttttagccatatatgtaaattctactttttctaatgttatcggcatatgctttcagccaactcctcatttgtaataattccctgctgtaaattcagaccgctttgccgcaaatcatcggcaattttagcagctaaaggcgcttctaatcctaaagcatataactctcgtacatgactgaacacctctttcggcgtcccctgcattttgagcttgccctctcccataacaatgattcggtcagcctgcagcgcctcttccatataatgagttatataaaccacggtaatgcctttttcccggttcaattttttgacagtagttactatttctttgcgtccctgtggatcgagcatagccgtcggttcatctaaaacaatacacttgggttccaatgctaaaacacctgcgatcgccacgcgctgtttttgacccccggaaagcagatgcggagcatgcttggcataatcactcatacctaccgccgccagcgcggcatccactcttgttcttatttccgccgttggcacaccgatattttccggtccaaaggcaacgtcttcctcgacaattgccgccacgatctgattatcaggattttgaaacaccatccctacatgctggcggatattccaaagattttcttctaccgtagtatccataccctcgatcaggcacacaccttcacttggcctctgcaaagcgttaaaatgacgtgctaaagtacttttgccactgccattggcaccaataacagcaacaaattcaccttgtcttatttctaaattgatcctatccagagcttttatttctttattttcactgtcggtataaacatgtgttaaattttttacctcaattatagtttgcatggcaaacctccgcttaattcagtacctttatattatattattccagcccaggtacgtcaaccgcctccagcacacttggttaactttacaaaaataagacccggaaaatccggatcttaagttcaaactttcttattctcaaattcaccgcagcatcatctgagacaagatttatttttacctgactgcaacacccataagctaatgctgatgtacatatgtataaaaacgatctttccgaaggatcattcaattctataataaagcaaatttgtcactttcaaaaattgctttcatctgacacagacaaaaaggatgccccgcaggatcaaacatcacgcgccagccctcagaaaactgttcagcagccattgttgctccgcagttaatcgcatgctgaactgccttttccaaatcattgactgcaaagtccagatgcgccatctgctgctggactcccggctcttccggccagacaggcggacagtactccggatttcgctgaaaaagtattcccggataagttccctgtgatgttccaggtgctcctatacaggcccagttctcatcataaaaaggtatttcccaattcagcagctctgcatagaatttagccaatgcataagggtctatgcaatctactgtgaaagaatacattttaattttcaattctttctccatttttaaccctcccaatacaagatgcttttcttattatttgtcagtcttcatccagctgcgcatcagctgtacttcccgccagcctaaatatgctgccaggacagcagccgcaaaatctgctgtcatacctgcatacataacgccgttgatgccataaaacaaaggcagtatgacaatcagcggcagtaaaaaaataatctgccttgtcagtgaaaggatgatgcctttagttgctttaccaatggacgtaaaaaaattggaagaaatcggttggatacagtctaaaaaggtaaagaacaaataaattctgaaatattcctccgcaaactgataataagcttctgatccttcaccgaagaaaccaatgatctgccgcgggaaaagctggaaacaggcaaaagcaataatggatactaccgttcctatcagcagcgttaagcggtaagcttctataacacgcccgtattttttggcgccgtagttaaaactgacgattggctgcagcccctgcgacaaaccaataatgattgaaaaatagatcatatttactttcgtaatgattcctgaacaggccaaaggtatttcactgccgtatattgaatctgcgccataatgagttagagtattgtttaatgttatttgcactaccataatcgcaaattgattaaaacagctggcagcgccaagtgccgagatcaaacgggaacgttcccagttcggcagcaaatcgtttttagacaacggcagagtcttgaacttccttaaatatccagcgaccataagccccgacacaacttgcccgataacagttgcagatgctgagccggcaatgccccaatccattacaaaaacaaacagcgggttaagaatcagattgataaaagcaccggtcagcatacaaatcatcgaatacttaggactgccgtcagcacgcaccaaagtactgccacccgtccctaaaatcaaaaacgggaaccccagacaattgatccctgcaaaaataagcgcatattttaaaacaatatccgtcgcaccaaaagcgatcatcaaaggctttaaaaataccagtacaaataccgccagcaccacaccactgccgacaagcagcgttatggcattgccaatatatttagccgcttcctcgcgtttacctgccccaagtttcaaattgaaattagacgcaccgccaacgccaaaaagcagccctaacgcagtacataccgtagttaacggcaaagcgacattagttgccgcattaccgtacatcccaacgctgcgtccgataaaaaactgatcgacaatattatataaggctcctaccagcatagctataatacttggcaaagcaaaatcatgtaaaagtctgcttattttttcacttccaagtggattttcttcatttaccttcataaattattcctcgcatatttctaactttttctcatataattattatacatcttttttatcctgtattgctaatgccacttgtgaattaactgtgtccctttgggaatttcccactaacaataataaaaaaaccaggaacaaaagttcctggttttcatgcttattcttaaacaagctcgataattgccatttcagcagcgtcaccgcgacgaggacctactctgtaaatacgagtaaagccgccttgtctttctgcatatttcggagcgatttcatcaaaaagctttctggtagcttcttcatcgacgagaactgcaagaacttgacgacgggcatgcaagtcgccttgttttgccaaagtaatcaatttggctacatggctgctaacttccttagctttagtcacagtagtttcaattctctcgtgtttgatgaaggagctcaaaatgctgcgaaacaaagctttacggttgctggaattacggcccagttttctgtatgccattcgtttccgacccccttcttattcttcgtcactattgcgtaaagccagtcccaaatcggctaattttttcttaacctcatcgagggatttacgacctaagttacgtactttcatcatgtcttcttcggtcttttgaaccagttcatcaacagtattgatgcctgcacgtctcaagcagttgttggaacgtacggacaaatcaagatcgtcgatggaaacggaaccaggacctgcttggacaggctcctcgaccggagcggtctcagaactgccaactacggtgaccatactgctggaagcagcggtaccggtttggaacaacttcaggtaatcaatcatgatactggatgccatgctgattgcttcgtccggctcaacgcttccgtctgtccaaacttccaaagtcagcttgtcataattggtaacgttaccaacacgagtatcggtaacaccaaattttactctcgtaatcggagaataaatggaatccacaggaatcataccaatcggttgatcagggcgtttgttcttatcagcaggaacatagcccagtcccttgtcgatggcaatctccatattgagtttcgcatctttgtccaaggtagcaatatgcagctcaggattcaaaatctctacgtcggcatcaacaaggatgtctgctgcagtaacttcttgctcaccgctgcattcgatacgtaaagtttttggttcttcactgcttactttaaggcaaagagccttgatgttgaggataatatccgcaacatcttctcttacgcctggaattgtagagaattcgtgcagcacgccgtcaattttaacagctgtaaccgcagcaccgggtaaagaagaaagcaatactctgcgaaggctgttgcccagcgtgataccgtagcctctttccaacggttcccatacaaatttgccataacggccgtcatcgctgatctcagcggtgaccattttaggtttttctatttcgatcatgcggaaagcctccttctcgtgcgtattaccacaatacgcctaatgttgggtggcagatgttcaactaattatttagagtacaactcaacgatgagatgttcttcgataggaacatcgatttcctcacgggtcgggaaacgatcaactttaccgctcaagctttgagcatcgagaacgagccaagcaggagtagttttggaagccagggtttcagccatacctttgaagtattctttaccacggctgttttccataacgctgataacgtcgccggcttttaccaaagcggaagcgatatcaagacgtttgccgttaacagcgatatgaccatgagttaccaattgacgagcttggctgcggctatcggccaggccaagacggtaaactacattgtccattcttctttccagaagaacgagcaggttttcacctgtaatacctttttgtttttcggctttaacgaaggtattatggaattgacgttctaacataccgtaaatacggcgtgctttttgtttttcacgtaactgaataccgtactcagatacttttttgcgtgcttgaccatgctgaccaggagcataggagcgaacagcaaaagcgcatttgtcgctgtagcatctgtcacctttaagaaacagttttgcgccttcacgacggcattgacggcatacagcctcagtatatcttgccatttagcgggtacacctccaataaattaaactcttctacgtttcggcggacggcagccgttgtgaggaatcggagtaacgtctttaatggagttaacttcgagacctgcagcctgaagagcacgaatagctgcttcacgaccagcgccggggcctttaacgaatacttcaacttgtttcaagccatgttccattgcagctttagttgcttcttcagcagccatctgagcagcaaacggagtgcttttacgggaaccgcggaagcctaagccgccggcagatgcccagctgagtacattaccgttcatatcggcaatagtaacgatagtattattgaaagtggaacgaatatgagctacgccactttcgatatttttacttactttctttttgttgcgaacaacttttttaccagccactcgtttatccctccctcactgattatttcttcttacctgcaatagtacgtttcggacctttgcgagtacgagcattgtttttggtattttgaccacgaacgggcaagcccatacgatgtctgcggccgcgatagctaccaatttcaatcaggcgttttatattgagggattcctcacggcggaggtcaccttctactttataatcaccatcgatagtttcacgaagttttgcaacttcttcctctgtcagatcgcgaacgcgggtatcaggattgataccggttttgctcaggatctcacgagacagggtaagaccgatgccataaatgtacggcagtgcgtattcaatacgtttgtctctaggtaaatcgacaccagcaatacgtgccattaacgctgcacctccttcttagccttgtttttgtttatgtttcgggttttcgcaaattaccattacatggcctttgcgtttaatgactttgcatttttcacatattggtttaacagacggtctgactttcatattttaaacctcctcttgcctgtctttggttatttgaaccgataagtaattcttccacgacttaaatcgtacggagtaagctcgacagtaaccctatcgccaggcaaaattttgatgaagttcatacgtatcttaccggatatgtgtgccagaatcacatgaccgttttccaatttaacttggaacatggcgttcggtagggattctaagattgtgccttcaacttcaattacgtcttgtttggacacagcgttttacctccttacttcagcgccccgagactagctttaacatcagcgtaaactttgccgatttcctgcaggccatcgatttcatgatatacgccttgttttttgtagtactcgatcaacggttccgtttgcgaatgatatgcatgcaaacgattttttacagtttcttctttatcgtcgtcacgttgatacaacgcgccgccgcatttatcgcacataccttccaccttactgggattgtattctacatgatatgtagcgccgcaggccttgcagatacgtctgccggtgaccctgcctacaagctcagcgtcaggaactacgatattaaccacaccggtcaatttaatgcccagatcagttaaaatgccgtcgagggcaacagcctgctcttcggttcttggaaatccatccaagataaatccattggcacattcaggtttggctaagccttcccgaacaataccgatggtaacgacgtcgggcacgaggccaccggcgtccatgtatctttttgcctctttacctaattctgtgccttgcttaacagctgcacggaacatatcaccagtagagatatgcggaattttgtattcagcaatgagtttttctgcttgagtgcctttaccggcacccggaggtcccatcaaaagaatatacattctaatcttcctcctatttcataaagccctggtaatgacgcatcaaaaccaaagactctacttgtttcattgtatccaatgcaacaccgactacgatcaaaagggccgtaccaccgaaatagataccctctataccggtgatccaaccaacaacattcggcatcagagcaatcaatgcgagaaagattgcgccggccagagtgattctggacatgattttatccaagtaatcagttgtcggtttgccaggacgcagtccgggaataaaaccgccatattttttgatattatccgacatttcagctatattcacgcttactgcggtatagaagtaagtgaagaataaaatcatcaatacatacaaagtagtttgaagaggagtaccccatgcaaaccagcctgcaacagtttttacccaaggaatgtctacaaactggccaatcgtaaccggaaacatcagcacggaggatgcaaagatgatcggaattacgcctgcctggttgacctttaaaggaatgtagctggtgtgaccaccgtacattttacggccaacaacacgttttgcatattgaaccgggattttgcgaataccttgagagatcgctacaacaaagacaatcatcgccaaagctatcaccgcgaacaaaatcacgttcagaatgttaaccgtgccggcttgcagatattggaaaataacatgcattccatcaggaagtctggaaacgataccagcaaagatgatcagcgagataccgttaccaatacctttagacgtaatctgttcaccgatccacatcaaaaataccgtaccagcagttaaactgatcgcaatcaacagaatcgacatgatcccggggttattgattgctgatctcagaccataagccatacctaaagcctggataaaaccaagcagaactgtaccgccgcgagtcagctgagtaacctttttctgaccttccacaccttctttggaccattgttctaatgtaggaacaacgacctttaataattgaaggataatggacgcattgatatatggagtaatactcatagcaaaaattgagaatttgctcaaggcgccgccggagaacatatcaagcaggccaaacaaattaccgctttggaaaagctgctcgatcatggctacgttaacgccaggaacagggatatgtgttccagcccgaaaaacgatgaacatggcgagagtaaatacaactttttgcctgagttccgtaattctgaaaatattagcgagggctgcgaacacttagatcacctctacttttccgccggcagcaataattttttcttcagcagatttgctgaaacccatagcttgaaccgtgagctttttagtaagctcgccgttgccgaggatacgaacaccatcacgaatgtttttgatcattccgtgttcgatcagcattacaggttcaactactgtgccgtcttcaaagcaattgagactaccaacattgatttcgacataattcatgccaaatctattatagaatccacgtttaggcaaacgcagatacaaaggtttttgaccaccttcaaaaccaggacgttttacgccgccggagcgggatttttgtcctttttgacctttgccagatgttttaccaagtccggaaccgagaccacggccaacgcgaacggaggctcttttagatcccggagcgggagataattcatgcaaattcatctgtagcacacctccttgttttaagcttcaactttttcaactttcacaagatgttcaactttgtgaatcataccgcgaatagtcggggtgtcgtttttaacaacagtagaattgatttttcctaagcccagagcctttacggttgcgcgttgatcctgcgggtaaccgatcaagctacgggtcagcgtgattttaacttgttccatcatgctacctccttagccaagtaattcttgtacggtttttccgcgcagagctgcaacagcttcagcacttttcagggattttaaaccttccaaagttgcacgaacaacattgttagggttattagaaccttgacatttggtcaagatatcacgtacgcctgccaattcaagtacggcacgaacagggccgccggcaataacgccggtaccttctgcagccggtttcaagaacacacggcctgcgccgaacacaccaatgatttcatgaggaatggaagtgccaaccataggaacagtaatcaggttctttttagcatcttcaacgcctttgcggatagcttccggaacttcggcagctttaccaaggcccataccaacatgaccgttttcgtcaccaactacaacgagtgcggagaaggagaaacgacgtccgcctttaacaacctttgcaacgcggttgatgaatacgactttctcttttaagtcgctttcttgtttttcgaaattcgccacttttattcctccttctattagaattgcagtccagcttcacgagccgcgtctgccagtgcagcaacacgaccggtgtacaggtaaccgccacgatcaaatacaacttctttaattcctttagccaaagctttttcagcaatagccttgccaactgctttagcagcttcagtattgccgccgtagttagctttcaagtctttctcaacagtgctggcagcaacaatcgtttcgcctgttacatcgttaatcacttgtgcataaatattggacaaggaacgatatacattcaaacgaggtttttctgccgtaccgataatatattgacgagaacggagatgacgtttttgacgtttctcatttttatcaactctgttaagcaagagtttcactcccttcttttagaaattacttcttgcctttagcgccagctttacccatcttacgacgaacgtattcgccttcataacgaatacctttgcctttatagggttcaggcggacgcagagtgcggatttcagctgcaactgcgccgactttttctttgtctgcgccgctgacaacgattttgttaggagccggaacttcaaaagtaatacctgcaggcggctcttttactaccggatgagagaacccgagagtaaagttgatgttattgccttgtttagcggcacgatagccgacaccggcaatttctaaagatttgctgaaaccggtggttacaccgacaaccatgttgttgatcagagtacgggaaagaccgtgcatggaacgatgagttttttcatcactcggacgttcaacagtcagtacgccgttttccagagtcaatttcatatctttattgatttggcgagataattcgcctttgggacctttaacggtaaccaaattattttcaatagtaactgtaacgttagcgggtacagtaattggttgtttaccaattctagacacttatgagcacctcctatctttcaagtattaccagacgtatgccagcacttctccaccgagaccagccttacgggcagctttatcggtcatcaggccttgagaagtggagatcactgcgataccgagaccaccgaggactctgggcagctgatctttttgagagtatactctcaagccgggcttagaaatacgtttgataccggaaataactttttccttattagcaccgtatttcaggctgacgcggataacattttgtttgctatcggcaattacttcaaaatctttaatgaaaccttcagctttcaaaatctcagcaatagctactttgattttggagccggggatttcaactttatcgtgatgaaccgagtttgcgttacgaatacgggtaagcatatcggcaatcgggtcagtcattaccatacttaaataccctccttcctaatttgctgttttaccagctagctttggttactcccggaatagcgccttggtagctgtattcacggaagcagatacggcagagaccgaatttacgcatatagccatgtggtctgccgcaaaccttgcagcgattataacggcgaacttcaaatttcggctcatttttccatttttcaatcagggcttttttagccaaggtattccctcctcacttatgcgctgaacggcattccgaggagtctgagtaattctctggcttcctcgtcagtcttagcggtagtaacaatgatgatatccattccacggactttatcgatcttatcatattcaatttccgggaaaatcaattgttctttcatgcccaatgcgtagttgccacggccgtcaaaagcggtgggatttacgccgcgaaaatcgcgtacacgcggaagagcaatgttcatcaacttatcaaggaagtaatacatgcggtcaccgcgcagggtaactttggtaccgatcggcatcccttgacgcaatttaaaagctgcaatggattttttagctttagtgatgactggtctttgaccagcgatcaaagtcagatctgcaacagcagaatctaatgccttgctgttagctacagcttcaccgatacccatattgatgacaactttttcgattttagggatttccataacatttttatagttgaatttatccatcatgcctttaacagcttcggacaaatacttttcttgcaatcttgtttttgccattcaaaatttcctcctttcccggaatcttatttatcaattacttcgccgcattttttgcaggttcttacgaagctgccggaaactgcggtctttttaatacgagtagcttttttacaagccgggcatactaacattactttggaagaagcaatagcagcttctttagtaatgatgccgccttggggattagcctgagacggttttgtatggcgttttactttatttacgccttcaacgactactttagcttttttaggcagagcttcaatgatctttccttctttgcctttatctttgccggacaaaaccaaaacggtatcgcctttttttacatgcattttgattgctgcagtcatttcaggaacacctccttatgtgcattatcagatttcttacagcacttccggtgccagagaaatgattttcatgaaatctttatcgcgaagttcacgagcaacaggcccgaaaatacgggtgccgcgcgggctcttatcatctttaattacaactgctgcgttttcgtcgaagcggatataagaaccgtctggacgacgaacgccctttgcagaacgaacaacaactgcttttactacgtcacctttttttacaacgccaccgggtgatgcatctttaacagcgcatacgataacgtcaccaatgttagcatatttacggtaagaaccgcccaatacgcgaatgcacataactttcttagcgccagtattgtcaccaacattaagaatggtttgttgttgtatcatggttttccctcccttgccaatttatccgatcggcaatatcttattttgcacgctctaaaatttcaataacacgccagcatttatctttggaaagcggacgagtttgcataatttgaactacgtcgccaatatgcgcttcgttattttcatcatgagctttgaatttgatagtatgttttacaccttttttgtaaagcggatgttgaacaaaacgctcaatagcaactacaacagttttctgcattttgtcgcttactactttaccgatacgggtaacacgtgcgtttctttcttcggtcacgactgtttcctccttcttcatacttcaaacacactcaggcatttaactcgcgttgacgctgaatggtcttgatgcgggcaatagactttttgacttcgcgaattttcatcggattctcacattgtccggttgccatttgaaaacgcaggttgaagagttcttctttcaaaccagccaatttgctgtctaactcggaagcagacatttcacgaatttctgttgttttcattaagcttcaccacccttttcttgtgcggcagcttcggcttcttgctgtgcgcgggtcacaaatttacatttaataggcaatttgtggctagcaagacgcatagcttctttagcgatctcttcgctaactccgttcatttcgaacataacacgaccgggtttaactactgctacccaatattcaggtgaacctttaccactacccatacgagtttcagccggttttgcagtgatcggtttgtccgggaaaatttgaatccatacttgaccgccacgtttaatataacgtgtcattgcgatacgagctgcttcgatttgacgattggtgatccatgctggttccaatgctaccaagccatactcgccatgagcgattttgttaccgcgcattgcacgaccagtcatacggcctctatgttgtttacgatgtttaactctcttcggtaataacattagtttatgcctccttcaccggagcagcttgcgctacttctttgctttcaggaaggacttcacctttgtaaatccatacctttacgccgatacggccataagtggtatgagcttctgctgtgccataatcaatatcagcacgcagagtatgcagaggaatgctgccttcacgatagctttcgctgcgagcgatttcagcaccgcccagacgaccgccaacctgaactttaatacctttagcgcccatgcgcatggtacggccaacacattgtttcattgcacggcggaaagcgatacggcgttccaattgagatgcaatgttctctgcaaccaaagttgcgtccatatccggggtttttacctcaacgatgttgatatcaattacgctgtcggtcatttttttcaagtcgtttttcagcaattcaatgttgctgccctgacgaccgattaccataccaggtttagcagtatggatagagatgcgggctctattcgaagcgcgttctatttctactttagagataccggacaagaacagtttttctttaatgaattcacgaattttaatatcttctaataagaatttctcatagtctttgtcagcataccatttggaatcccaatctttgataatacctacgcggagaccatgcggattaactttttgacccactatcttttccctcctttttccgggatattatttttctttaacagcaactgttacgtggctagaacgttttaagattttgaacgcttgcccacgggaacgcggatggattcttttcatggtcggaccttgatctataaagcaggaagatacgatcagattatccacattcatatcatagttatgttcagcgtttgcaactgcactgcgcagtactttttcgataacctcagaaccaaccttaggggtatgtttgaggatcgcgaatgcttcacccacagctttgccgcggataagatcaatcacgatacgcaacttgcgcggcgcgatgcgaacatatcttgcaatagcttttgcttccatgttattttgccccctttccccttattttaaagatgtactcttatcggcatggcctttataagtacgcgtaggagcaaattctcctagtttgtggcctaccatatcttcagtgataaatacaggcacatgtttacgtccatcatggacagcaatagtatggcccaagaaatccggaagaatagtggagctgcgagaccatgtttttacgacttttttatcgttagaagcgttcagcgcttcaatcttcttttgaagacttgcatggacatacggtccttttttgattgatctggacactaggttagcctcctttctctatccttataattatttcgttctacgttttacgattaatttgctagaagcttttttctctttgcgggtacgagtaccaaatgcacatttaccccaaggagtaacaggacgtttacggccaacaggagaatgaccttcaccaccaccatgcggatggtcattcgggttcattacaacaccgcggttagccgggcgaataccgagccaacgagaacggcctgctttaccgatgcagatattttcagcgtcgatattgccaacttggccaatagtggcgcggcagttgatatgcactttacggatctcaccggaagggagacgaagcagagcataatcgccttctttagccatcaactgagcagaagtaccagcaccgcgggcaatttgaccgcctttgccaattttaagctcaacattgtgaaccatagtaccaagcggcatatttttcaaaggcaggcagttgccgattttgatatcagcatcaggtccgctttcgataacatcgcctactttaaggtctaaaggagcgaggatataacgtttttcgccatcagcatagtttactaaagcgatacgtgcattacggttaggatcgtattcgatggtagcaacacgagccggaacaccgtctttattgcgtttaaaatcgatgatacgatattgtcttttattaccgccgccttggtgacgaacagtcattttgccggtgttattacgacctgcatgtttttgcagtttttcaaccagcggacggtaaggcttatcagttgtaatctcttcgaaggtagacactgtaatgaagcgtctcgaaggagaatacggattaaagcttttaatagccatttaatttgcctccttattacgtcaaattacattccttcgaaaaggggaatcgtattgccttcagcaagtttcacgattgctttcttataatcggaacgtttgccaacgtatttacccatgcgtttggttttgccaaatacgcgtacagtatttacgtttaacacttttactttgaaaatttgttcaactgcctggcggatttccactttgttggcagtcaaaggaacttggaaagtgtatttgttgtcttgaagcattacggaagttttttcagtaatgatcggacggagtaaaatatcgcgagggttagcagccattatgcgagcacctcctcaattttagctacagcgtcttttgctaagaacactttattgttatgaagcagatcaaagcagttcaggcaaccgttggaaagtgcagtgactttcgaaatgttgcgtgaagacagctcaacattttcattagaaccgtcagtgatgagtaaagcctttttatcagctgcatcaaaagcagacagcatagttacaacatttttagttttaggagcatcaaagctcaagccctcaacaactataagttcaccggcagcaacttttgcagacaatgcacaacgaattgccaaacgacgagctttacggggcatttttttcgcataactgcgaggttgaggaccaaaagtggtaccaccacctacccaaatcggagaacgggtagaaccgctgcgagcgcggccggtgcctttttgtctccatggtttacgaccgccgccgcgaaccataccgcgggttttggtagcagaagtgccttgacgttcagcagcctgttgcataacaattgcttgatgtacaacagcttcattaaattcaacgccaaacacgagatcattcaattctatttcttcaccggtagcttgaccggagatgttatatactgataacttcggcattagaagcatcctcctttctttcgcttacgctcttatttattaggttttactgtttctttgattacaacaaaagaaccagcggcaccaggaatggagcctttgaccaaaataagattacgttcaacatcaactttagcaacagtcaaacgttgaacagttacttgtgcattacccatacggccaggcaattttttgcctttgataactctaccgccaggaccggaatgcataggacccatggaaccaggttcacgatgggatttggaaccgtgcttcataggaccacgagcgaaattgtggcgcttaatagtgcctgcaaagcctttaccgcgggaaataccggttgcatcaatcagttctccagcagcaaaaatgtcagcagtgatttgttggccgactgtatattcagaaggagcagacaaccgcaattctttgacaaatttaaccggagttacgccggctttgtcaaaatggcctttcattggtctggtcatatgtttttctttaacttcaccaaagccaagttgaacagcattataaccgtctgtttcttcggttttattttgaacaacaacacaaggtcctgcttctacaacagtaacagggatcaatctgccgtcagcttcaaaaatttgggtcataccaattttcttgcctaagattcctttagccattattgcacctcctccttacagtttaatctcgatatctacgccggcaggaaggtcaagacgcattaaagcatcaacggtcttcgcagtcggttccagaatgtctacaagtcttttgtgggtacgcatctcgaattgttcacgagaatccttgtttacatgaggggaacgcagaatcgtatagatatttttttcagtaggaagcggaatagggccggaaacctgagctccggtacgtttcgcagtttctacaatttttgcagcactttgatcaagcgctttgtgatcatacgcttttaagcgtattctgattttctgtgattttgacattaatttttttcctcctaatcgcccagtttctaagaacggacatactccgtgaaaatctccctgtctagcaggcaagcaacctctcacatcatcgcagggccatgcaaataaacataagtaaatgaggggcttttattagcccctcattcgggatctaattaaagattattcgttgatagcagcaacaacgcc

SEQ ID NO: 9986 - DNA, 21093 bp, Unknown
  gut microbiota DNA sequence
ctaaggggatccacctgttctcatcccgaacacagtagttaagcccttaaacgtcgaaagtacttggctggaagcggcctgggaggatagaaagttgccggttaaaaaataaccataccatacggtatggttatttttttatgtgatgaaaatacaatccggccagacattgccctgggacacatggcaggcaaaaccggaagttgcatgcctgtgtacttatgaagtaaaatatcgattcttataatgaataaccgctttaagtaaatttttcttaaaaacactactaaaaggagtatttatgttacaatatacttatcgctctgaaaggacatgttatgcaaaagaaaaattttttacctattttagcattagcagtaggtcatttggtgactgacttacaggctggtgctttaccaatagtattgccacaccttaaagaattatttacattgagttattcgcagctggcagctatagttttgacgcagaatattacgtcgtcggttattcagccggtatttggttatattacggataagcgatctatgcctgtcctgctgcctttttgcgctgctatggcaggtgcggggtttgccgccataggctgggtttccagttatactttaattttattgaccgttattataatcggtatagccagtgcgacttatcatcctcaggcttcaaaaactgttaattttttaagcgatgaaaacagtaaagccaaaaatatgggcattttttctctgggaggcaatgccggtatggccgtcggctccattttgatgacttttctcattggactgcaggatggcatccataatacgatgtattttattctgccagggctgcttgtttttgggttaatgatgaaatatatgccagattacaaacgtgttaatgcggagcatagtttgaaaaaagctgcagtacaaattaaagctgcttcagaaaagctctcttatacaggaatgtttatactgctgttttttatctttatgaggtctactatccatacgggattatctacgtatctgccgttattttttatgaaatttcgtggcagtgaagcaatttttgccagcgctttggtgtcggcatttttattgggtggtgtagcaggaacttatacaggtgcagtgctcagtgaccgtttaggcgcccgcaggatcattttaggatcgattatactaagtattccaacgatatggctgatcagccatgcaggaacggaaattggcgcaatgctggctgttgtggcttctggtttttttatcatcgggtcgtttgctacaactatcgttttagcgcagacgatgctgcctgataacgttgggatggcagcaggtcttactattggtttcagcgtcggtatgggtggttttggcgttactattttaggatttattgccgataattttggtttaccgctggtaatgcagatcgttacctggctgccggtagctgcggcgatcattgccctgaaaattccaattccggcaagtttaagaaaataattattggcagatagatggaggaacaatggaaagcactttcagacagggaataatttatagcttgaccgcttatttactatggggaattttgcctatttattggaaaactttaggcgtagtacaggcttttgagattttatcaaatcgttttatctggtcctgtgtttttgtatggatattgatcatcgcttccggcagagtaaaaagttttttagcagaaactcaggatatttttacaaatcctaaacaggctctggcaatgctggctgcggcaattacgatcagtttcaactgggggttgtttatttgggctgtcaatgacggcagaatagtagaaaccagtatgggctattatatcaatcctttagtgagcattgtttttggtgttttctttttgaaagaacgtttggataactggcaaatggcagcagttatctgcgctgtgatcggtgttggtacaatggtttggaacctgggccagctgccttgggtttctgtatcattagctgtttcttttgctttatacggcttgatcaagaaatgtttatcggtaacgacaatgacgagtattatgctggaaacactgcttataacgccgctggctttggcttatgaatattatttgagcctgcatggaaccagtgcttatcaaacagcagaaaccagtacgttgataatgctggcctgtgccggtgtagtgacggctacgccgttattgttttttacggcaggggcaaagcttttaccgttaaaaataattggatttttacagtatattgctccaacaatcagtttgctgataggcgtttttatgtacggagaaaacttcacatccgtacatatggtcgcttttggttggatatggtttggtctgtttttatttactatagcacagataaaacggcggtaaaaattgagttaagcagcagttaaattaaaaaaaactgctgcttttttattttcagaaaatttaggctgaagaaagaaggctttaaatatagacttgtaaaagcttttgtcagtgtcaagaagcgcttaaataaaacttttaatcaaacgattaaaagttgcccttgacagtgcactttgaacacaaagtatagacttcagtatctgtatgagccaataaacaaactagatattgtgttgtggaaaaatggggaaagttttctgaaagttatccacagaatgttgataaaatgtgtataacttaagggtgatatggtataacttggaaaatttaggggaaaaaaagattgaaactgtgtataatatgtaatttatacacagaatgctgtggaaaactatgtggatattgttgataaatggagaggattttgcttttttgacacatatattttgtatccgccttaggtggataaattaaaagtactgtcgataagcataatttatagttttgcgaacaaaggtttaaatagcgtttagttattttccgggttttacttgcgtaaaaggcgcagattgtggataatattagaaggaagataactgagatttttggaggatgaaaaatggctattaaacaagcactggcagtaaaaacaatggaggctgcggcaggcggcaaggttgtgtcagcctctctgagcgaagtcactaacggctgggtcgcactggttataaaggctgctgataaaaaattagtctgtgttacacagggggaatgtcctttgacagcgatgtgggctgtcgaaaattcctgtgaacaggatggtttgcatgtggatattatgtctttgaatgcaaataatgcggcagttatccgtcgttttgtaaaatgggcagcgcccagtgcctgcggcactaaaggtacgagtatcggtttcagtgactggctgggagctgcaggcggatgcattgcgccgctgtttgttaaaaagcaggtaaagcctgtccttgcagaatattcagctgctgacagcgtgctcttaaaacgcaattttctggaagctgtagatgctgcaacctggggagtttttgaaacaggttataaagaaggctatggtgccaatgctgaagggttgaaaagtgaagaagatattgtaaaggcattattatacggctatagcatgattggcctggactgcagcgataaaataaatctgcagatcgaaaaaatgtcagatgcagaggtagagaagcgttataatgattttccgcaggaatttcgtgatgcgatgcagggctcatatttggaagcaaattttcaggtaggaagtgaagttattcattttgagcctgaacagctgcggcgtatcgttttggaatatggtgaagctattatgcacgcacagttcatttataattcttatcttaaaaatactccctgggaaatagattttgagctgctgatatctaaagagggtaaattactttctccacaggagcattacctgattgctaatgaattgcaacgtaacggcattaaatttgcggctttagggctcaatactctggatgaggcgcagctgctgcaggaaatgctgcagacccatgccgctattgctgatacttttggctacagactgagttttttacatgctgatttgaccttaaaagatttgggagcagtagctaaaaccctgaaagggaaagtgcattttaagctcagcagcgtattgtggctggcagcctgggaaacggtgctgaagctggcaccgcagctggcctgtcaaatgcgggattatgccggtttagcagaaacagacgctctgataccacagactgagacaggaaaagcttacgcattaagttataaaactttgctggctccggaagcaggtaattttgcagatcaggtcaaagaagttttagcagttaatcatgccgcatatagtgaacgaatttctgttttggtaggcaattatttaagaacattgtaaacattggaacaaatataatattttttgaaaaaagtgttgacaagtgatgttaaaagtggcataatatgaccaatcttaatattgtattgtaaaagtgatgattgggaagaaagacaagatgtaaagttacagagagccgatggttggtggaaatcggcacggagcgcttgttgagtaaatcacccatgaactcgtcagcgaaagcagaagtaagtagcatgatgcgtaccagatgcgttaattctgagccggttgatggactggtgcgaagttataaattagggtggtaccgcgtattttatacgcccctgcaaaagcaggggcgttttttatttgttcctaacgcactgctttccatcaaaatcatacgagggaggaaataaaaatgtcgggaaaattatttttaaaggctaaaaatgaggagactttactgccgagagtgctgcgggtattgtcaaaacaaggtgtggacgtgcaggaactcaatatgaaggttcagtctgacggaatggaactggaaattgttttgaatactgaaagtgatgttgcgcaaatggcgaagctgctggcaaaacaggtcgcggtggtttccgtaaataccttgatgctgcaggaacaagctgcagtctgaaagtgctgattttgggaggaaagcgaagaatgaagttatctggtgcgcaagctattattaaagttttgttggaacagggagtagatactgttttcggttatccgggcggtcaggtaattcccttgtataatgcgttatatgacgcgccgctgcgtaatgtactgacggcgcatgaacagggagccatccatgctgctgacggttatgcacgtgccagcggcagaacgggggtttgtatagctacctccggccccggtgcgaccaatatcgttacgggactggctacagcttatttagattccgtaccgctggtagcgattacgggacaggtttctgttgcaaatttaggcagagactcttttcaggaaatagatattgtcggtgtgacgttgccgataacgaaatataatattttggtgcgtaagcctgaggatttgctgccggcgctgcggcaggcattttacctggcacaggaaggtcgtccgggaccggtgctggtggatgttcccagcaatctgcaggtcggagatgtggagtggatggaagcggagccactgacgccgcctgttatggaaacggccagagaagagatattggaagccgcagcagttactattactaatgccagacagccggtatttctggtaggcggcggcgctgttcacagcggtgctgcggaagaggtgctgcgttttgccagaaaaacagggatgccagtcgtcaatacgctgatggggattggggtttttccgggaagcgaccggcaatgcctggggctgacaggtatgcacggacacattgcagccaatatggcagttgctaatgccgatgtacttatcgtagcgggaagccgtttcagtgaacgagtcacaggtgaccgtaatcgttatgttggtaaaaaaacgattatccaattggatattgatccttctgaagtagataagaatgttatgacagcgctgcctttagtcggagatatgaaagagaacctcaacaagctaagtgaacgggtgaaaaaacttgatatagaacattggtggcatacgattaaagcctgggatgcgacagaaaaccgtgcggcacagtccggcgaaagattgacagcgccctggctgatgaaagaactgacgcgcagctttaaaggtgaagatacggtatttgttactgacgtcgggcaaaatcagatgtgggcagccttacatctggaagtagacgcgccgcggcatcatttgaccagcggcggctgcggaacgatgggatttggtctaccggcagccttgggagctaaaattgccctgcctgaggcgcaggttgtacagatctgcggcgacggaggctttaaaatgaccggtatggaaatctatacagcgatgcgtgaaagcgctccttttattactgttgtcatcaataacagttgtttgggtatggtccgtcaatggcagcaggttttttatgataaacgttactcttctactattctgacgccgtttaattttgttggttttgctaaagcctgcggcgcagacggtgcgacagtaactacttgtgctgaatttaccgccgcattggcaaaagcgcgtaaacaaggaaaaaatttcctgatcgaagcggtagtagaacaaagtgatctggttgaaccaatggtagctcccggcgcggtgcttgacgattttgtcaaaactgacgcctgataaaaagggccttatgagggaaaaaataaagcttcggcgctaaataagacaagccgtaaataagggaaagagtcgtagaaaacagccgaaggaaataaccgtcatgctttttaggatgacggttatttttagtaaactacccttgcaatttactgggactaatggtataatacataagcttgtatatagtaatatatacttcccctgctcccattagggggccaaagtccaaaggaggaggtgatttcgtgaataactacgaagtcatgtacatcgtaaaacccgttgaagaggaagcttttgaagctcttgttgctaaatttgacaacctcatcaacaataacggtggtactgtagaaaaaaccgatcgttggggcaagaaacgtcttgcttatgaaatcgacgatatcgcagaaggtttgtatgttctcgtaactttcagtgcagaacctaaaacagtcaaagaacttgaccgcgttatgaagattaccgatgaaattttgcgtcacatgattatcagaaaaggtgagtaaccaggagggtaactagtatgaacaaagttattttaatgggccgcttaactcgtgatcctgaggttcgttatactcagacaggcaaagttgtatgccagttcactttagcggtagacagaccttttgctaatcaggaaggccaaagagaagctgattttattgctatcgttgtatggggtaaaatcgctgaattatgcgggaatagtcttacaaaaggtcaaagggctcttgtagacggtcgtttgcagattcgcagctatgatgctaaagatggtacgaaacgctgggtgacagaagttattgccaacagcgtagaattcattgaacgtaaagcaactggcagcggagctccggttcagtccggcgatgcaggtccgaagagcgagatggaatcttttggttccgcagttccttttgatgaagagatcccattctaaatagggaggttatgcgaatgaaacgtgaaagaggcagaagaaccagaagaaaagtatgcagcttctgtgttgataaagttgaagaaatcgattataaggacgttgctaagctgcgccgttatattactgaacgcggcaaaattttgccccgtcgtatttccggtaactgtgctaaacatcaacgccaaatgactactgctatcaaacgcgcacgtaacgtagctctgctgccatttacctgcgaataatattagcttttagttatgaaattaagcaccctgtacttattacagggtgctttttgtatatttttgtgcagatattgacggctgggcaagttgttgctataatgtagcttgaagttagcgatagctaaccagagcggctgatgattttttataataaaggagatgtaaacgtggcaacaagaagaggaccgagatttaaagagtgccgtagattcggcatcaatgtgtgtggtcatcccaaagctttggatagattgggaacaactgtaaaacgcagtaaaaaaatgtcagaatatggtaaacaacttttagaaaaacaaaaaataaaagcttattatggcatttttgaacgtcaattactgagatactataaagctgcaagtaaaagtaaggcacgtacggcagacgctttattctgcacactggaatgccgtttagacaacctggtttaccgtatcggttttgcaaattctattcgtctggcacgccagcaggtaacgcaccgtcatattctggtcaatggtaaaaatgtcaatatcccgtcttatatctgtaaggcaggcgatgtgatcagtttgaaagaaaattcgcgcagtaacgagctttttaaaagtaatttcctggaacgtgaaagctttgctttgccgtatatcagtaagaataaagaaagcttcagcggtactctggttcgtctgcctctgcgggaagagattcctattcagatcgaagaccagctcgttgtagaatatttctcacgttgatctagcatgaaaaattatgaatgttataatgaactgacctattgggataaatttctttcagaaaagcgtttggcgacagtcgggttttgtgaagacaatacgcaggaaacggtgattgttaacgcaagtatcatcgctgctgaaatgcagattttcagcagtcaatggctgtgcctgccgaattgttatgccgtgcttggctttttgcagtatgtgtattttcctacagttttttatcatagcatgtatggaaatgatgaattaaaaatgcctctggtaagtacaggggctttatgtgactatattgccggccgcgatgttaaaaataaagctgctatgctggaactgttacaaaagctgcagcagctgtggcaactgcccgaaggtgaatgcctgcagcagcttcaggatatctgtactgctttcaattcacataggctggatacaactgcggtagcacagatcctgctgtttgaagaggtgccacaggtttttgaatatataaagcagcagatctggtgcgaagaagttttttatgaggattttggctgttcctacagctggctggaaaagctgtgtcaaagctttactaatggttcctttttccgttatcggctgctgcattttttaaatgaccgtgtcggttgtttagcaggttaaaagaacaattttataatttttacgaaacgtcccgcactaccaagtgcaggacgtttcttttatggcgcgatgccgcagatttagaaaaaagttgtattctgagaaggaatgacttatgatacttgcaaggaagctttaatgtgaaagtaaatacagcttgtaggagtattggtttcgtgaaaagttatggagggaaagtaaaaaagttacagactgattttttgaaaataatggaggtatatgatgcagctgactgtgttggtagataacaatactctgattgaccgttattatttaggtgagccgggcgtagcctattatctggaagatggtgatgtcagaattttatttgatgtgggttattcggatatatttcttagaaacgcccaggcgttggggattgatttgagccgcttacagcaggtagtgctttcacatgggcataatgatcatacacggggtttgctatggctgagcgagcaggaatatttttctgaactgcagctgctggcgcatccggaggctctgaagccgaagcagtttgccggcgaagctataggcgccccttttacagcacagcagctgcaggaaaagtgcaggctgcggcttagtaaagaaccggtatggttaacaaaacggctggtttttttaggcgagatcccaacactgaatgattttgaacagcggcatgggtttggcagtgctgaggatcctgtagatttagtacttgatgatacggctttagtttaccgaggctcagaaggattatttgtgattacaggctgttcgcacagcgggatctgcaatatcattgaatatgctaaaaaggtttgcggtgaagctaaggttcagggggttatcggcggctggcatttatttaaggtcgacgaccgtctggaaaaaacgatcgcctatttacagaagcataatatccgggagctgtatccgtgccactgctgttcctttcaagcgaaagcggcagtacatgcacagatacctgttaaagaaattggtgttggtaaggttattgagataaactgaaaaatacctcgggaaaaatcccgaggtatttttatttattttcagctatagtcttttattagaacagaataaacagtaatcgcagaacggcaaatttttacaacttttttacagcggggagggttcttttgacagcggctttacgcaaggtagtagtacaataagtcatcatcagtagtaaggtgatttgcaagtggtgtttttgtacaaggagggaaaatgatgatggaaatgctgcccttgactgagttatggctcagttcgcttttagcagtaggtattttattttatctgatttatgcattattgaaaccggaggatttttaaaatgacaaaagacattatgctatttgtgctgtttttagccgtattattgctgtgcgcctggccgcttggtaaatatatggcgcgagtttttaattacgaaaaaacctgtggtgaaagattttttgcacctttggaaaatattttttataaaatggctaaagttgacccgcgcgcagaaatgccgtggaaggaatactgcctgaatctcattatttttaatgctttaggtatgttatcactttttgttttgcagctgacgcaggcttttttaccgctcaatccgcagcagctgcccaacgtcgaaacctggcatcttgcttttaatacggctgccagctttatgaccaatactaactggcaggcttatagcggcgaaacgactttaagttatttgacacaaatgctgggcttgactgtacaaaacttcttgtcggcggcaacaggagctgctgtcgcaattgctctgatccgtggtctggtgcgtaaaaatactggtgagttaggcaatttttgggcagatataatcagatgtacgaccagaatactgctgccgatttgtgttgtagtaacattgctgctggtttctcagggtgttatccaaaaccttaatccttatgttgatgtacaaaccgtcgaaggggcacagcagactattgctatgggaccggttgcttctcaggaagcgattaaggagctgggtaccaatggcggcggtttttttaatgccaattcttctcatccgtttgaaaatccgactccctggagcaattttctggaaatgtttttgattttagtgatccctacaggtttattatttacttttggtgagatgtgtaaagataaaaaacaaggctatgctgttttggcatccatgctgctgctttttgttttgatgctgggggtttgctatgcttctgaaaaatatggtaatccgatagttgctgcgcagggcatcagcggcgatactgctatggagggcaaagaagtccgttttggtatcggcagcagcagtttgtttgcaacggttaccacagctgcgtcctgcggtgcagtaaactcgatgcatgacagctacaccggtaccggcggattagtgcctatgctgcagatgatgctgggagaagttgttctgggcggtgtcggcgccggattttacggtatgatgctgtacgtatttatcacagttttcattgttggcctgatggtaggacgtacacctgaatatctggggaaaaagattgaagcaaaagaagttgttttgacaattgccggacttttgattccggctgccactattttaacgatgtcggctgtatcctgtcttacagaagccggtcaggccgggatatccaaccccgggccgcatggtctcagtgaaatcttatacggtttcgcttccggtgtcggcaataacggcagtgcttttgccggtttgggcgccaatagcctgtggtacaatgttttgatcggtttggcaatgctgatcggccgctttgccgttattgtgcctgttttggccattgcaggcaatatggcaaccaaaaaaatcgctcctgccaatgccggtacttttaatacgggcagcagtctttttgccgtgcttttggccggtgttgttttgatcgtcggcgcgttgacttttttaccggccctggccctgggaccgatcgtagatcaattgtttatgctgcagggcaaggtattttaaggaggatctgagatgaaaagagatagacaacagcaagatattttgggcgaggccgtgcgtaatgcgttcctgaagctcgatcctcgtatccaatggaagaatcctgttatgttcatagtttttctgggcgcgattttagtagcagttctggctgtacgtgcttttatggcaggcaatacacaggaaggctggtttgacctgcatatagatttatggctgtggtttacggttctgtttgccaattttgccgaagccgtagccgaaggccgcggcaaagcgcaggcagaaagtctgcgtaaagcccgcaaatctctgcaggcaaagaaaatcaaagctgatggcagttttgaaatcgtcggttccgaagctatccgcaagggtgatatagttttggttgaagctggcgataccattcctaacgacggcgaagtaatcgaaggcatggcatcggtggatgaaagcgctgttaccggtgaatcagcgcctgttatccgcgaatcaggcggtgataaatcttctgtaaccggcggcactaaggtgttatccgactggattaaagtcagggtgactactaatcccggcgaaacctttctcgatcggatgatcgggctggttgaaggtgctaaacgtcagaaaaccccgaatgagatcgccttgacgcttcttttggttggtttgacgatcatctttttgtttgcagtagtaactttggaaccgtttgcgatttattccggtacggttatttctgtaacggcactggttgcgctgctggtttgcctgattcctacaacgatcggcggtttgctgtcagcgataggtattgccggaatggatcggcttttgggacgtaatgtcctggcaatgagcggccgtgctgtagaagcagccggtgacgtaaatgtgctgctgcttgataaaacggggacgattaccctgggcaacaggatggcgacggaatttattcctgctactggcattactgcgggagaactggccgatgcggcacagctggcttctttggctgatgaaactccggaagggcgtagtatcgttgttctggctaaagaaaaatatggcctgcgtgagcgtgatcttacacatttacaggcagaattcattccttttaccgcccagaccagaatgagcggtattgatatcgtcgatgccagaatacgtaagggatcgatggaagccatgcagaactatgtcagcgaactgggtggggcttttcctgctgaagtccgcagtgcctgtgaaaatattgcgcatcagggcggtacacctttagtagttgccaaagataaacaggtcctgggtgttatttatctgaaagatatcgtcaaaggcggtattaaagaacgtttcagtgaattgaggaaaatgggcatcaaaacgatcatgatcactggtgataaccagttgacagcggcagcgattgctgccgaagccggtgtggatgattttctggctgaagcaacgccggaagcgaaattgaaaatgatccgttcctatcagcagcagggaatgctggtagcaatgacaggtgatggtactaacgatgcgccggcactggctcaggcagatgtgggcgttgcaatgaacagcggtacacaggcggctaaggaagcgggcaatatggtcgatcttgattccaatccaacgaaattgatcgaagttgttgagatcggtaaacaacttttgatgacacgcggttccctgacaactttcagtattgccaatgatattgccaaatattttgcgattatcccggctttgtttgccgcaacttatgcaccgttggaagtgctcaatatcatgcagctgcattcaccgcagagcgctattttaagcgccgtgattttcaatgcgctgatcatcatcgcgctgataccgctggcgatgaaaggcgtagcctataaaccgctgggagcttctaaaatactgcagagaaatctgctgatctatggtgtcggcggtatcatcgtaccgtttattggcatcaagatcattgatgtgcttttagttgctttaggtttggcttaagaaagaatgaggtggaaatatgggcgcgataataagatcgttagtaatggttgtaaccttgagtatttttaccgggctggtttatccgctggccatgacaggcttggcgcaagtggtatttcccagccgggctaatggtagtataataataaaagacggagttccggtaggatcggctctgatcggtcaggcgttcacagatgcccgctacttcagcagccgcccttctgcaggcggtaatgacgctgccaattcaggcggcactaactatggcggtaccagcgctaaactgcagcagcaggtcggcgagctggcagagtctgtacgtgcggccaatggctggacatctgatcaagaagtgcccagcgtactggtaacaaattccagcagtggtttggatccgcacctgacgccggcagctgcttattgccaggtcgaacgtattgccaaagtacgtggtctggaaatcaggcaggtacgcgatctggtttcagaacatattgaaaatgctgatttgggagttgtcggagaggacagagtcaatgttttaaaattgaatctggcgcttgataatttacaacagaaccaataaaagttagggctgcattcaggcagccctatttgactatcttgcgaaggagaaggttatggaactgacagagaaacctcaaagtggacatgaatatgctgaaacgctgctggctgcggccaataaagaacagcgcggcaagctgactgtttttttaggtgctgctgcaggtgttggtaaaacctgtagcatgctgcaggaagcacatgcccgtctgcgggaggggactgacattgtactcggcctggtgcttacgcacgggcgcaaagagacagcagcgcttttggaaggtttgccgcgtattcccgagcaggaaatagaatatcatggcaagatgctgcaggaaatggatctggatgctattctcagacgccgcccgcagctggtagtcgttgatgaactggcgcacagtaatgtgccgggttcgcgccatcagcggcggtatcaggatgtagaagaacttttggctgccggtatcgacgtttatactgctgtcaatatccagcatatcgaaagcctgaatgacgttgttgcgcaaattaccgggagtattgttcgtgagactgtaccggatgcgttttttgagctggcagatgatatcagattgatcgatattccgcccaaagaattactgcagcgtttgaaggaaggcaaggtttatcgtccgcagcaggcccagcaggcattgcggggatttttcagacagggcaatatcagcgcgctgcgtgagctggctttaagatttacggcccggcatgttgatcaggatatgctggcctatatgcgcctgcataaaatagaaggtccctggccggcttccggcaaggtcatggtttgcgtcagcgccagtcccttttcagcacagctgatcagagcggcgcagcgtttagctcagggactgcacgcagaatttttggctgtgcatatcgaaacaccggaaagacgatttcctcatggtgataaagaacgggaaaggctttggcgtaacctgaatctggctaaagagctgggaggtcagatcctgactactgccggtacggattttgtggaaacggttctgcagattgctgtcagagaaaatgttaccgcgatcgtggtcgggaaatcagggccgcgccgctggtatgagataggccgaaaaaccttggttgacagattgattgacaggagtgggtttatccatgtttatgtcatccagggacgggaagaggaagaaaagtctcctgtcatcactacggcagtaccgcagcagcaggccggctggcgccagtatgtaggggcgcttgcggcagttgtcattactactgggctttgctatgttttccgcggtcagctggagctggtcaatatatccttactgtatttgctgccggtattgttgacagcagcctggtggggcagaagtacggcctatgtaacagcgctcttttgtgttttaggttttgactttttatttttggaaccgatttttacttttactatttatgatatcagatatctgtggagctttctgatctttggactggtagcatttttagtcggtggaaagacagaatcgctgaggcgggaattggaaagtaccagacgccgtgaaagcaatgtcaacagtctataccgtttcagcagccgtattgccgcagtcgatgacgcagtgacgatcatggaagaatttgtcagtcatgtgggacgagagctgcagcggacagtgctgattttattgcctgaaagtaaagtactgcggctgcaggcctgttatgctgtacagcaggaggatgcggccgcggagtttcagctgccgccgtcagaatatgctgtagcagcttgggtgcaggaacacggacaggccgccggacgttctactgatactttacccggggctgaaaatctttttttaccgctgatgaatggagaaaaagttatcggtgttgttggcatcgctatcgatacacggaagttatcgccggaggaaagggctgtactgggtgcgtgggtaagcctgctggcgattgcgttggtgcgggccgggctgagcagcgaagcaaaacaggccgccatgctgcgtgaggcagataaattacgtacagcgctttttaattctgtttcccacgaactgcgaacgcctttagcggctatcatggcttcggtatataccttaaatgataaagctgttgcttatggtgagaaacagcggcagcagcttctggaaaccattgccgatgcctctaaaaggatggaacggatcatcggcaaccttttagataccgcccgtctggaaagcgggatgctgcagctgaagctggactggtgcgatctggaggatgttgtcagcggtgcgctgcggcgcagcaaggaacatacgcagagctataagatcaaagtagagatagcagacgatctgccgctgatttatgccgatgcggccttacttgagcacgtagtgttgaatttactggataatgcggtaaaatattcagtagaaggcagtgagatcgaaatacagacctgtcttgacgatagcgaagtgatcgttatggtcaaagatcgggggctgggggtgacggccaaagatttaccgcatttgttcgataaattttacagggccagacaaacggagaaaatcagcggcaccggtttggggctggcgatctgcaaaggcattgtcgatgcccaccgcggcaggatctgggctaaacagcgcactggtggcggcagtatttttgcttttgccttgcctgtaacactgccggaagaaaaggctggtgaaaaaaatgactgaaaatacattgcgcgttttaattattgatgatgaacccgcaatcagaaagcttttaaaaatatcaatgcaggcctacggctatgagctgggtgaagctgctacagggcaggacgggctgttaatggcggcctccttcaggccggatattattttggttgacctggggctgcctgatatggacggtaaagcagttgtgaaagctctgagggaatggtcggaaacgccgatcattgtcctgacggcgcgtgagcaggaacaggaaaaaattgccgccttagatgtcggagctgacgactatgtgaccaaaccctttggtatgggtgagctgatggccagaatgagagtctgtctgcgccgggccggcaataaagaaggagaaccgatactgacctgcggcggtttgcagctcaatcttctggagcacagggtagtagtggaaggtcgtgaagtaaagctgacgccgacagagtatgagctgcttaaggtgatgcttaaatatgccggacgcgtgctgacgcataaacagctgctgaaagctgtctggggtaatgaatatgatacggatacccattatatcaggatctatatgcggcagctgcggcgcaaaatagaacctgatccggcgcagcctaaatatctgatcaccgaagcggggattggttacaggttgctgggcggcgaataaatttcagatagaaaaaaggactatttcgttaagaaatagtccttttgttttaattattctattcttgttcaaaataattgttcgataaagcccggcggcagtactccaaaaagatctgccagcatgtacatggagaaaaacagcgtaactgtaaatgctacggtataggcaatttctttttttgcagcgttggcataaacaccgcggatagaacagaaaaagatcaaagtccaaatgattttagccgtcataatttagctcctttagttttcaaaagttcccttgacaacggcctgcccctcatctaccatcaggcgccccctggcaaaaactttgtttaaggtcaggtcgtcgttccaaacgatcaggtccgcgtctttacctacggcaatacggcctttgtcttcaagcttcagggcatcggcaacattgcaggttatcagctgtaatgctttgtcaaagggcaatacgccggctttgacgatactcagcatttcttcgtatagataacgtggcgcagcggcagtcagcccgatcagttcattgttttcgttaaatttaggcatgctgccgttaccatcactgctcaaggtcagacgttccaaaggtacgcctgcgtctaaagcttgtttaacagcctgaggcacagggatagcactgcctgtcatgccgcaggtcagatcaataataccgccctgcagtgcgaattggatagtctgtttgtaaagcatgggatttcggttgacatgggtaggacggaacacactgatcggcagctctgtagtttcaaggatctcaagaaccggttctagaccgcgtttaccgtcgcccatatggatgtgcagcacgccggctttgccgctcagcataccgccgatacgggcttctgctgccaggctggcataagcctgtgtgctgggcatagacgaacggtgatcgctcattgcgaccttgccgcccaatattttgtcgatcaaaacgatgtcactgcgcagagtgccggtgatatgcccgctgtcagcaggataggctccggaatagatccaggtggaaataccctcttcttccaggccacgggctttcgccagcagattttccatactgcgggtcacgccgtcagtgccaagcagcccgattactgtcgtagtacctgccgttgtcagctgtgacagctggatttcaggtacgcgggtagcaaagctgccttcgccgccgccgcccgtaatatgaatatgctggtcaataaaaccggtagtgactttagccccgctgacgtcaataacggtgcagtcaaaaggcagctcgccgattgacggagccatatgaacgattttacgtccggccagcaggagatcctggcagcctgtatcggcaggagcgtaaatatgagcattttttatgagtgtaaacatagctacctccatcaatatataaattaactattatcaattcgctttagctgcttataattcctgctgccaaccaagattttctgcagtgaaagtaaaaaaaaactgtcgtttttgacatcggggataagcagactctggctggatgatgtaaataatgctgcacttaccccttgcgaatacatatttcttatttgaacatattataaatatgtgatttataattaatagcagactaataaaatatattattttaaaaaataatatttactttctgaagaatatatggttaaattcaaatgagaatagaatttaggagcgtccgaaagtgaaaagacaaacaggctttactttagttgaattggtgattgttatcgcagtgctgggaattttagcaggtctggcgattccatattttatggaagcccgcgaggaagcggcgaaaaaggaatgtctggctaaccggacgcagatcatgcggatgttctacgctcagcaggcgtcgaactacaacgggacactggtgggatttctggcagaagttgtaaaagaacctaacgataataaatattttaattttgtccctaaatgtgccgataatggcacttacagcgtcagtaatgaaaaagtagtctgttctattgctgagcataatgaagctaatgtcagcgatgatgccagtgttatagataatattacgaatgactttcaagaatttcttgataagtacggcgctatgacagatcagcaactgaaggatctgggctggtggccaacttatgcctctggtgtattagtaaagaccaatgatggttttagagaagcttattataaagaaaaaggaaaatggcccagcggagtagatttaaatggcaatacgatttattttaaattccatttaactgcagatggcagttttctgacctatgcaaatggtaatggcgattttaaaaatagtggagattggggcactaattatatatacgattctgcagctaaaaaatggtattatagtccccaagggacgaatttaggtggtatttccaacagtgttgacaaaggtgggaaaacggaagcgcagataattgataaaataaaaaacgaaggctgggaagaagtcaccctgacagg

SEQ ID NO: 9987 - DNA, 97010 bp, Unknown
  gut microbiota DNA sequence
ttttttcatcttttttaacggctacttacaaaaattcacccgtgtttaggggtgcactattattttattaaatttctacagaaaaagcaagccctattttaaatttatttttgacgcctgtaaaatcactttacaaaatcacgctttaaattatccactaaagtctgcacattcctgctcatcgtttcagaagccaaggtcagacacacgaatttacgtcctgcttcctcctgcgtttcaatcagctctacttcgccggcagctgccgcctgttttgcaatatgttcagaaagcagcgcatatcctaaatcatttcttaccgcttcctttacggcaaaattagtattgaaaatgatcgtcttggccggcaatacactatttttctctaaaaactcttcccactgcacccttgtgcccgatccctgttcgcgcgttatccacgttactgtttccagatcccgtcgttgcatctttttggggcttcctatcggccctatcaaaacaagccgatcaatatagaactcttctttatggaatttcttatcaccggtttctccttcaactaaacctacatctatcttattgctttgcagcagttcgcaaatatgaacagtattatcgatcttcacttctatgtccaactgcggataacgtttcataaatctgcccagaaattccggcagaaaatattcgcctatcgtcagactggctcctatagccaagcgtccttttatctcgctgcccagctctttaaccgtaatttctgtaaactgccacagacttttcatctgcttagccgcatcataaacaatcatgcccgcataagtcacgctaagctgtttttgttttttagacctgcgaatcaacacggcgttgaaacactcttctaatctgcggatatgcaaactgaccgtaggctgcgaaatatttaatttctgcgccgctttagtaaagctttgctgttctacaacttcaataaaagttttcagttcttcccacatagtaacctcattatttttcttaatgataattataaaaacaattcattttactaatcattatacttgtattatgatatttatacaatgtttttaggcatcaagtatttatctttttcttttctaaaagggaggctttctaaaaatgataaaatccattccaattcctacggccggagtatctcttggtttagcggcacttggtaatctgctgcagccttattctccgctgatgaaatatacctgcggtattctcgctgcaatccttttggcaatgctgcttataaaaatactgcgttaccccaaacttgtccacgccgatatgaccggcaatcctattttaggcagtgttgctgccactttttttatgactacgatgcagctatgtgtctatattaaagatttcgcgccttttctctgcgaagcaatctggctggcggcagttgctgcccacgccattttaatcatctggttctccaaaaattttatgcttaatctggaactgaaaaacgtttttccaaccttcttcattgcgtatgtcggtatagtcgtcgcttcagttaccgcccccgctttcggatatctcacattaggatattatatcttctggtttggcttcgtcgcctatatgcttttgctggcactggtcacctaccgctatctccatcacccgatacctgaagctgccaagccactgatctgtatctacacggcacctatgagcctgagtctggcaggatactttgcagtagttcccgataaaaacttcctgctgattactgtcatgcagatagctgctcaagggctgttcttctttatcctcagcctgatgccccgtcttttacgtctgccgttctatcccagttatgcagccttcaccttcccattcgtcatcactgcctctgccctgcgtttatcactggattactacgcacggctcggtgttgttctgcatgaattcttccaatatctgtattattttgaatgtatagtcgcatccttctttgttttttatgtcacactgcatttctgctggtttttctataaggaatggaggctttccggcagcaaggtataataacagcagcattttaattccatcagggcaatttatctctttcctttgtgtacggtaaattttagaacttttgacctcattacgttttctgattataacaatcaagattattcattttacttacaatatctagttgttttaaaattacagtacactacattctcgggaaggagttttacaatgaattttttaagtaataaattacatggtttggcattatgttttgctattgcagtaccagctgcatatttaggtaaattgttccctattataggcgccccagttttcgccattatcctgggtctgctgatggccggtatcccccgctcagatattttccagggcggcatcaccttcacttccaaaaagatcctgcaatacgcgattattttactcggcttcggcatgaatctttttgaaattttccgggtagggtcacaatctctgctgataattatctcaacgatcggcactgccttggtcgtgtcttatgcagtcagcagaataatgaaaatcgatcacgatatcgcaactttggtaggcgtaggttcttctatctgcggcggctcggcaattgctgcagcggcacctgttatcaaagcgtcagacgaagacattgcccagtcgatttccgttatcttcctttttaacgttattgccgccttcctcttccccaccttgggtgctatactcggctttaacgatatgggctttggcatgtgggccggcacggcaatcaacgatacctcatctgtagttgctgcaggacaaacctgggccagcgccagcggcagcgataccgcgctgaattatgcaactatcgtcaaactgacccgtaccttagccatcattcctatttgtctgggactggcctatcttacctccaaacgtaaagctacaacatcggaagtaaaaatctcctctatcttcccgatgttcatcatctactttttaggtgcgtcaatcatcaacacctttgctggttcccactttgactttttccagtttttgccggccatcggtaaatttatgattgccatggcaatggcagctataggtctcaacactaatttagtcaaactgatcaaaaccggcggcaaaccgatcctgctcggtcttatctgctggttctgcatagcggttgtcagcctggcaatgcagcatctgcttaatatctggtaacatcaaacagcttctgctgcaagcggcggaagctgttttcatttttattacatttaatataaaagttttttatcacaaattcgtataaaaatatgatataatagccgttagataaaaatagctttgttagtataaagctggtttaaaggaaaatgattaagagaaccgaggtttatgtatgggaaaaataattaaatttataatcatcgccttcgttgcgcttgctattttaggcgccgcagcattctggggacttgcaggtttcttcgcacccaaagatatggaagaatcgcttattcccgatgccgcttcgcagttttttgatattaacggccgcgtcatctcgaccacggcttcggaagaacgccgtctgccagttgctttcgataaaataccgaagcacctgcagcaggcttttatcgctatcgaagataacagattctatgaacacggcggtatcgacttccgtggtacggcccgtgctttatggacaaacctgcgaggcggcgaggtgcagggcggcagtactattacccagcagctggccaaaaacgcttttctctcccaggagcgtaccattacccgcaagataaaagaagcttttattgctaaacaattggaagaacgctataccaaagatgagattcttgatatgtacctgaaccgtatctattttggacaaggaacctacggtatcgaaagtgcttctctctattacttcggcaagcatgttcaggacattgatctggcagaagccgctactctggcagctattcctaaaagccctaactattataatccttttgaaaatcccaaagacagtaaagcacgtcaggaagtcgttttagaccaaatggccaaatacggttacattacggaagcacaggcagccaaagccaaagcagagaaactgcagctgaacaatcacaaaaaccagcagaaagataacctttcctactttattgattactgcagtcagcacattatagaagaattcggcgccgatgcgctttataaaggcggactgaaaatctacactactctggatctggatatgcaggcagccgctgccgaatctttaaaatatctgcctgattactacaaagacgactatcagcttacacagccgcaagtcgccttagtagctgtagaccctaataacggttatatcaaagccatgatcggcggacgcggccaggataaattcaaccgtgctgtgcttgcagtgcgccaaccaggttccgctttcaaaccctttgtttaccttaccgctatggacaacggtcttaccgctgccacggtagttgaagacaaggaatatgaatttgcgcccggctggaaaccgaaaaactctgacctgcaatggcatggtaaagtaagcctgagaacagctttgaaaaaatcctacaacatccctaccattctagtagctcagcaggtcggtcccgaaaaggttttccaaatggcaaaaaaccttggtatcactacacttattgaagacggacattatactgacatcaatctttccatggctttaggcggcctgagcaaaggcactacgccgctggaaatggcagctgcctatggcacgatcggtaacagcggcaaatacaacgctccaactgctattatcaaaatagttgaccgtaacggtaaagttatttttgaacataagcaggaaaccaaaactgtagttgatgctaaagccgcttatcaaactgtcgatatcatgcgcgacgtctttgttgacggtactgcaggcggtgcaggcataggccgcccggcagccggtaaaaccggtactaccgacgattataaggatgcctggtttgtaggcttcacccccaatctgtcggctgccgtatggatcggcgatgataacggccgtccgcttgattatatgtatggcagcggcgcaccgctcagcatctggcatgaattcatggttaacgctcttgcaaacgttcccgttgctaactttgtccgcccggcaggcgtagtaataccgcctgaaccagatatcaagaatgatgataaggacaaagataaagacaaggataaagataaggacaaagacaaagataaaaaaggcgccacctccgttcccggagaaccgcctaaaccccccagcaaaaaagaccgtatccgtgaaaacgtaggcgacgttgaaccgcagaagcctagcatgaaaaaacgtgttcaggaaatcttagacggcagcgaaaataataccggcaaccaaaaacctgttgtcagcaacgtccccactccacgtcagccatgatatcggccaatacaaaacccccgtactaaaaagtacgggggttttattattatcagcagctcacattaatctttttcattcttttttttaagcagtctgctttcttcaccaatatctttcggataataatatttatgacctaccagttcatccggcagatactgctgctcaacccagccacctgggtaatcgtgcggatacttatatccaagcccgtggccaaactgcttagcaccaggataatgcgcatcacgcaagtgcttcggaactctggtattgattgacctgacttcctgacgagcattgaaaatacccatataacagctgttgcttttaggagcgttagctatatagcaaacggcctgagctaaaggtatctgagcttcaggcagcccgacaaaatgcgccgcctgcgccgcagcatttgctactaccaaggcctgcggatcagcgttgcctacatcttcagccgcacagataacgatccggcgcgcaataaaccttacgtcctctccaccttccagcatacgggccaaatagtgcagagcagcgtcggcatcactgccgcgcatacttttaataaaagccgaaacgatatcgtaatgataatcaccttttttatcatagcgctgcaaagcattacctgccacgctgcgcaatacatccatcgtaatttccttactgccgtccggcagcataaattcagcctgttccagcaaattaagagccacccgcgcatcaccaccggcaaaatccgccaaagcttccaaagcctcggcagttacagtaataccctctgatccataacccttttccttatctgtcagcgcacgctctaaaatctttttgataccgtctgccgttaaatgttccagccgaataaccttcatccttgacaaaagcggtgaattgatttcgaaaaaaggattttcagtagtcgcaccgatcaaaatgatagtaccgttttccacataaggcagcaatacgtcctgctgagctttattaaagcgatggatctcgtcgatgaacacgatagtgcgccccatcccgccgcgctgcagctcctgcgccttagcaatcagctttcgcagctcaggtacaccggatgaaacggcattgatagcaacaaattcatcccctgtcatatgggcaatgacctgtgccaaagttgttttaccagtacccggcggtccgtaaaacaacaccgactgcaactgatccttttcgatcattcggcgcagaggactgcgctcgcctactgcagtttcctgcccgacaaaatcgctgagccttgtaggcctcatccgatcagccaaaggttttttctgcggctgtgcaaacaaactatccatcatccacctccaggatctgataaaaataccggctctaaaggccggttagctattttctgcaataatctgacgtacgatatacgatgccatcagcaatcctgccgacgccggaacaaataccatgcttcccggaacctcgcctgcttcagcacgctgtaccggttctttggaataaactacagttacaccttttttgacacctgccgcacgcagctgtttccttaccgaccttgccagcgggcagacagaagtaccgctgatgtcctccactgtaagatacgtcggatccagcttattgcctgtacccatcgaagaaatgacaggaatatcgcgctgcacacattctaataaaagatcgacctttgacggcgtcgaatcgatcgcatcggcgataaaagtaaagctgccggaaaaaaactcggcaaaagcgccaggttcataaaatttactgaccgtttctatttcacaatccggattgatatccagcaatctttgtctgacaacctcggttttgaacctgccgaaggtactggtaagcgccggtaactgacggttgatattacttgccgccactttatcggcatctattaataataaatgacctaccccgctgcggcataatgactcggcaacatatgaacccacgccgcctaacccaacgactgcaatacgggcctgccctaaaacaggcagcttgtctttaccgataaccatcgcaacacgtgacagatccatttttacccccaaaaatattttgccccacaatgccgtccagcctcatgttttgaacctgcaagtgcaggtgggtgccttcccgccagtcgcaaaagtcccctcaagggggcagttttttaaaaggcggagctcagtcaggctccctaggtaagagtgttggctcaaaactaagaggtacacgtaacgaacatcgcagggtaaaaagcgtttttaatgcagtaagagcatttcttactacatctatactataccaaaatttgtttaaaatcacaaggtataaagcggttttctctgtttttaaagagatattttttctttttttcacaaccggttcgtctttaagtaaaacacttttaccagaatcagtttactataaaaaaaggactgccgcagcagtccttttttacagagtctgactcttattatttgtcttttttgactaatgttgcacggatatgcaattcacgcagctgtttctcgtcaacatcgttcggagcctgagtcatcagacagcttgcactctgtgttttcgggaaagcaataacgtcacggatagaatcacgtttagccataatcatgatcaaacggtcaagaccaaaggccaaaccgccgtgcggaggcgcaccatattcaaaagcatccatcataaagccgaatttctcttttgcctgctcttcggtaagaccgatagccttgaaaacttcgttttggacatcacgacgatggatacggatggaaccgccgccgatttctgtaccattaagtaccatatcgtaagctttggcatatactttaccaggatcggtagccagcatagcaagatcttcgttacgtggagccgtaaacggatgatgcattgccacatagcgtttttcttcatcgttatattcaaacatcgggaaatctacgacccaggcaaatgccagcatatcttcgtcgatcagctcgcggcgtttagccatttccagacgcagagcacctaaagcctgagcaactacagccggtttatcagcaacgaacaaaatcagatcgcccggttcagccgctgcagttttcaggatatttgccaaatgtgcttcactgaagaatttagcgattggcgatttgacactgccatcttcctgaatctgcatccaagccagacctttggcaccataaataccaacgaattcaaccagaccgtccagctcacgacgcgggatagcggcatagcctttaacgttgatcgctttaacgacaccgccgtcttctacgatagcattgaacactttaaagtcagaatctttaactgcttcagacatattgacaagttccataccaaaacgcaggtccggcttatcgctgccaaaacggtccatagcttcgtcccaggtcaaacgctgcatcggcagctggatctttttacccatagcgccttcaaatacatacgccatcagcccttccatcatttccataatatcctcagcgtctacgaaagacatttcaatatccaactgagtaaattccggctgacggtcagcacgcagatcttcatctcggaagcagcgtgcgatctggaaataacgctccataccggcaaccatcaagatctgtttaaaaatctgcggtgattgcggtaaagcatagaatttaccagggttgacgcggctcggcaccagatagtcacgcgcgccttcaggagtacttttagtcagcatcggcgtttcgatttcacagaaaccgtttttatccatataatcacgcatcaatttagtaactttatgacgcaaaatcaaattcttctgcatttccggacggcgcaaatccaaataacggtatttcaagcgcaggttctcatccgtatcgatatcgtcctgaatataaaacggcggagttttggcagcattgagtacttccaaatcagcagcaaccacttcgatctcgccggtagcaagattcggattaacggtagctgcatcgcgaagacgcactttacctgctactttgataacgtattcgctgcgaatagcttcagcagtcgtaaagctattgcctgcatcgtcagggtcaacgacaatttgaacgataccgctgcgatcgcgcagatcgacgaaaatcaacccgccgtgatcgcggcgtttggcaacccaaccgcataaaactacttgttcgcctgctgcctctttagtcagcaaaccgcagctatgactgcgttttaaagaatcactcatgactttgcacctctgtttttaaaattgatgtaatatcttggatagggatctcagtctgctcgctggtcgacatatttcttaatacggcacaaccgcgcgctacctcgtcttcacctaaaatcaacacatatttggcagccaatctgttagcctgcttcatctgggctttcatactgcggcccaaaaagtcaaattccaccttcagcccttcacggcgcaaagcgatcgcttccttaaaagccagcgtaaagtttgcactgcccgggcaaactacaaagacatctatactgttatcgaactgcggcagcagattctggctttcgattgccagcagcacacgctccatacccatcgcaaatccaatccccggtgttgccggaccgccgatctcctcgatcagaccgtcataacggccaccgccgcagacagcgctttgcgctcccaggggagcatattggatctcaaaggcagtcttagtatagtaatcaaggccgcgcaccagattatggtcgactacataatcgactccggcagcggtcagaagatctttcaagccttcaaaatgtgctttgcattcctcgcacagacattcctccaggcttggcgcaccagcagccagctcctgatcgtgcggatttttgcagtccagtaaacgtaatggattgcggtcgaaacgtgactgacaatccttgcacatctcgccaagatgcggccggaaatattcctgcagcttctctctgtgcagtggtctgcatttcgggcagccgacagaatttactttcagcttcaaatcttttaaacccaaagtctgcaaaatctgtaccgccagtaaaatgatctcggcatcgatattaggcccctctacgcccagcgcttccacgccaaactgatggaactgccggtaacgcccggcctgcggcctgtcgtacctgaacatcggcccgatataaaacagctttgtcggcgccggatcggcatacattttattttctacatacgaccggacggcagaagccgtattttcggggcgcagcgtcagactgcgttcacctcggtcagtaaaagtgtacatttctttttcaacaacgtctgtcgtttcaccgataccgcgcaaaaacagctcggtatgctcaaaaacaggcgtcctgatttccagataaccatattgggcacaaatctcacgcatagtgcgttccagataacgccatgcttccacatcgcgcggcaggatatctttcgtgcctctcggtgctgtggtcaacacatctattcctcctcatccgcaaaaagcaggctgcgtttatgcgccagctgcggcagattacccgtatatgtcccgatatctttgggcatattgagctttttaagatgatgcccgtctgcctgcggcactttagtcgcagacgccggcccgattccaagcacaacgtgacgctcttccatcatctgaatattataaaggctggcactgcctgaagcagcatagcctatattagcaagattacccagcatgtaatgctggcggtataaataataaggcagcatccccattgctgcagcagtttcgccgccgtaagctacaagcgcctctgcatcctcagccgtcagactgctgaactgcgcaccaaatatcggggcgctttttttgagcgttaaggtatgcactgtcagattatcaggagccaaagccctgatgccgtcaagcgaagcccgcacatcatcagccgtttccccaggcaacccgatgatcagatcggtattgacagttttgatgccgctgtgccgtaccaggtcataggaccgataaaaatcctgcaccgtatgactgcggccaattgcttttaaagttttgtcgtgcaaagtctgcggattgacgctgatcctgttcactccgcaggcttccataactttcagcttttcggcactgaaacaatcaggccgtcctgcttccactgtaaactcgcgcaccccaggcaaaagcaaatgccgcgccgtcagcgcgatgagccgtgcaaacgccgtttcactaaggctggtcggcgtgccgccgccaatgtaaacagcagtaacatttaggctatacatacttaataattgtaccacagtaagcatatcttgttcaatgaaatttaaaaacttttgctgtaattcttcctcaagcggcacaattcccgatggaaaagaacaataagaacagcgcgtagggcaaaaaggaataccgatataaatgccgacctgcttttccgcagccggtaaaagctgtctttgccgcaggcaaatctctgtcagcagctgcgcctgtccgtgaggcagcaggtaatgacgctccagatactgcggaagctcgtcacagcttaacccgctgtctaaaagcttatgggcaagttttcccggacgtacgcctgtcaaaattccccacggcatcaccagactgcacctcacagcctgtctcagcacatcaagcaccgccagcttagcgcagcgcacccattcgccccgtacatcctgtaaaattgtaaatggcctgcttactcttctggtgccgtcttccgtctgcaaaatcgccacgcagccatcagcttcctgcacgattttaagcacatcagtactgtcagactgcggtaaaatgtcaaagaacgcggccatctcagcgacaggccgcgttaaatcataaggtaaattctgctctaatctataatcactaatcatcatcgtttttactgctcagtttctgttggccgaggttcgtcagaactatgccataattctttatacaagacccggtatacagcagccaccggcacggcaaagagcatacccaaaataccatacagcttggcaccgatcagcaggctcaaaatcaaaactacgggatgcaggtcgattttactgcccatgatccggggcatcaggatattgccgtcgatctgataaaagaccagataaaacagcgctaccgaaaaagccgaagaagtattttgcgaatacgcgataaataccgccggcacagcacccatcaagggaccaaccaccggcacagtctcggccatgaccgccaggaaaccaaaaaccagcggaaactggatccccagtatcgccacgcccacagtaatacacgcacccgcgatcaggctcagtttaccaagcccttggatatatgcgctcagcgttctgccgatctcatccaaaatatgcgccaccttcggctgcgtatcataagtaaacaaattgatcatcatcagacgcagctcacgccagtccttcagaaagtaaaaagctaaaaacggaacgacgatcaaaccaaccagattggcaataatgtccatcgtcgatttaaacaaattccggagaatacctcccataaaacccataacccaggtcatcgcatcgtcgatcaaagtttcaaaattgtatggcagccgtggatactgtgacggatccttcagtaaccagtccatattagtagactcgacttttgtcgtataatcaggcagcttcgccaccagatcattgatctgcccgaacaaaggcagcaaaataaaagtaacggcaaaaaacataaacatgccaaaagccataaaggccaggatgattgccaccacacgcgacaaatggatagtaccctgtcccacggtgatcttggaaaacatattcgacaccgggtacagggcaaacgccagacctatcgctaaaagaatagggaacagaaacgtagcgagctcgtataaaataaaggatacgcccgccgctactgccaatttaaaagttgtactgtttctcagcagcttgatacttttgatcatttttttgcttacttattgcagaaacggatttctgcgcctctcccatcccactgtagttgcaggtccatgtcccggcaaaagctttgtttcgtcaggcaaaaccaggattttatctttgatagaattcaaaatctgtttgtaagagccacccggcagatcagtacggccgatagactcggcaaacaccgtatcgccgcagaacaccacatcaccgcagacaaggcaaacgccgccgcgggtatgaccgggagttgccagcactttaaaatcaagtccggcttcggtaacagtttccccatccttaaaaattttatcagcaggcgcaaaagctgcgtccatacccatatatgccgaaagattgctggtcgccttcgtcagcatctccgcatcttcctcactgatataaactctggctccggtagccttacgcacctcgtccagacccatgatatggtcgctgtgaccatgtgtgacaaaaatcgcatcaatagtgataccttcttttttgatcgcggcaacgatcctgtcgccgtctccgcccggatcaacaacaacaccgtgaccggtagcttcgttgaccgctatatagcagttagtaccaagcataccaacttccatttttaaaaccttcatgtcgaacctcctaaaaattctttttactgtctaataaaatcgttactgggccattatttacaaggctcacaagcatatgcgcctgaaacttcccggtgccgacgctaagccccttcgcccgtgcaccggccacaaatttttcataataagcattggccatttcagcacccgccgccttatcaaatgacggccgtttacccttgcggcaatcgccgtacaaagtaaactgtgaaactaccagaagcccgccgcccacatctgctaccgacaggttcattttttcctgttcgtcctcaaaaatgcgcagaccagctaccttatcaagcaaatactccaaatccctgtctgtatcttccttctcgacccccagcagtactaaaaggcccttgccaacactgcctaccatggcgccttctgcctcgacagcagcgctgtctacacgctgtacaactgctctcacgtcagcctccctgtccgttggaaatcattctttccacactgtaaacgcctttcatgcgttttattttattcataatattatccagctgttccagattactgatatcaatacccatactgatattcgccatcttatgcttatcgatacggcaattcagcgcattgatattcagcttcgattcgctcatcaccatcataatatcagccatcataccgggcctgtcgccggcagagataatgatattgaccttatacagagaatctgtcgcaatgtcccaggctacctctatcaaacggttctgctcctcaggattattgctcattacattggggcagtccctgcgatgcaccgaaataccgctgccgcgggtgatatacccgataaccggatcgcccgggatcggattacagcagcgcgccagtttgaccataatgccctcttcgcccttgactaaaatgccatgactggacttagccttagaacggcgcggcttcaactcggccagcagctgcgacaggtctttcgttgtcgtcagcttctgctctttcttatacagctctacaagcttagacatcacactgttgagcgtgatcccgccataaccgatagtcgccatcaaattttcttcgttctctaaacgcagctgggcgctgacgtccttcagtttatcacttttcagcaaaatcttggtgtcataacccagacgtttgcattccttttccagcatttcgcggcctttgatgatattctcctcacgccgctccttcttgaaccaggatttgatcttgttacggctgtcagaagaaccgacgatattcagccagtcacggctggggcctgctgcctgcttcgaagtaatgacctcgacgatatcgccgttgctgagcttataatcaagcggtacgatacgtccgtttaccttagcgccgacacagcggttgccgacatccgtatggatacggtacgcaaaatcgatcggcacagcgcctaccggcaaatcaataacgtcgccgcgcggcgtaaatacaaacacctcatcggcaaaaacatccatctttaccgtattcacgaaatcacgtgaatcgctcatatcctgatgccattccagcagctgacgcagccatgacagcttggcatcaaaagttttatcaccgccggcagacggagcaggcttgctgccgccgctttccttataacgccaatgggccgcgataccatattcagaaatgcggtgcatctcaaaagtcctgatctggatctccagcggctgcccgttgccatacagcaccgtagtatgcagcgactggtacatattcgacttcggtacagcaacataatccttaaagcgcccaggtataggacgccacatgctgtgcacaacgcccagagtgccgtagcagtccttaacgctgtctaccagcacacggatcgccagcagatcataaatctcactcagttccttatggtcgcgcagcatctttttatggatactgtaaaaattcttgggccgcccctggatctcgcacgtaatattcatcgaatcaagatgctctttgatctcacccatagcagaatggaccattgcctcacgctcgcggcgtttgaccttgacctgctcgaccagatcataatagatctccggctccatataacggaacgccagatcctccagctcccacttaatggtataaatacccaaacggtgagccaaaggcgcatatatctccatcgtttcgcgcgaaatagactgctgcttatgcaccggcataaatttcatcgtccgcatattatgcagcctgtcggccagttttatcataactacgcggatatccttggccatcgccagaaacatcttacggtagttttcgatctgctgctcttccttggaaatatactcgatcttgcctaacttcgtaacgccgtccaccagatcggctaccttctgcccgaagctctctttcagggaatccaggctgatctcagtatcttccaccacatcatgcaaaaaagctgccgccaaggtcagttcgtccagctggagctgcgataagatcgtagctaccccaagcggatgaatgatataaggctcgcccgacttgcggcgctggctggcatgagcctcagcagccacgtcataagccttacgtacaaactccacctgttccttattcaaatagctttcgatcgtcgcaaaaaaatcctccacacaaacaacatttcctgtttcaggcatcttagcacttccttatttattgaatctgtttccctgccacagcccaatgatctcctccggactgatctgtatatttctctgacagcttgcaaaagccgcccgtccctcttcctgcaatcccctgaacgtcggcgaattctgcaaatcatttttctgcaaactaccaaaactgatcttaccatgctcatcacggataaaatccagctcctcaaacaccttcaaggcctcctccgaaatatcggtggccgaccggagcaaatcagccctgtcgataacggcctgctggcgcagcgtataggccagttccttataagcgtgtaccagccggcttcgtcccggataaagcttttccagctctgcgcactgtttatcagcctcagccctggtatataaaagcagcagccgtttaccgcttctatcaggcacaggcaaagcaccgtttataaatatctcccgctgcgggaaatcataaaaaataatattctctgccgtcgcctcggcctgctcaccataagcaagcacctgcacgtccggcatcatacttacagatcccggcgcaaagtcggtgttatttacatatattactgtttttttgcttgtttgtaaaatatttttcagtacggtttccttgctgacattgcagttacgataatcatagacctgcagcgcctggtcaaaatcaaccacctgcagattcacgctttccttatccttccagacgttcagcttcggcataaacgccagatcgacaaccgcgttattatacaggcaggccaaatcagccgcaccgttccacataatactgtgataattgtacttgccgtaatcggtataaaaacgcagatggttattatcacgtccgaaagccttgggataatgcaccaccgcatccttaaaggcaaacaacggcggctggttatcacagcccagcggttccagcatcgccagttccctgaccagctgcagcgaaacctcctcgtttttatccagcagacactctatcttcaggcgcggctgataatcagcaggttccaaccgccccctgaccacacccagaaaacgctttttaaaagactctaccctggccgcgcgcagcgtcagaccagccgcctgatgatgaccgccaaactgcagcagcaattcgctgcactcgttcaaagcactgtacagatccagggccgggatactgcggcagctgcctttagcagcctcgccgtcaatactgatcaaaatcgtcggcaaatgatatttatccaccagccttgaagccacgataccgatcacgccggcatgccagccctctttagccagcacgatcgccgtttcgatccgctcctgctgtgccagcatcgcttcagcctcaataaatatcttgcggctgatctcctgacgcaaagcattttcagcattcagctgttcggcaaccatatctgctttagcatcatcgtcagtaaccaaaagctctactgccgactgagcgtgctccaaacggcctacagcgttcagccgcggcgccagaataaagccgatgttctcagccgaaatattctgctgcggacagccactatgttcaataagcttctgtaagcctacgatcccggtattttccatcgccgccagccccagcttcaccagcgcgcggttttcgccgcgcagcggcacgatatcggctaccgtgcccaaagccacaagctcggtcagctccgaccataagggctccgtcaaatgctgcatctgatgcagcgcctgacacagcttaaaagccacgcccacgccggaaagatacttaaacggatatctgcagtcgcgctgatgcggattaacgatcgcgtaagccgccggcaaaacatccggcggcgtgtgatgatcggtaatgatgatctccagccctgccggggcagcagccacctcgtctacgccgctgataccgcagtcaactgtcaccaaaagcgtcgtacctgcttcggccaaagacgccagcgcttcgttgttcagtccgtagccttcattttttcttttggggatatacgtgttgaccttggcgccaagcccctgcaaatacaaatacagcaatgaactggcgctgataccgtcaacgtcataatcgccataaacagtgatctgttcaccgttttttacagcctctaaaatacgctcggcggccttctgcatatccttcatcagcaaaggctcatgaaacggctgttcgctgccgaacaaaaattctctgatctcttctttttccctgacgccccggttcagcaacacgctgaccaccacaggcgaaacccccagatcggcagctatgcctgcagcatattctctgtcacacttctgcaactgccaaatctttcgtttcctcattcgtctgccgccgttactgccggttcagccttagcagcagcttctttatgtaatttctgcgtatgcatcagcatcgcaacctcctcacgcagcttggcattgtccttttgcagggccgccatctcttcgcgggtctttttatcttgcagataatgcttcgccttcatcatcagggtaaaaaacaaggttgccaaagcacccagcagggccgaacccagaataacgatcactaaattcgtctgcatcgtccatacagcaaaattaagcgacacgctaacagcattctgcactgcaaacacagccacaataacactgataaataaagtaaaaaacaaatatggcattttcttcagctcctaacctctacaaatttttataacagtaattattcgagaatttacctcaaaatccctgctttttccttcaatattaaataaaaaaagtaataatcatacattttatatcaaactttactaaataaaaaacgcctactgccgaagcagtaagcgcttaattctgttatcaaagctgtgtacatcacagtttcagtgccgtctccaccgcttttttcatatcggcagattcgatcacttcctgatgcaggatcggcattttctccatcgccagcattggctccggtataggcaagccgctcaaagcatgcagcttacgcaaaccgtcaaacggctccagtttagcgtcctcctcactgccggcagcttccagcaccacatcactgaatttatacggactggccgtagaaagcacgatacaatatgtatcatcgctggataccaggcgatacttttcgcaggcccgccaggctaccgcagtatgcgggtccatcaaatattcattatcattgaaaacgcgcccgatggtttccttcgtttccagctcatcgacccaggctccaaagaattcttccagaatcctgttgttgaccttttctccgacattataagttccattggccgtcagctgctgcatccattccgacacctttgcggcatcgtcttcagtaatgctgtacaacaaacgctccaaattgcttgaaaccagaatatccatcgacggcgaaacagttttataaaactcgcggcgtctgtcataaataccggtattgataaaatcgctcagaacattattgctgttggaagcgcagataaactttgccaccggcagtcccataagcttggcataatagccggccaggatatcaccaaaattgccggtcggcacagcaaaattgatcttttcacccgctttgatgcggccattggccacagcatcgctgtaagcgctgaaataatacacgatctgcggtaccagacgcccccagttgatcgaattggccgagctgaacacatagccctttctctgcagctcctcttccagcgcagtatcgccgaaaagctctttgacgccgcgctgagcatcgtcaaaattgccctggatgccgataacgcgtacgttatcaccggcctgcgtcagcatctggcgtttctggatcgcgcttacgccgtcgtcaggatagaaaacgatgatctcggtatcctttacattagcaaagccttccaatgccgccttgccggtatcgcctgaagtagccaccaaaatcaccactttattgctctcgccggtcttggctatcgctttcgtcaaaagatgcggcagaatctgcagcgccatatccttaaaggccgaagtcgggccatgccataactccagcacatccgtactttcattcaccttacgcaaaggcacaggttcagcgccgaatttagtctgcgaatacgcagcatcggcacattcaaataattcttctttagtataatcggtcaaaaacagcgataaaatcgccacagcccgttctttataagtcatactgcgcatggacacaatctcgcccagcgaaagttccgggaatttctgcggtacgaacagaccgccgtcgtcagccagaccacgggtaatagcatgcgccgagcataccaggtcagttttgccgcgggtacttacaaataacattgcaggaacctcactttcattaattcactacggagaaatcataccacatttgtattttccaaacaagtattttctatgtatttagaaagtcaaagacgccacaacagcccgtgttgcctgctgtaaatcagccggagctgctacgatctgcataccgcgcacaccggcgctgacagctatctcgtcccagctgttgctgctggcatccatatatacaggataattctttttagcccccaatggcgaacagccgccgcgaatataaccagtcagcggcagtacctcttttaaaggcaccagctcggcccgcttattaccgctggctttagccaaagccttcaggtccagctcgccgtcacccggtatacaggcaaaaataactcctgttttatcaccgcgcactaccagcgttttaaaaacctgggctgctggcattccaacctcggccgctacatgcacagcgtccagatgctcctcgtccacagtatattccatcaggcggtacgcgatcttcagttcatcaagcctgcgcgccgcattggtttttttctgtttcataacttcctgcctcctctggaagtggcataaccgccttccttctgctataataacatcataggtttttaaacgcaaatacaaaaagctttcagcaaactttaaaagaggtgtactgtggcacttaaaatagcctgcgggcaaatagaaatcattgccgggcgaccggacctcaacactaaaaagatcctgcgccatatggatatggcctgccaaaacggcatcgacatcctgctgctgccagagctggcagtaccgggctactttttaggcgacctgtgggagcaaacagccttcatcgaagactgcgcctcttacggcgacgagatcatcgccgctacggaaaactgcggcgagctgtgcgtaatcttcggcaatatcgccgtcgataacagcaaacgcaatgaagacggacgcgcccgcaaatacaacgccgcctttgccgcgcagcacggcaagctgctgactaacggcaccctgccctatgattttatcgtaaaaaatgccctgcccaactaccgcgaatttgatgacaaccgtcatttttacggcttacggcagctggctctggaactggataaacaggttgccgggctgcaccagccgctcactgtcaccgcccacggcgaaaccgtcaaactgggcctgatgctatgcgaagacggctggaccgaaaactactttttagatgtgcctcagctgctggcgcagcatggcgccgaacttttatgcaacatctcctgctcccccttcagcatcaacaaaaacagcaaacggcaccggcttttcggcagtgccgcgcaaaaagccggcatcccgctcatctactgcaataatgtaggtatccagaacaacggcaaaaacatcttcacctttgacggctgcagctgtgtttacggctccgacggctggctgctcaccgatgcgcccatgtatgcagaagcaacgctctgcgccggctgggacagcaaagccaaagctatcgacaccagcggcatcacctctgatccccgcagtgagatcgatgaggtttatcatagcctacgctacggctgccagcgtttccttgaacaggcaggcatcggcaaaatgaccatcggactttccggcggcatcgacagtgccgtcaccgccgccctgtttgtcgacatcctgggtcctgacaacgttctgctggtcaatatgcccagccgctacaactcgcccatgacacagacgatcgccgaacagacagctcagtcactgggggccaactataccgttatccctatcaccgaaagctgcctgcataccagcgaacagcttacacagacacctatccacagttatcatcagcaccgagattttcaacttacaatctcgccgctgatttacgaaaatattcaatcacgcgaccgcggctcccgcgtcgtagcaggcctggctgctgcctttggcggcgccttctcctgcaactccaataaaaccgagctcaccgtcggctacgccaccttttacggcgacatctgcggcgcgctggcgcctatcggcgacctgtggaagcaccatgtttacgaactgggacgctacctgaacgacaaagtatttcagcgtcaggtactgccggaagcgatcttcacgatccgtcccagcgccgaactttcctccgaacagacagtaggcaccggcggcgacccgctggtctatccctatcacgataaactgttccgcagctttctcgaacagtggcgcaaaacatcgcctgccgagatcctgctctggtacagcgaagggacactggcggaacatctcggctgtgaagcagacatcatcagcgaagccttcccggacgcacgcagttttatcgccgatctggaacactggtggaaactgatgcacacactggcagttgccaaacgtatccaggcgcctcccattgtcagcatcacccggcgcgcttatggctacgaccaccgcgaagcacagctcacaccttacttcccgcgcgaataccaccgtttgaaagcgcagcttttaaatgactgatccagcataaataaaaagaccgttcaggttaaacctgaacggtctttttatttctcactgccataacctttacaacggtcctccctggctgctgatcaccgctacaccagccatttatacagggtagcaaacaagacctccagattgatcggtttcgtgatatggtcgttcataccggcatttttcgccttaccgacatcagtaacaaatgcgtttgccgtcaacgccagaataggtatcctgaccgcatcctgacgtggcagagcacgaatcgcagctgtagcctcgtagccgtccatgaccggcatctgaatatccatcagcaccacatcataataccccggtgccgatcttacaaacagctccactgccgacttgccattctcggccgactcaacctgcaacccctgcatttccagcagctcgacagcaatctcacggttcagctcgttatcctcaaccagcagcacccgtttccctgccagttccttatgcagctccggaacagcctcgccgtcacaagtatctttacaggtatcacaaaacagctgcaggacatgcagcattttagatttgaataacggcttgctgataaaagcatcggcccctgcatcaataaattctttttcgatattggaataatcatatgctgaaataatgatgatcggcaccttggcccctacacgtttccgaataacgcggacagtctccaaaccatccatatccggcattttccagtccaaaataacggcataaaaatcatcacaccgttcgtgcgcttccactacccgttctactgcttcagcaccagacaatacccagctgccgcgcattccaagctcctgcagcaacatcgccgcactttcgcacaccgccagctcgtcgtccactaccaataccggcagcccgttcagctcctcatgctcctgctcctctttcagctgcagctccaatggtacagacacagtaaatatactgccagtgccggggcggctctgcacctcgatcgtgccgttcatcatctgcacgatgttctgagtgatcgccagacccagtcccgtgccctgtatcttactgatactttcatctttagcgcgggcaaacggttcaaaaatatgctgcatatactcatccggcatcccgatcccgttatcagtaaaaataaattcgtaattaccctttgttggcagctccgattttaattcattgatcgtcagactgatcttaccgccctcaggcgtatatttgatcgcattggaaagcaggttcataaatacctgctgcagacggtctccatcagttatcacatgctcattgcgtacattaaagatattgaccttgaactcctgctgtttctccaccatcatcggccgacagatactgacgatattatccacaacgtccggcaggctgacatcctccagcaccagatccaccttgccgctttcgatcttcgacatatccagcacctcgttgatcaaacgcagcaaatgcatactggaaacattgatcttacccagacagccgttcaccttctcaggttcatgcaggttcgccctggcaatcgccgtcataccaatgatcgcattcatcggcgtcctgatatcatgcgacatcgacgacaaaaaatggcttttagccagatttgccacatgcagagactgatacgcatcctctaaagcccggcgctgccgctcctgctccctgcgctcctcagtgatatcgatgcccacgctgtaaatagacggaatgccatcccagctgtcctcaccgctcacataacagaacgtaaccgtcaaagcccgtacctcgccgctgcgggtcacaaacttaaactcagccacagtatattcgcccgttttggaaatagaacgcatcaaagaagcggcccgctccctgtcgtcaggatgcacataggaacatttggaatgaagctcatgtataaactgcccggctgtatagcccagcatctccaaaaatttgccgccataccaaagcaccgtttcgcaatccctggcgtcgaccctggccagaccgccgggaatagtttttaagatcgcttcccgctcctgatccttcttcgccagcttatactcggcgctcagcatatcatgcgacagctcgatccgcgacctgcgcccctgccagttaataactctgtttctgatcataaaagtctttttcaaattgggattatcaaactcccacgcataaacatcgtcctccgtcagcagcgcgttattgcagaacggacaggggctggtccgtccctgaatgacctcatagcattttttacctgttacctctgccttagtagtatgtaaagtggcggcagccgttttattcaaaaacagcagttcatacgtttccagatcggaaatgtaaatattcccgacgtattcgtccatcatccactcaaaataacgggtcttctcttccagcagctggtcgcgttcagctttcagccgtgtcaggtcgctgatatcagaataaactgccaaagcaacctcactgccgtccactacctcgcccgtaatcacagcgtcgatattgatccaggcacagccaccatttttaagcggcctgcggcaatcgaccttggccctgcgtccagctttttttgaagcagcggcaaatgcatttttgattttatgaaactcttccccgtgccctgcataatatgctttgatactgggaaacaacttctgatattctgctttggtaaaaccagaatttatataaaaattgtcatttccccataaaatcgtcaactcatcatccaaaagcaacttacagacattgatccccacactgtcgaacaaaacattatattcagctactgtattcatttccccaggctgcccctgctcttccatcaagataagcgctccttttaaaatccgtttatcaaaccatttataataactatatattattactattttaacaaaaaagagcctacaatgccataactaaaacaaatattttataattttatcagtaaaatactgttatattttttaaatcattgttttaatttattatatttcacggtttcaaaacacccctaccccaatgcataaaaaactcccccaggtcgttttataaacctgccggtccataaaacgacttaagcctgtgatccaaagcgatttatggctgcaggccagatacacgccgtgatcactgccgaggaagtaaaaaatattataattttaaaaatcaagataaaatctaaccagcggcgtttttacttgtttaaaaactaaatctcacgccggcattgatctgccactgtttttgaaaagcaccgccgaaagaacgcgccacatcaaaataaaggtcattatttctgcccaactccagctcgccgcctaaattcagttcccaccaactgccgctgtaatctctacagtcgcacaaggtttcgtcccccaacgtcagcactgtgtctgctctgccgccaaattcatgcagcagggaagccttaatataagcactgctgcgctgatacttttggcccacttccaagcctatacgacctacggcgctgttaatgccttctgactcaactctgattccataatcagtaacagcggcctctccattgatatgactgaccagcagctgcgcctgtggttctaaatacacgccctgctcacgctgaaatcgtttaccatattccaagctcaaagccgtggccctggacttataatcgcgtctgtcagcggcgataccaaaggtatcgatatcgcctttcatctgaccgtgcttgagcacgatatctactctgtcgcccaactggctgtatttactgccatacagcattacagcaactgtctgctgttcgccgctgccgttgccatagctcatatttcctttggcatattcaaacgcagcaccaccgagccactcattcatactgccgccatctctgtctttaaatgcagtgtcataaccgatctgataagtctgataattatttttgaaggcttcgccgcgcagtttgccgttgttgatacgagcccataagccatgttctgcccgtgtttccttcagctcggccagccggccatgcagcatatcactgctcaacacccagctggaatacatgctgtctgccgtttgcaggatgctacgggcatcttctgtcgtttcattatgcagactctcaagataccacttgataccgccatcattttcattggagatctctgttttataaacatagatccctcctctataaatatcactcgctataaaagtatgctcaccactggcatcatttaccagcagcaaatgcaagtcgtcaccctgccttctgccgacttcgctgaccagtatattatacgtgccttttgcatcactgctgccgatagacacggtatcgctttgccccgtgctaatatcggctcccagcacaaaagtacctctgtcaccattcagcgtcccggtttgtaatttttggtaacccgctgcctgctccatatcaataacagcattatcaccgaagtcgagcctggtcagatcactattgcctgtcactttccaaaaagcaccgttacgcagcttcatattgatttgtccgttacttacaatggccgccgctccttcgtaataagagtcgtcagtcagcagatttagatccagcagcccactggtatgagcttggatgttgccggtcagataaacactgccgctgccttcgctgttgacggcaatactggcgccgctcttatatgctctcaaagcatagctttgccccttattatccaaaataagtcctttttgaaagtcaactttgccgccagcagtataaacacctacgccttgaccgacagcataagtttctttggcattacttacaccagtctcggcaacgatctgcgctgtttctttaaaaacgatttccgcactacctgcactatagaccccatacgccgacccgctgccgctttgcgcatgtacggtaacagctttatctactgtaaccttaccgccggtattagcactgatacccatagacgtacctttagtactggtcgcttttatagccgctgctcccttaagctcaacatcgccgttactgaagcagctgatacctgcagcgctgccagcaccggcaacttctataacggtattaccgccgatctgcgtcaaagcacgatcagacgatatcccgccattattattgctgttgatacctataacgttcccggtatcagaaacggctttgatctgcgcatcttccacaacctcaaccttaccgccgttccagctccaaagtcctgtcactgcaccgccatcacttttaccagcaacctttacagctccgttcatctttacttcagcgccgctaaagccctgcacgcctctgatttctccgctgccgctgactacatcaacagccgtcagaccagttacatcaatcagactgccgctgccggaagcaaaaagtccatacccatagtcacctgcggttttgacgttgacctgcaacccctgctccgccgtcaaagatgaaccgctttgaatacatgctccggcccccacatttttagtgttattattagtctccgccgttaaaactgcctgcttggcaaaatttattttggcatcaggaaaatatgcacatacagcaacacaaccaacataatcatctaaaccatcattattataggctgtgatctgggtctcaccgctgaaattgatattcgtcttaatggtgtccgctggatttacaaggctgccatcaacataaatgccaaaagcaccgcctgttaaaatagtcttatccgcctcaaaattcaatatattatctttatcacgctctgtcaccgaaacagcagcgccgccaacagtgccatcagcatctgtagttttgatgacggtttccctgcctttcagcgtcagactgccgccagctacctcgattcccggaccacctgtatcccgctttctatcctcgggattattttcgatcagtacactgccctcagtattatcaaaactgaaactgccgccattgacataaatccccgtagccgaattgatcttcaaactgtcggcattttcagtaaaaataactttacttgccgcaccagtaaccattatacccatgcttgactgtgtaagattaccttcgccgatattagtcactgcattgtcaaacacgatactggcgccgctattggcatgaattgtatagttactttttggatattctgtcagatctgtcacatccagcttcccgccggtaaaagtcaggcttccggtcgaaccagtcgccaaaatattaccggtatttacagggctcacgccagtccccttgcctgtcagagtcagcttgtcaccaatagctaccgtcacggtcttgccgctcactttgattggttgaaaagagttgctcactttattctcaactgtgttctcccctgtaaaggtatacttcacttcgccgctgacaatatcgacctctttaatactgtcataatctgtttcattgcctgtaattgcaacattatactctgcagcacctcccaatttacagacattcatcagcaataaactcaaaagcaccgctttccctaacctttttcttgtcactgtttccatccctttcccttgttgccagtcaatttttacttaaacagttatctgtaagagcaaatatttcgctgtatctgcagcagcttcagcagcagccgcacttcctcaagcgaatactgctcctgcccctcagcatcagtaccgcacctgcttttacactcacttttgcctttgttttctgcctcttcacctccatctgtacaatgcgctccagcccactcgaccgcagcagccctgtccagcagtgcttcgagcgaacatcctaaaacattggcgctgcgtaccagcagcttcaagctcaccagcacgttattatgctcaatattgctcagatgcgtctggctgataccaagccgctcggccagctggtgctgattaagctgacgaacactgcgcagcagcttgatattgctgccgatacgcagcaggcatttttcatcgtacatcttccacctccaccttctatgtctcttgcacactttgggtcaaaacatttaaacaggagcgttttcatttgtttagcatcaaaaatatttgttttaataatatttatatgcattatagcacatctgtacccccccgcaagacacttactttttgcctgtgtatcactttttcgagtcttgtggcgcattacgccagcggctttaaaactgtcggcgtctgcgcttttataatggcattattacccgcatgttttaaaagctgcctaaaactattgcctaaaattcacgtgcagcggctgcctgtgcaagcctgcaacagtttatcaccataataaaaacgcctgctttgaaagcaggcactgcaaaaataaaacacgcacaagttatttgtgcgtgttttagctaactttaaatatccagttttttttcatgcagccacttttccagtaacactgctatttcctgattattcatatccgaaaacggaaaatgcgtgttgccttttattcctatttccggtaaatgaaccacggcagcgtcgccgccgtgacggttgacagcatctgcaaataagcgcgccatctgtaagcgcacgcgccaattatccttgttccattccgctgtaggcacagcaggaatgttatcaccataatagatgactattggtattttagtcagcttctgaaaatcttctaacgctatttcccttcccgctaaagctccgaaaggacttgtggtttccagcggttcaggtacctctcctgcgggaaaaataaacccgctgcccggttcataggcaacgaccgcacggatttcaggattttttatagctgccagccagcccggaccgcccccctgtgaatgggtaaccaaaattcccggtccagatttatcaaatactgcagctacagcagcactgataatattttcatcaaatgcacccgtattgggagtcatttgtctgaaaaactgatttaacgcttcctgattttttgaaaactgtactccctcaaaaaaatcgggccagttccccaacctgaaattgctgaaccataactggtcataggtggcggcactgatattttctgctaccgctgactgccccgctctaccacggcgaggctgatcaataagataagtgctgtagcctttgcctaaaaaaatattttgaaatccatctctgccatcaggagtagtttcccaggttttagccgattgcccggcaccatgcagaaaaactaacggatatttatgagctttagccggcttttgataaaaaacatatgcgtgatctccgtgcagcgactggccggactgatcgctcggaacactgtaattaaaacttcctgcagatcttattaccgtgccgccggcggcaaaactgccctgctcggctatcaaaactggtttttcaaaggcctgagctgatgttgctgcggcaaacgtcaataccatcagcgctaaaactttagccgcttttgctttaagcaccactctcacctcacttatctggttttaacggtccatagaaataagctgctgttgcgccgccatcaatcaaaaaatctgcaccggtgataaatgctccctgctggctcagcagcaattcggctacgttggcaacttcatctgccgtcccggggcggcctgccgggcattttgcaaacatatttttataaaactctcctctggggccgttaaattcatcaagcgcaagcggcgttacgataatgccgggcgagatagagtttatacgcgcaccttttacgccccatttgatagcttctgccattacgcgttttacattacagcgtttagccatttgatacgcatgcagtgtgtctttgatattggccggctttaatacttccagctgcagcagttcttctgccggtgtaacagcaagctgttcgtctgtttccgcacctaaggcagccattctgtgcccagactggctggatatcgtaacaccagtaccaccggctttgatcacttttcctacttcttccaacaaaactgctgtaccgtatagatccacttttaaaatagtttcgacagaggcctgactgggtgaaaccccggcagcattgataagcattgcgatctcaccatatttctgcgctgcagctatcatatttaaaattgatttgcgcgaggaaatatccgcttctaccgctacagcgtcaaatccggcctcagtcattattttagttacggtttgggcgttgtttatatttttatcactaactacaatttttttgccatgacccattcttctggcgatcgccaggccaatttgtccggcaccagttaaaagtattacgtcctgcatatacaaaaactcctttcttcaacatgctgatacaatttattttactgctgaatgctgttgtttacagatgtgcgccgtaaaaatcctgtaatttggcaacaaactgatttacatactgcggctgataataagtttggatatgggtcgctccgtctactaaaaacagttctttgtcctgggtgccggttgctttctggaaggcttcctgcgacatatacagcgaatctgctttgctgccggccatcatcagcagcggctggtcaatcagctcgatattatcggtcgcatcccacgacatcagttccattaaactgctggttgtataagcaaaggtagaattgggatgtctgtgagttttgccataatacatcatcccttcacgataaaggtcattagttattttattgatgctttcttccgtcagcgcgtcaaaatcaactgtgcctgaataagcaattttaccggtggcgatttcttctgcccgcgcgtcagaagccagctgcagacgttcctgaactgtatccagctggctgttcatatagccgttccttcttacctgtccggaattgaacatacttaaggtcgcaactgctttaaagcgtttgtctgatttggctgcattcaaagtataaccgcctccgccgcagatgcctaaaactcccagacggtctttatctaccccggcatatgcggagataaaatctgccataccatgaatatcctctgtccgaaaatagggtttatctatattacggggcgtgccgccacttgctccctgataggcagcatcggcagtgatcgtaacgtaaccgagctcggctaaacgctgagcataaagccccgctacctgttcttttaccccgccattgggatgcgctactactatcgcggcatattttttatcgctgctgtaatctgccggagtgtacacattagcggcaatttttaagccgtgcagcttatactttaccggatgaatatttacctgtccggccacgtttttagttatcgcgccctgatagaccaaaccgtatttattgctttcttctgcagaagctgccccgctgaagccaatgcctagcgctaacaccaaaccagataatagtaattttttagtaaatttcataataacctgttccttctttctttatttttgcagtaataaactgtccaaaacccgctgtgcattgctgcctgttgcagggcccgcttttttatccagcagccttactgtttcctgcagctgctctgcgcttatgccagtattcatactgacgcgcatatgcgaagtcagctgggcattgacattaccgatgcctgccagcgcgccgactgttgccagttctctttcctggcggttcaaaatatcacgttcaaaaatatcgccaaatagatgttctttcagaaagacgccgatcaccggagcaaaatcataggttctgcctgccacggggcggcctaccaattcggtttgagttttttcaccaatagcatagcggtcacgtttaggatctaccggtgttgcgtcacggccgatttcatcgacgataccggcagccttacgttcatctaaaacagcgatcaaagtattgatgccgttcaaactgcgcggaaaaccgcaataggcatacatttgtactaaaacctctttcacttcattgacagtcattccattgtccagagcctcgttgagcgccgtttttagattaggcaggtcgccctgggcggtaaaggcagctacagtaacgatactggcctgcttagcagtcagcgcttttgcagcagctgcttcactattgccgttaaaacctgccatacacactgccaaagtcaataataataaacttttttttaacatttcctcacctcattttatttaggatactgcctgtcagttaccgtttccagccaggtaacgccttcgtcactgacttcagataccgcaatatgcgacatcgatgtattggaagaagctccgtgccaatgcttgacgcccggcggacaccagacaacatcgcccgggtacagggcaactatttccctgccccattcctgcgtatatccaaaaccttctgtgacgatcagcgactgacctgtagaatggatatgccagttagttcttgctccgggggtaaagcttactactgcagcgtaagttttcgaagggctgtgggcactgaacagactggtggcccaggctgtgcctgtaaaatttttagggttcgcctgcaccgtcgcattactgccggctttcgtaactgtctgcagcccggcggtttccgcagcggcgacactgcacagcagcagcatcccggcagccgctgccatgatttttttagttttgctttttaacatttcttcacctctttttatttttgtctaaacctgataaagcaatttacttttttgttttcatttgttataatcagcataaatcctcgagctagctcgaggtcaagggtgttgcttgtgaactatttgtaaaataaaactctgttggcttgtttgctttatcacggctcttttaaggaggtaaatcatgaattatactatcggcgaattatccaaaataatgaatgtttctatccataccctgcgttattatgataatgaaggactgcttcccttcgtacagcgcaaaccgaacggccagcgcatctttacccatcgcgatttgatttttcttaataccatcgaatgtttaaaatctaccggtatgcctttgaaggaaataaaacaatatatagaatggtgtatcgaaggtatgccgacggtaccgcagcgttatgaattatttttagagcgcaaagctatcgtagaagaacaaatagcacaaatgcagaaaatacttgcaacaataaattacaaatgcgatttttataaaaaagcgatcgaaacaggtaaggtcgatatttgcgaatcggaacgtcagctgttagcgcagaaaattttagacggaacgctttgagcgtcttacttcctgctgcccgttctcgctctgtttcatagtaagtatatttttagacaacgttataaatccatgcataaaaaaacagacattcattctgaatgtctgtttttcgttaaatattgaaacaccatgctgctacttatttctcaacttcttcccactcgtcctgcaagtcattttcaatcgctttccaggctctgccgaactctacttctttaaagagtgctgtcagtccggtaatctgcttcaaccgcagtatttcatccttatccatacccagatgcctggagatccaggcatccgaacgccccagctcatgcagctcgctgatgatgttgctcatgaggtcgacatcgtgcgagcctctggcccggttatgcctgatcgtgcttgccatccggcagtcgatgggcttatcgatgacagataccggcagtttgccgccttcccgttcgtaaatatcctgatagtccagcataatacggtaacggtgaaaaccgtcgacgattatatacagatctttttcgctgtcataatagcagacgatgggcatagtgtaaccgtcttccttgatgctgtcatacagcagcttcagctccggtggcgccacagagttggggttataggtattaggctcgatcttttcgattggtacggaaattatgttgtaaacaggactgctgaatttcatttttcatcacaaaccttactgtattttttcttcagaacatctaccagcttctgctgctgacgtgtcagcccaaaacccataaagcggcacaggtggtcgtttttcaggatgcagaagcacatccgcttccagctggggatatctttggtagatttgatgtcgtcggtatggtcaggtattttgccgataaaaacaatgcgggagtttttcatgacggtgtaattggaaacgccgttgcgccggatattatagccgtgttcctccagctcgcggatagtttcttcttccagtccgccgcccaccgtatgccagaattcaatcgaggttttgaattttttgatatagctctgcctgagccttgccggcagtgttgccagtaaaaagcgggtatatgattcccaggtatgccctgccggcagtgtgatatttttataacccatggctttcgttctgccataaatagcaccgaaattagcgccccgtacacggccgataagcttgacccagatctgcggatcgatgacccgatacagattgaggctgtctttggcataatcgttgaagggtgaagcgacacgcatttggtcgggtttaagccctgccatataataaaggtcgtacagacggttataatcatattgaaacgtataattggcgtgccagacatcgctggtgctccagtcgtatatgggcgaagccacccagacatttttgaactggttgctgatccagcaggtttctttgtaaccgtatttccggttcaaaaaaccgctgtaacgctgcagcgattcatcagcgcgaatacccagcaggcatactgtttttttgtcgccatgcgcgatacggtaccacctgccgaattgtttggccaggtcttcctgatgcatacggtaacgataggtcgtcatcgggttatttttgatgttgatcacatattcgtgctgaggcatcggcctgacccaggcatcttctttagtgttgtcccagggataccagtacatttcgtagctgctgagcgccgtcctcgtcgccatcggcaggcagacccaatacggctccacatctttttcgatccgcgcaaaggtcctctcgacgtattctgtggtagcgctgtactgcgcttcaaaatcctgatgaaaaacgccgatgcgtttatccggataatgtgccttttgaaaatcaagcaccagattgagcagcagaccactgtctttaccgccggaaaatgatacaaagatattatcaaattcctcaaacaggaactttaaccgacgctgcagcgcttcatatacattttcgtttaaatattcccttttcatcataattctatccctggactttcaaatttatattcattgcaataataatatattatatattatatgtcagttcgattcaacacacccgaaacagtctttatcaatagctttaaagctgctgcaaatgttacttttagaagcactttactgttcttgcgtgcataaaatccgaatgcagatacctgccgaaaaaatttttttggtgcttttataaggtcaaattatattttatgatgtttgttattataaatatttaaaaagccttctaattaataacttttcctgtgtatgcagtattttgtatcttttaatttcgactgcactgtgctaaaataacagtaaggatattagttattacaaggaggtttgttatgaataccacacctgttaaaatcgtagaaactgttctgcgcgatggtcatcagtctctggcggctaccagaatgcgtattaccgatatggttcctgttctggaggaacttgacgatatgggctattatgccctggaggcctggggcggcgctacttttgacgcctgcctgcgctttttagatgaagatccgtgggaacgcctgcgtactttaaaaaaacatttacccaaaacaccgatccagatgctgctgcgtggtcagaatattctgggctacagccattatgccgatgatgttgtaaaagaattcgttaaacgttctgtcgataacggcgtttccattatccgtatttttgacgctttaaacgacacccgcaatatggaatgctcgatgcgtgccgctaaagaagcaggcgcacacgtacagggtgcttttgtttatactatcagcccctaccataaggacgaagactttttaaaggttgcccaggagctggtgcaaatgggcgccgattcgatctgcatcaaggatatggcgggactgctgtcgccgtataatgccgaaaaactggtacgtacgctcaaatcgcagcttaccgtgccgatcgatatccatacccactttaccagcggtatgggcgatatgacttacttaaaagctatcgaagccggcgtcgatatgatcgataccgctttatctccgttcgcacaaagcaccggccagccttctaccgaggctatcgtcgctaccctgcagggccagccccgtgataccggtatcgaactgaccaggctgcacaaggctgccgattatttccgcggcgtcaaaacacagcttgttaaagattttggcctgaacgacaatattcccatcgatcctaaggtactcaccttccaaatccccggcggtatgctgtcgaatctgctgaatcagatgaaggaaatgggttctgccgataaatatccagaattactggaagaaatgccgcgtgtacgcgccgagcttggttatccgccgctggtaacacctaccagccagatcgtaggctctatggctgctttgaacgtcactttaggacgttacaagatgatcccgaatgaagtcaaagaccttgtacgcggaaaatatggccgcacacctgcaccgatcgatcctgaagtcaaaaaactggctatcggtgacgaaccgcagatcgatcatcgccctgctgacgatattgcgccgcaaatggaaagcctgaaggccaaactggctgctgccggctatcccaacgccgacatcgacgatgttttatcttatgccctgttccctgatgttgctttagcctatttcaaaaaacaccgttgacctgaatacacaaaagccgtatgtcataagacatacggcttttttatgtattttatgcgtttatggctttttcttctgcctgctgcagcttttcttttgctatttccagcatcagcttgatcctgttcatttgattgacctggctggcatcagcgtcacaatcaagcgcaatgatattcgcctgaggatcagtgcgcagaagctcgcggatcatgcccttgccggtaacatgattcggcaggcaggcaaacggctgcaggcagacgatattatctatgccgctgcgcagcagcttggccatctcggcagtcagcagccagccttcgcctgccatattgccggtagaaagatgtttttctgccaaagcgatcaaggccgataaaggttcataggcactgaagcgtttactcttttgcagcgctatattcagcggcttgcggtaataatccaaaaacttcataaataatttggacttgatcacattgcccagcgttccgtccagcagacggcgtttgacctgttcgtcataagccgcatacaggaagaagtccatcatattcggcagtatgacttcggcgccttcagcttcaagatagctgacgatgttattattggcaaccggatgatatttgaccagtatttcgccgacgatgcctaccttgggcttgcgcacattatcacgcagcggcagcacatcaaaggcagcagtcacccgtttgatcgtctgttcaaatgataagccagtcaagcctgccaggctgtccttgcaaagctgtgacatcagtttatacaaagcatcggccgcgcccttttcctgctcataaggacgtacgcgatgcagcagctgcatcagtaaatcgccatacagcaagcctttgaccatatccttcagcaaatgccacgaaagcgaaaacccatcgcttttttcaccatacagcgaaaaaacaggtatactgccaagccctgcatcacgcaaagcgcggcgcatcagagcgatatagttggtcgcgcggcaggcgccgcacgattggaacagagcgatactggttttattcaggtcatatttgcccgacgtcaacgcccgcagcatctggccaataatcaggattgccggataacaaatatcattattgacatatttcagacctaaggctactgcttcccgatccggcagcggcgcgatctccagcttgtatccggcacggcgcagagcagtttccataaactggaaatgcactggtgaaagctgcggcgccaggataacgtgtgtattccgcattgtttttgaaaacgacggcggtatataagcaggtatgtctgtttcctgatgtttatcaatacgttcgcgcatggccgccagcaaagaacggatacggatacgtgcggaactgatatggttgatctcgtcgaccttcagtaaggtatacagcctgtgatgacgctctaaaatctcttttactacgtctgaggtgatggcatcaagcccgcagccgaaggaactgagctgaatcagttctaattccttatgtgcagccacaaattctgctgcccgataaagccgggaatgccacgaccactggtcaacaactaccggcaactgccctttaaggctttccggcaggtcggcaaccgcatcttccgaaatgactgttaaaccaaaggaggcgatcatctccggcaaaccgtggttgatttccggatctgcgtgatacggacgccctgccaaaactacggcatgcccatgcccgtccagcactttttgcagcagcttgtgccccatatctctgatttcctgcttatagctaagctgttcggtacgtgctgcctgtacggcagcttccagttccttatgcttcaggccttcctgacggaaaacttctgccagacgttctgccaggcgtttatcatggtacagcggcaggaatggatgcataaactcaacatcggccgcccgcagctcttccatattggcgtagacactttcggcataggttgctacgaccgggcagttatagcagttattggctttctgacattctttttcattgtaaggaacacagggatagaaaatctttttgaccccttttaccagcagatcatggatatgtccatgtaccagcttggccggataacagagtgagtcggaaggtatggaggccatggccgattcgtacaattcctttgacgactgtcccgacagctcgacccgatagcccagccgggtaaagagcgtgaaccagaagggataatcctcgtacatattcaaaatccgcggtatgccgataacaccgcgcttagcggcttctaacggcagcggttcgtaatcaaaaacccggtggtatttatatgcatacatattaggcgcgctggtattggtcattggcagccccgcaccgcgcgggcaacggttgcccgtatgaaatactcctgccgggaagtagtgagcggttaccaaacaattattaccgcagccgccgcagcgatagcttttactgcggtagtcaaaagcagacagtgttgtagcatctaccaatgtcgatttttccagacagcggtcgtgcgccagcagcgcagcgccaaacgcacccatcagccctgcaatatccggtctgatgacttctttgcctgtcagctgttccatagcacgcaaaatagcatcgctgtggaaggtgccgccctgcacgacgatagtatcaccaagctcgcctgcgtcacgcagacgaataactttataaagcgcatttttaacaacggaaatagccagcccggctgcaatatcgccaatggccgcaccgtccttctgcgcttgttttactttagaattcataaaaacagtacagcgtacacccaaatcaacgggttctttagctgttaaagccagcttggcaaattcaccagcgtcaagccccagcccctgcgcaaagttttcgataaaagaaccgcagccggcactgcacgcttcattcagcatcaggcggtcaggaataccatttttcacaaaaaagcatttgatatcctgtcctccgatatcgatcaaaaaggaaacctgcggcgcaaaaaactgtgccgcccgtaaatgtgctacggtctcaacttcgccgaagtcagcgccaaaagcgaccttcatcatttcttcaccgtagccggtaacagccgctccgccgatcacagccccggcaggcatttttccgtacagatcctttaaggcagcagcggcgatctgtaccggattgccgttattaccgctgtaataagaccacagcagtttattatcctctgaaagcaatgccatttttaaagttgtcgaaccggaatcgatacccagataacatttaccgttatatgcggccaaagcttcacgctctacctgatgctgggcatgtctgcagcagaatttttcataatcagcttcatctgcaaacagcggcggcagttttgccactgcgtccagcggcgcatcgttcacttttgccagggcctgcagcagcttttcttcgttaaaaatctcgccgtccttacctgccaaagcagcaccgatagcgacgaagcaatccgcatcttcagttatcaaagctgcgtcagcctgcaattttaaagtagcaataaactgcttgcgcagctgcggtaaaaagtgcagcgggccacccaggaaagcaactttgccgctgattggacgtccctgcgacaaattgccgatcgtctgatgaactaccgcctgcaaaaccgagccggcaatatcttctttagaagcaccgtcgttgatcagggcctgcacatcagttttagcaaaaacaccacagcgtgaggcgatcggataaatacgcttgcagctttctgccatactgccaagtccggcagcgtcagtacccaaaagcgacgccatatggtcgataaacgcgcctgtaccgccggcacagacaccgttcatacgctgttccggcgaactgcccagccaggttatcttggcatcctcaccgcctaattcaactgctgtttccgcttctggcagcaaagaacgaagcgccgcgcgacaagcaataacctcttgtacatgcggcacccccatacgttcggcaaatccaaaaccagccgaaccggtcaatatcaacgaaaattccctgccgtcaataatagcgagaattttctgaatctcttgtaaaaatgcagtgctgggatctgacaaatggcgaaaataatctttaaaaattattcgctccttttcatctaagaccacaaatttgatcgtagtcgaaccaatatcgacccctaaatgataaatcatcttctgcatataaaatccccctgtcaggaagcagcgtctcttcctgtagccacaaaacttaaagtcaaagtccccaatggttacaaacctgctttaagcccgctgtttctgcgctttatcccctgtataagcaatcatttgcaaagcatatttatttctgttacttaattcaataaaaggcagcttttttataattatatacctctttaactggtattatcaatggtttcggcaacaaaaatcaacaaaaatactccatttgtcggattaataaattacaaaatatcaaggataagtaaaaacaggattttaccaaatctctatggatacatataaaaacggcagcttttttaaaaagctgccgttggtgatgcttttattcaattacagggcttctttaaaggcgctgccgcccacaaattcacgtaaaatagagtttttgggaatcagctctttatccagcggcgtcacatggctaagcagtccaagcagtctttgcgcgttagtatagaccgcttctgtttccggtacgccttgcagcaaaggctcggcatactttttcaatactgcaaactcatacaccagcgtggtattaaaaataatatctgcttcttcctggaatgggaaaatatatttttcttccccacggcgtacatcgtcccacagcttcaaagtcatcagcgcgtcatgcgaacggaactgcgaatcacgcaccagccggcgcagcagacgcatatcggtagtctggatacggttgtaatcatccagcgacatcggcgtcagggcactgatatagactttcagtttattacgggccggaacaacggcagaaatacgttcgtttaagccatggataccttcgacgatcagcacagagttatcgctcaaagtcagctcacggccacggtattcgcgcaggccggtacggaaattgtatttgggtattttaactgtttcacctgccagcagacgctttaaatggtcattgaataattccagatcgatcgcttcgacgctttcaaaatcataagatccatccgctttgcgcggtgtattcaaacgttctttataataatcgtccattgatatcggcacaggtctgagaccattgactaccagctggatactcaatctttgtgcaaatgtcgttttccccgaggaagaaggaccggcaatcaacacgagatgtacgtctttgcctttatcagtgatttcatcagctatagcggcgatttttttttcatgcagtgcctcagctacctgaatgatcactccggcatggtcctcttttataatgcggttcagcttggcaacagtattgcattgcagcatagttgaccattcttccatctcgtggaacattttattgagtttggggctgtcaacaaaaacatccagttcgttctgacccgtttccggataattgataacgatgccgttttcgtagtttatcagttcaaacagcttcaaataaccgcaatccggcagcatcggcccgaaaaagtattccatatggcccttcaaggtgtaacaggtcagcagtaaatcatcatcaatagcgtgcagcagctccaatcggtcagcttcgttccgctcgcataaaattttttcagcttcttttttatttatatgtttataaatgatcggttcagacttggctgccagctctttcatatagtcttccaaggcctttaaatcgtagttgctgagtacgatatcgttagtgatttcacaaaataaagcgctgcccagggaattacgggcctcaatttttacttccggccgcagctctttgatagctaccagaaaaaggaacagcaggctgcgcacataaacgcgcatcccctcctccgtatccagcgttataaaatcaactgtaccattttcaaaaacaggcttttgcagatcagtgccaatgccattgaaaataccttccacgatcgggctttgatagttagcagcaaagtctctgctgacttccaacagcgtcgttcctgcaggatactctctgataatattgttgggtaatgtcaatttaattttcataaatactccttatgggaaaaaagaccggaacttttttagctccggtctttgattgttatcaatgcttatttttctacagcctgcattgcagcctgtacttttgcagccataccggcgatctttttaagcggtactgcgcaaacggcaatacgtacacctgcagccaaaggaacagcaaaaatattgtcttcgtgcagtttatcacagatagcatcgggatttttggccggaatggacaggaagaagcctgctacataaggcagcatcggcaagccgcattcttcggcttcttttgtgaacaggtcggcacgtgctttgatcatttgataataatcgtcacgctctttttcggtagcggcaagcagttccgggtcactgtaaatattagccagagttttcattgccggacggttgatgttggaccaggtcgcacggctggtatattggttgatggcggcaaattcttcaatgatttccttagaagaagaaacgccgatcatagcgccggtgcgctggccataaagtgtaaagcctttagacatactgtatgccacaatactgagaatgttagcaggcagattggaaagctttttgaagatcttacgaacttcttctttttctccggcataatcaatatatgctacgtctaaaagcagcgttacagttttatcagtacctgcagtcgcttctttgatgatgtcgataacgccctgcaagtcttcttcactgaggctgtagccagtagggttatgagccggagtgttgatcatgagcagcaggcttttctgtttgcccaaaatctcgttgactttggcttttaaagccggaagattgtatttattattttcatccagcattttataggtatccagcttacgtcccatatcctgacacaaaaccttatacggtccccagtaccagtcggatgtcagcgcggtttcacctgcatccatatagttccagatagtatgatggataacgcctgtaccaccggcagtagcaacagcggcgatatagccttcaggcctggaagtgccgaaagcagcagtaataactttttcaagataatcaggcagtccggaaataggagcgtaggcgatcagctcgtttgtcgcaagaccacggtaaaccttttcgatagtcggcaaacaaacaagtttttcatcttcgtctaaaatagcgccgatagtggcattggttactttgtcagcaccgtatttagctgctgcggcaacggcagcggcattagcgccgaaaattttatcctgggcagattttcctttagcatgattagctgcaatactagtgatcattggtaaaaggcctccttaatttatataagtaactttgcttgctttttattttgcgccttccgggaagaaatgttcgtggatagcgttcacagcggttttaacgtccttttccggcaccaggcaggaaacgctgatttcggaagtactgataacgtcgatattgacgttggctttggcaagcgcaccgaacatacctgcggcaataccggggctgcccagcatacctgcaccaacgatagataccttggcaacattgacttcaatgtcagctttatcaaaatgcatcgtttccttcaggctttcaataacgctcatcgcttctaccatatcggtttgggtaacggtaaacaggatgtcatttttatggtcggtagcgcttgcgctttgaacgatcatatcgacatcgatattggcttcagccagagccgagaagattttataggcaatgcccggttcgtcgctgacaccgcgaacggcgatttttgcgacattagtatcgtgcgctacaccgcgaataacaaagtttttctcttgcactgtgtattcctccctaataatagttccgggtacgtcgttaaaggtagaacgtacatggatggcaacgccgttgtgctcaccatactctacggcgcgcggctgcataacgcctgcacccaggcgggccagttccagcatttccacaaaagtgatctcgtccagcttctgcgctcccggtacgatacgtggatcagcggtataaacaccgtccacgtcagtatagatatcgcacatatccgctttcagacctgccgcaatcgcaacagcagtagtatcgctgccgccgcggcccaaagttgtgatctgtcccaagtcagtaatgccctggaacccggcaacgataactatcttgccttcgtccagagcctgcttgacctgacaggcctgtacgtctaaaatactggctttagaatgcttatcgttcgttttgataccagcctgagcaccggtaaaggatactgcgggctgtcctttggcacagaacgcactggccatcagggcaatggagacctgctcgcctgtcgccagtagcatatccagttctcttttcggcatttcgggattgactttagcagctaaagtcagcaaatcatcagtatggtcgcccatagcggaaacaactaagacgattctgtcgtccggttgacgttcgcgcagaatccggtcaacgataccatgcatcttctcaggtgtcgcaaccgagctgccgccaaactttttcactagtgtagccatttacttccccccgtttgttaacttgctacccggaaaaatccattccaagcgcacagaaagcatatattttcactaactattatcacattatttagtctttcggtcaatatcttctacaaaattttcttgattgtattacatttttacacaaaactgccttttacagataaattaccgtcgcaccggcaccgccttcatgcagcgaagccagctccagtcttttgaccgcacggtgcgcggataaataggcagtcagtccggcacgtaaagcacctgttcccttgccgtgaatgatacgcagctccggcaaacctgccagcagtgcatcgtcgatgcctttatctacggtcggtatcgcttcttcgatcgtcataccacgaacatccagttcctgtctggtagaagcagtacgtgtgaccagcatatcatgggcataccccttgcgttttttaggccgcagatcttcgctcactttggtcttaccttttaccagcaggcaatttttagcaggcacgttagtttttaatatacctacctgcactgtcacatcgccgccgttaacagcaacaatcgtaccattttgacgcagtgaaggtaaaaagacagtctgcccgactttggcagtttcttttgacaacggtgtaccttccggcaatggcgcatcttcactgaactgtttatttaactgtttgcgcgcggcttctgcagcagcttccagttttttcgcatcaaagtcagccttcattgagcgcagctcttttaaaatagcttccgattccctacggctgctgcggtaaatctcatcagcctgttcacgggctttacgcagcatttcgttcttgcggcggtcaagctcctgtttctgcttgtgcagctcctgcttaatccgctcgctttccaaacgcagcatttgtatttctttgttctgcgattcatattggcggcgttcgccttccagctcgtgcaatacatcttccatatgcacatgctcctgatccagcagtttaccagcattttcaacaatctcttccgacagtcccagccttctgctgatattgaaagcattgctgctgcccggaacacccatcagcaatctgtaggtcggccgcagactgacaggatcaaattccacgctggcattttccattcccgtatgtccataagcaaatgttttcaattcgctgtagtgtgtcgtgatcattgtcagcacgccctgttcatgcaaatgctctaacatcgccatagccagggcagcaccttcgttagggtcagtaccggcacagatttcatccaccagtaccagatcaccgctgcgcacttcatttaaaatctctaccagattagtcatatgtccggaaaaagtactcagactctgctcaatgctctgctcatcaccaatatcggcataaatagctctgaaaaccggcattttagcactgcgggcaggtaaaaacaagccggcctgcgccattaacgcaaacagcccgaccgcttttagagctacggttttaccgccggtatttggaccggtgatcaaaagcgtattaaagcctccgcccaattctatatccaggggcactacttgactttgatccagcagcggatgacgtccctgcacgatctcgactttgccgcctaaatgcagcattggccttacggctttctgcgcctgcgccaaataagcacgggcacagataacgtcaagatttgtaagagtctcgacgccggcagtgagcagatcaccgtctgccccgacgctgccggacagctgcctcagaatccgttctatttcctctttttcttcggccatatattttttgatatcattattcaggttgacaacagccatcggctcaataaacagggttgctccactgccggactggtcgtgaacgacgcccggaaaattgagtttatattcctgtttgatcggaatgacatatctgtctccgcgcatagttaccagcgcgtcctggaaatatttttgattattgggatcgtgcaggactttttccagctgttcacgcacacggtttttcgccatctgaatgccagtccgtaagccgccaagctttgtcgaagcactgtctttgatctcgcctttttcagaaatagcattctccagttgtttttccagacgcggcagcggctgcaaagcttcggcataggctgccaaagtcggtgccagctcactctcctcctgtaaaaaggtcttgatctgacggatcgccgcagccgtactgccgatctccattaaggtttcagcttccagcacagcccctaattgggcatgcttaacagcagccacaatattatgcgcgccgccaaaggggaatcttttcccttcatccagcaggcgcagtgcctcggctgtttcctcctgcaagcgcttaacgatactgaactcactttctgtgcgtatcgctaaagcctgcgccttccccagcgaggtggcagttttgctggccagcagcgcttttactttatcaaattctaatgtcttaacagcaaatcttgccataattactccttataatacgccgcggaaataatgccccctggtcgtatgcggcaggttttccgcaacttcgcggtcacctcgcagcacttccttatacagcgttaccaatgatgcagtttcttcattagtataattacgcgcgtctaaacgcagccggccaacgccgatactttccatatgcttgatattggtcagcatcgacaggtcatgcgcatttaaaatatgcattcggcagttctgatcggtaactataggaaacttcgcatccttgcggtcgctcaaaaacaactgctcccggcagttaaatttacaggcgccctgatgcagatcacctaaaaagctgccgcctacacagtattccgaaaccatcatttcaatccgaccctgcaccatacattccacaggaacggggctgactgcggctaaatgttctacctgcgccattgtcagctcggctgacagggttgctcccacggcgccctgttcacgccagaattccaaattctgatcgttataaatattcaaagacatatcggcccacaaagacagcccgctgtattgctgcgccagctgccacaagccgttgttgctgatataaacagcatcgggcttcaactgctgccaataggcaaacagctctgcaaaataaggcagctgtccttctttaacaatacgcggtgtcgctatggcccattttttaccataattttgagcaagaccggcaacttcggcataagactgcctcggcagctgcctgctgctgaaaatatccccgccaaaaataatataatcagcgcctcctgccaaagcagcctgtgctttagcaacagtatcggcatgcacagtcaaaagcgcatgtttactgcggctgattttttctgcaggaaccagatcacgcggaactttatgacgttgtacacgcatcggtgcaaaagcctccagacgtgcagtatctaaagcttcgacagctaaacggcgagcctcgttgatctcgctcatcggcaccattacgttttcatcacattcaagcaccaagtctgacagctcatattcagtcgtgcccagtcgatctacctgtttacgcacagtttcctcatttaaagcatgcttgcgggcagcttctacaataaactgcgtttcaccatagcctgtattgccctcgtcatcagtcagcagcaccgtcattggattgcctgctcttgctgttactaaagcacttacagggatacggcgtttggccttctcaccaaagaactgtgcggcatatgtcatcagacggttatcaaaggttctgaaaacacggtcattcattttaatgccatgcggcacatcgatagtgacctgcgaacctgcggcagccacagctacttcctgtccgttctgcaaaagtgatgtcacagtagtgccaacacgaccacccacgctgacccaaaactctaagccatcatccaaatgcaattctttatcaagtttcagtgtcgctttgttagcagctttatcaagcttaacaacacgccccaccaaaacaccgcgattgtttggccggcggtcgctcatcatttccctgccgggccgctccagcagataagcagttgtaaaatcacgattaaagatctgttcaatattggcaaaatcttcttccggcacctgataatcaccgccaagataactgtcgatagccctgcgataagcatcgacaactacggctacatattcaggacgcttcatacgtccttcgattttataggatgttacaccagcttcgatcagctgcggtaaaatatccaaagtattcaagtccttaggactcaaaagatattgccctgcgtctttgccgctcagcagatcttctcctgcttcattgaccagcttataaggcagacggcacggctgggcacaacgtccgcgattgccgctgcggccgccgatcaggctgctcatcaaacattgacctgaataacatacgcacaaagctccatgaataaaaacttctatttctgtatctgtgccatgacagatcgtatttatttcttccagactcaactcgcgcgccagaacaacacgttccataccggcttcagcagcaagcttaacgccctcggaattagtaaccgtcatctgcgtactggcatgcaaaggcaggtccggcactatttgccgggccagacggatcacacccagatcctgtacgataataccgtcgatgcccacattactcaaaaacagcagataatcagccaattcgcccagctcactgtcatcgaccagcgtgttgacagtgatatacagtcgcacacggtgcatatgagcaaagtaaacagccttctgcatttcttcacggtcaaaattactggcatactgacgtgcgccaaaagctttgccgcccatatatacagcatcagcaccggcattcaccgccgcttccaacgcttcccagctaccggcaggagcgagcagttcgatggtttgctttttcattaactaaaaacctcttctctaaatatccttcgccgctttcagcaaggcttcatattcacgacgtaaggtatataactctcccgccagatccaacgccgcccatacagcgactttggaagttgtgaccaaatgctggcttgtcgccagtttctgcatttttttatcgaccattgccgcaatcgcatccacatcagtacgcggcaaatcagtctttaaagtatattcatcattaaaaattttcacggtaacggcagttttttccatctcagacctccgttatcacaatactttaacagtaaagctgaatttgtcaaagccgctgcctttttcccaggcacgcttatattccatattcaccttgtattcgcccggctcctgggcaccgaaaacaattatttctaatccaggcattccggtccggttgttggcagcattaccaggcaaaacataagaacgtcccagttcataaaactgaccagcataaccattaccctctacaaaccaggaataacccgttgtacgattggattccaactgtaaagccagcagctctccggccttcacagttacgaccttatcctcaacagcacgagtcaatccatataccgtcagcaaacggcctgcttcccctgtacgcagcaacggaaacaatttactataagaaacaaaattactgtaagcagcaccactgctggtacgcgtataaataccgttatcagcaaataacacgccttcataagcgcctaaaatttcatgtacggcattgccttcgccaacaaaatcgcgaatgctgaactcattgccggtagtcatatctaaatttacagcctgataagcagtacggccgccgttagtcgctttcagcaaaataccgactaagctgggacggttcagcttcacttcatagctgactgtaccgctgccgccaacctgcgccagcaagtctttgactttgctgttcaaaatgccgttaacacttttttgaagattagtatatctcagaccatcaatctccggtatctcgccctgcatattctttgtcgcaacaactttgctgaaaacagttgttggttgctcggcaaaagctacagtacttaatcccagtatcaggcagcacagtaaaatccccagtattctcatcagcgtcgcacctctttcaataaatatttttgatttaagctaaggccttgatatattgaacagccttgcgcattctgctcaaggtagtttctttccccagcagcaccataacatcaaataagcccgggcttacagtacgccctgtcagagccaagcgtgtcggatgcacaacttttcccagtgataatccctgctcttcggcaatcttattataagcggcttccgtactggcaagatcaaaagtctctaacgcttcaagcgcattgatgcagacagttaagagctcggctgcttccggtttaaaatgcttgccgacacctttttcatcatagctttctacctctttaaagaagtattctgcggcttcaacaacttcctgcagtgttttgacacgtacgcgcactacgtctaccaaacgggaaaaataatctttatttgcctccagccatgcttcatctaccaggccggatttgatgaagaagatttttgcctcaggcagaactgcttccagcggcaatgctgataaatattgtccgttcatccatgtaagttttttcgtatcataaacggctgcctttttcgacattttttctaattcaaactgagccacagtgtcctgcagcgagaaaatttcttcttcgttgcccggagcccagcccagcagagtcagataatttacaattgcttccggtaaatacccctgttcacggaattcttcaacagaagttgcgccgtgacgtttacttaacttactgcggtcaggagcaagtatcatcggcatatgtccaaatttaggaacagcaaaaccacaggcttcataaagcagtacctgcttaggagtattggataaatgttcttcggcacgcagcacgtgactgatgcgcattaaatggtcatcaacgaccacagcaaaattataggtcggcatgccattagttttaacgatgacaaaatcatcaaattgcgttaaatcaaaagtaacgtcgccgtggatcagatcatgtactgtcaggtttccttccgtaggtattttaatgcgtacggaataaggctcacccttagctgctctggcctttgcttcctcgacaggcaaatctcggcaggtgcgggcataacggaacggctgtttggccgcacgttgtttctcgcgttctgcttccaaaatttccgaagtacagaagcaataatacgccttaccttcttccaacagctgttcggcaaccttgctgtaaatctcacgacgctctgattggtaatatggacccacttcaccgcctacttcaggtccttcatcccagttcagcccaagccatttcaaactggtaagtatttggcttacgctgtcttctttcaaccgttcagtatcagtatcttcaatacgcagcaccagcttaccattatgttttttagcaaaaagccagttaaataaagctgttcttgctccaccgatatgtaaataacccgttgggctgggtgcaaaacgcacacgcacttcttccatgttatcgtctcctcaaattgaaaaatgaaaattctatatcattataattatattacgaacaaagtaaaaaagcaaagcagccctgccttagcaggactgctttgcagcagattttacagttatttttcttctctgcctgtttttaccgtttggtttactttttaagcagatgcttcttcttttacagcttccgccaaaatctcgatcgccagacaaatatcttcgttgtcagcatattctgccgggttatggctgatgccgcctttacaggggacaaacagcatacttgcaggagccagtttagccatgtgcatagcatcgtggccggctccactgttcatatggcgataagcgatacctttcgccgcacagataacatccagctttgctgccagctcttccgacaaagcgacaggattatcggctgtcagcatatccatagtgatagtaatactgtcatttttagcaatttctgaaaccgcatcacgaatatcgctcaaggcacagttgatactttcttcatctactccgcgcaaatctacccacaaggtagccttgccaggaactacattgatcgaagacggctctacatccaaaacaccaactgtagctaccgtgccgctttccgcttcattagttgcagcttcttcaatggctataacaagcctggccgcacttacaagcgcatctttacgaaaacccatgggagtggctccggaatgatcagctataccttcgacaatgattttaaaccgcgtcggcgccgcaatattatgaacgataccaatgcgttcacctgtttcttccagtaccttaccctgttcaatatgtatttcccaaaaacttttaaagcagcctgctgctttacgtgcctgtttgtaggcagcagggtcacagccccattctgtcagtgcttctttaaaagtcactgcaccttctttggcagcgcccgagaatttatcagggtcgccaacaccggccatcagtttactgccgatggtagcaaagccaaaacggcttgattcctctgccctgaaaataataacctcaatcggccgctccagttcttcatcctgcagcatataaagtacttctaaagcacctacaacacctacagtaccatcataggcaccaccctgcacgacagtatcgatgtgggaacccatggcaacaggcgccaaatcagtatttttaccttcacgacgcaaaaagacattaccaacagcatctacagacagcttcagctgtaagtcctgtatctgcttgagcagccattcctgcgctgctttgtcttctgccgtataagccaatcttgtgattccgtgttctgttttgccaaattgcgccagcccctgtaacagtccggctactctttctttgtttatcgcctgcataacagtcccctcactttctcacacttatttattcttattttgacggcggttagagccggtcttaggtgctttacgtttatccacgacagcttttttaccgcgtttcggtttagcagcttctgccttacgttttttctgtactggcgcatgctcacgacgggctatcgttttgccgtctaaattctgccgttccattttcacatcaagcttgttttcaatatttttgagccattttacttcttcagcagtgtataaggtaactgcaatcccctcgttaccggcacgcccagtacgtcctattctatgcacataccagtctacgtcatgcgggatatcataattaacgacatgagtcacgccttcgatatccagcccacgtgcagccagatcactggcaaccaggacctgcagcttggcctcacggaaggctttcattactgttttgcgtttggcctgcgacatctcaccatgcagcacatctacattatatccctgagttcccagccactcacccaattcttttgtgcgttctttgctgaagcaaaaaacaatcatcagataaggattgtaacggtctattaatgaagcaacagccttattacgatattcgtccgtagttttgatgcagatctgtttgatattttcaaccgttgctttattagggtcaatatcgatcaaagcacaattacgggtaatacgtttaccaagcttctgcacttcctctgataaggtagcactgcacagcatagtctgccgttccggatcagtcattgcgataagctccgaagcttcatcaataaagccctgcttaagcatttcatcaacttcatccaaaaccagatatttaactccgccaaggttagtattgcctttgcggatatgatctaaaagacgccccggcgtaccgatcaaaacatggcttttgccgtccagcttatgcttctgcgcctcaaaatcacggccgccggtaaccgcaagcacctttacttcacttccgcccaataacttcttcagctctactgctatctgctgcgccagttcacgagtcggcgtaatcaccaacgcctgtacaaaaggcttagccgcatccagacgttctaccatcggtactaaaaatgccagtgttttaccagtacctgtctgcgctcttgcgataacatcacggcctgcaaataaggccggtatagcctgttcctgaacaggcatcggctttttaatccccatttgcttaagcagctcaaccgtttcagcacaaaccttcaattctgcaaaactattcaccatatttctcaccgctttcatttcaaatcctaaaattaaataataaaaaaagcgtccgatgcgggacgctccgtcaatctcttgcttgactatgtagttgtactgcttgcattcaccataaaaataatggtgccgaggaccggaatcgaaccggtacggggatcactccccgagggattttaagtcccttgcgtctgccagttccgccaccccggcaaaaagtggaggcgacacccagaatcgaactggggataaaggttttgcagacctctgccttaccgcttggctatgtcgccttaactggagcggaaaacgagattcgaactcgcgaccccctccttggcaaggaggtgctctaccactgagctatttccgcataaatggtgcctcagcacagaatcgaactgtggacacaaggattttcagtcctttgctctaccaactgagctaccgaggcaaaatggcgacccggatgggactcgaacccacgacctccgccgtgacagggcggcattctaaccaactgaaccaccgggccattggtggggctacataaaacttctaccaaaataaaaaatggtgggcgctgacgggatcgaaccgccgacattctgcttgtaaggcagacgctctcccagctgagctaagcgcccgaatggtgaccggtaggggaatcgaacccctgataccgccgtgaaagggcggtgtcttaaccgcttgaccaaccggccaaattttggtgacccatgtaggcctcgaacctacgacaccctgattaagagtcaggtgctctaccaactgagctaatgggccgtcgtaatgttgcttatatagaatacacgaaaatggaaagtttggcaagagttttttcgctgtttttctaatttttcctaaaaccgcaggaagctgttttaaaaaaacggtaaaattgtgtatacatgtggaaaggattgacgctgacgtgttaaagaaggtaaaataaaaacagttagcttgttgaactaaatgaaggcttcccctaaaaattttttggaggattaaaacatgaaatatgatatcgcaattatcggcggcggtccggcgggcctgtcggcggctattactgccagcagtaaaggacggaaggtagtggtgtttgaggctcacggtttcagtccccgtctgcgcagtgtcgagcttatcacagattatatgggctgtcccgatatttccggcaatgagctgatggacaggttcatcgagcatgcacgccatatcggtgcggagattatcgaagaaaaaatagtttcattaaaagagaaagccggttattttgaactgggtacgcctaacagccagtataatgccgatacggtaattcttgctacgggtatttcccgttccagcctgctgccgggcgaaaaagaatttttaggccgcggcgtaagctactgcgccaaagtcgacggcgctgaatacaaaggtaagcgcgttgctgcgatcgccactgttcctgatgcgatggaagaaatagaatatctggctgatatctgcagtgaagtaatttttattccccgttttcagggcttcgtagctccaaaacgcaaaaatgtaacggtggtcctggatcagccgactgatattaccggtaccgacagagtaaccgggctgcataccactggtgaatttttcagtgtccaggcagtctttatgttccgtgcttctgatccgctcaacagctttttgccgggtctgcagatgcgcggccgttctgttcttgtcgacgaccaggctgaaacaagcatcgaaggcgttttcgccggcggcgactgcaccggtcagccctggcaggtcaatcgtgcggctggtcaggctcagaaagccgctatcagcgcgatcaattatctggccaaacgtgacggtttgattgaaacttttaaagaatacagctgattttaaactgaataacagtgattttacgggcacgccgatgttcttcggcgtgttctctttcatattatggtaaattgtgctaaaataaagtttacgaagtatttcaacatttggaggaatgaataatgttagatatgaaatttgttagggaaaatcctgaattggttatggacgctatgcgtaagcgtaacgccaatgtgaaccttgacgaatttttggaattggaaaagaaacgccgtgaattgaccctgcaggtcgaggctcttaaaagccagcgcaacgcagcttctcaggaaatcggcaaaatgaaaaaagccggtgagagtgcagatgcgcagatggccgaggtccgtgccctgggtgataagatcgcggaagatgataaagagctgaaggatatcgaagccagattaaaagaaattctgatgacgattccgaatatgccggcagcagatacacctgttggcagcagtgatgccgataatccggtagtgcgtacctggcgcgaaccagctaaatttgcttttgagcctcaggctcattgggatatcggcgaaaaattgaatatcctcgatgttgaacgtgccggcaaggtttccggcgcccgctttactttttaccgcggactcggttcccggctggaacgttccgtaatcaatttctttctggatatccatactggtgaaaacggctatacggaatttttcccgccgttcatcgtcaataaagacagtatgcagggaacaggccagcttcctaaatttgctgaagatatgttcaaactggaggggctggattattacctgatccctactgccgaagttccgatcacgaatctgcaccgcgacgaaattttaagcggcgacgatctgccgctgtattatactgcctacagcgcctgcttccgcgctgaagcaggcagtgccggccgcgatacccgcggtctgatccgtcagcatcagtttaataaagtagaactggtaaaattcaccaagccggaagattcctgggacgaattggaaaaactgacggctaatgccgaaaaggtgctgcaattattggaactgccgtatcgtgtcgtgcgtctttgcacaggtgatattgggttcagctctgctgcaacttatgatttggaagtgtggctgccggcggctaactgctatcgtgaaatttcttcctgctccaatttccttgatttccaggctcgccgcgctaacatccgtttccgccgcgacactaaatccaaaccggaattcgtacataccctgaatggttcaggtgtggcggtaggacgtactgttgccgctattctcgagaattaccagcaggcagacggcagcgttatcgtgccgaaagtcctgcggccttatatgggctgcgacgttatcgaagcacctaaaaaataagtagtttttgcaaacccctgcttttaataagcgggggttttccatatttaggtattttgtgttgtcaaatcagcatagattactatatttagtagtgacttatttagtaaaaaaatattaaaaatcctaaaaaaccagtaaaattttagtaaaaacagacgttaagcgtgattatcacggttttgcctgaaactcctcaaatttttttcaatttctttcattttcctattgtactttcagtaatttgtggtaaaatcatatgagtaaaatcaatgctaaagcaaggggagagtggatatgaagaaggacatcttttttcaacttagtcaaaatgctgcagaaaggctggcagagcgctttggaacgccgctgctggtactttctttagaacaaatagaaaagaactatcgctttttgaaaaagcacttgccgcgtgtgcagctttactatgcgatcaaggccaatccgcatcagcggatcttggaactgctgcgtgacctgggttcctgctttgatgttgcttctgacggcgagatcagaactctggcagcaatgggtattgacggcgagcgtctgatttacgccaatcctatcaaaaccggcggcggtctgcaggcctgctgtgacgtcggtgtacataaaatgacttttgacagcgaaagtgaaatcgtaaaaatggcacagggctgccccggtgctacggtgcttctgcgtatccgtatcgacaattcttccgcacatgtagatttgaataaaaaattcggcgtaggccgcgaacgcgcagtagaactactgcaggcagcacaggctgccggtcttgacgccgccggcgtttgtttccatgtcggcagccagacgatgagcgccgatccatatctgaatgcgcttgatctggcccgcgagatttttgaagaagctgccgctgcagggatgcagctgcggatcttagatattggcggcggatttccgattcccgaacccaaggtgcgttttaatttaaaagaaatgcttaaacagatcaacgcccgtctggacgaagattttcccaatgtagagatctgggcggaaccgggacgttttatgtgcggtacggctgtcaaccttattaccagcgtcatcggtgttactgaacgcggcggtcagccctggtatttccttgatgatggtttatacggaactttttccggcgttatttttgaccagtgggactttaagctgatcagctttaaagaaggagaagaagtggaagccacttttgccggtcccagctgtgattcgctggatatcatgttccgcggcaaactgactgtacgccaggaggtaggcgatctgctgctggttccttcctgcggcgcttatacttcggcttcggcgacgaccttcaatggtttcagtaaagccaattttatcgtttgggaagatttaaaagacgaaatcgagccgcagccgcaggctgctatggttggctgaacaacagaatatctttgctccggctgtttgcagccggagtatttttattgcggtgagcaggcggttgcagcggtagtttgacgaagcgttacaattgcttgtaacgccttgctgcttgtgataaaatgtaaagataacatggataagtgtttgtatttatcgtggaggctttcttttgcaggcagatcagaaaaaaatgccgcttgtagcggctatgctcaaatataaaaaagaacaggtctatcctttccacacgccgggacataaaggcggccgcggaatggaaccgcttctggctggcgagctgggagcaggcgcattgcagatggacgtttcgctgatggcggagctggatgacatccattgtcctgaaggctgtattgccgcagcgcagaccctggccgcacagctttacggcagcgaccgctgtttttttgctgttaacggtacgacgcaggccattcaggcaatgctgatgactgctgtcaaaccgggcggtaaagttcttattccccgcaatgctcaccgcagtgttgccggagggctgcttttaggtgatctggaaccagtatacgtattaccgcagtttgatgcggtttttggtatcaacacgcaggtcactgccgggcaggtcgaagaagctctgcaaaaagatccttctattaaagcagtgtttctgaccagccctaattattacggtcaggctgctgatattaaaacgattgctcaaatagcccataaatatggtgctgcactattggtagatgaagcgcacggcccgcatcttggcttcagcgaattattgccgccttcgtctatggagtgcggtgcggatgcctgcgcgcaaagcacgcataaaattttgggtgctatgacgcaatgctcgatgctgcatgtgcagggccggcgccttgatttaaagcgggctgctgatgttatgagcctgctgacgacaaccagccccaattatctgctgatggcgtctctggatgcggcgcgtttccagctggcgacaggcggcaggcagatggcggcacaggctgtggctgcggcagacagattgcggcggcttttacagaccttcaaggggctgaagctgctgacggctgattgtgctggcagtaacggtattgccgggtttgacagtaccaaggtgacggtcaatgtagccgcctggggttatacaggtattgaagccggggaaaaactgcggcaggcaggtgttgccgtagaactgacagatgccgataacgtgttatttttagttacctatagcgacggcggcgctgattatgatgccgtactcgctgtgatacaacaggtttttaccgaactggaaaaaaacaaaaaaacgccgcgccgtttgacggtcagcccacagcttcctgcaccgcagcaggtgatgtctttacggcaggccttcgacagcgcgaagaccagcatacctctgtgccgtgcggccggaaaaatctgtgccgagcaggtaagcttttatccgcccggcataccggtacttttgccgggggagctgattacagaagcgatcatcgcttactgtgaaaatatgaaaaacttgaacctgccggtcagcggacccgctgacggcagcttgagggaaatacgagtggtgttttgatgaacaaagggtattttatcacattggaaggccccgacggcagcggcaaaagcacgcagctggagctgatcgcagagtacctgcggcagaacggacgagaagttgtctgcacccgtgaaccgggaggcagcgaagctgctgaacgcctgcgtcagctggtgcttgacccgcagctggccatagacgcgcgtacagaaactttgctgtatctggcagcacgtgctgatcatttagataaggtcgtgcgtccggcgttagcgtccggaaaaatcgtgctttgtgaccgtttcagcgattcgacactggtttaccagggctttgttcgcggtctgccgctgcaggagctgctgcagctgaacacttttgcaacaggcgggctggaaccagatttgacgctgctgctggacggagatcctctgctgcttgcaggccgcaggtcgcagcgcggtgtgaccgaccgttttgaaaacgaaggacttgcttttcagctcaaggtaaggcagggatttgtcgaactcagtaaggcctatccacagcggatcagggtcattgatgctttgcaggaacaggaaagcgtacgcggctgtctgatcagcgagttggaggctttacttaaagagtaagcgaggaaaggatgcctatgtgggacgatattctgggacatgaacagaataaggaatttttagccaggctgctgcagccgggtaacaggccgcatgcactgcttttttacggcccggaaggtattggtaaaaagcagctggccttgcgttttgctaaaacattcctgtgccagaagccggacgaacatccctgcggcaggtgcgaatcctgccgtctgatcaatctggcagagcacagctttgcccatcctgattttattctggtggagcaggaagctcccgggaaagacctgaaaatagaacagatcaaggaaatgagcaggcaggccgcctttgcacctgcgctttcaagccataaggtatgcgtcatcgacgctgctgacaggatgacggtagaagcggcgaacagccttttaaagctgctcgaagagccgccgccaaactggatgtttattctggttgcgtcgcggctggaacgcctgttgccgacgatcctttcgcgggtcattcaattacgctttgaccagatacctctggcactgacacaggaggcattgaacaggctcgggctggaacgcccggaactgctggcccgcctggcaggcggttcgcttggcgctgctgtcaatttggctgctgcagatgccgtcagctaccgcgatcaggctttggaatttctggaagccctgccgctggcgcagcccatgcggtatgtagcttcgcagccatggctcgaaagctatgacaaacagggcggtttattatttacggaaatgctgctgtttttagcccgggacgttttgctttggcaaaacggactagaggaacagatttataactgtgactgcacagatagattacggcgtttggccgcctcatggcccgcttcgcatttgaagcaggcggcggacatcgcccagcaagcatatcaggccatcgaaagcaatgccggcgccaagctggttttggaaacggtggtacttaaaacagacatacttcggaaggaggagagatagtgccaacagttgtaggtataagattcaaaaaagcaggtaaaatatattattttgatcccgcactcagcagcgtagcccagggggatcatgccattgtcgaaactgcccgcggggtagaatacggcgaagtagtagtagggccgcgcgaggtcagcgacagtgaggtggtttcgcctttgaaaccggtgctgcgcaaagctactgatgaagatgcccagaaagtcgaagaaaatatcgtacgcgagaaagaagctttcaatatctgcctgcgtaagatcactaatcacgatctgccgatgcgtctgatcgatgtggaatttacttttgacgtcaataaaatcatattttatttcacagccgaagggcgtatagatttccgcgagctggtcaaagacctggccgctgtgtttcgtacccggatcgagctgcgccagatcggcgtgcgcgatgaagcgaaaatgctgggtgggatcggcagctgcggcaggccgttgtgctgctctacttttttaggtgactttgaaccggtatcgatcagaatggctaaagatcagaatctgtcgctgaatccggcgaagatttcgggtatctgcggtcgtctgatgtgctgcctgaaatatgaaaaccatatgtactgctgcaaagaaggcggctgtaaacgtaactgcggcaacgaccgtgtcgagatcccaaaattgggctcgctggtagtaacgccgctgggagaaggcaaagtaacaggcatcaaccgcgctatgcgtacggcttccgtgcagctgacgcccgataacgttatccaggtagaatgggacgagatcgttgatgcttccaaggccgatccgatctgaaatgagtaaagctacagaacgctgcgattccctgcccggctgtaattatgcgatctggcaggactcggaagaattttgttttacgacggatgctgtttttctggcaactttcccgcatttggtcaggcaggcccgtgttttggaacttggcgccggtacaggggccatcagcctgctgctggcagcacgcggtgcggctcaagtagtaggcgttgactgtaatcctcatgtagtagagctgatgcgccgcagcattgcggctaacgggctggaggaatgtgtcagtgccgagctggccgatctgcgggagctgaaagcgctttatcgttcggaaagtttcgatctgatcgccgctaatccgccctaccgtaacagcggtaaggttcgccgggtagcgactgcggcctgccatgaactgacggcaacgctggaggatttcttccgcgccgccgcctatctggtcaaatatcgagggcgttttgccattgtgcagctgcccgaacgatttacggaatgtatggaactggcgcttaaatatggtctgcagccgaaaaaactgcaatgggtacatgcctttgcggataagcccgcctggatctttctcatggaaatggtcaaaggcggcagttacggactggaggttttgccgccgcttattatgtataatgaggacggccgccacagcaaacagactttggagtattacggtatggcggatatattattaaaataaaaaagtttacttatgggtgcagaaaaattctcgtgcgattctcgcgcagataagtttgcagtgctttaaagtcgcataaatactgtctgaagagagaaaaattctcgcgcgtttctcgtgcgattctcgcgcagacaagtttgcagtgctttaaagtcgcataaatactgtctgaagagagaaaaattctcgcgcgtttctcgaaataggatgcattttaattaatataatggaggaagaaaatgatttccttaaaagaactattggaaaatcatgaaaatgaaaatatagaatttaaggaaagttttatcaaactatctaaagatttttggcctacatattctgcgtttgccaatacggcaggtggatatattgttttgggtattgctgaacctgttccgtatcaatacgaagtaagtggcgtaaaaaaccacaaaaagcttttggatgatttattcaatacagctgcaaataaagataaagttaatcataatcagctgaataaaaataatatagaaatttttgaagacgatggcaaagtggtaatttccatttatatagctgaattacctgttaatcaaaaaccgctttatttaaacaaaaatatttctaatacatatattaggaaaaacactggtgattatttagctacagaagaagaaatacgcagatttatgcgtaatgcttctgataatattgacggtgagcttttggatgggtatactattgaagatttagatattgagagcattctagcgtttaaaaatattgttcatttgcggaaacctgaaggaagatatctggcaatggacaatagcgaatttttaaaatctatggggctttttcgtatagatagaaatgacggaagaaaatggaaattaactttggcgggattgttgtttttaggaacggaagaggctattttaagtcgtattccacactttcatttagattatctaaataaaagaggtaataatgcacgttggagcgacagggtttccagtggagatttaaattatcaaaacttaaatatttttaaattttatagcattgtattgaataaattatttttgacaatacgggagccttttgaacttgataaaaaagctattagaaagtcttctgctgaattagaaattattatcagagaagctttggtaaatatgctggtacatgctgattacttagattcagaaacggcgatcagagcagaagtgcatgattttttttatactttcactaatccgggaaccatgaaaataccacaagaacaattttttgttggcggacattctgaaccaagaaacaacacattgattacgttctttaaaaaaatgggcgcttctgaaaaagaaggaggcggcggcagggaaatatttacaataacacaaaataatagattcagaatcccagaattggatgtaacattaaaaagcacttttttaaaaatatggttagccgcgccggaagattcttacccggatttttcagaaaaaacaagaacagtatttttatatataaaagagaattatagtgtgaagatgaaagaaatagaaaaaaacactaagatctcctatcattttgtcagaaaagccttacaggaattattagacctggatttaatagaaatgacgggcaaaggaaaagctacgaaatatacgtggaagccaagtaagatcgaaagatttgcagcagttgaaagtataaaaaatgcaataatgaaaaattgatactctgtttttgacattgtgataaaataaatagataatgtgaacaagcaggcatagttttggtatttgcaggaggctatatagtgtcagcggaacaaacggattttggaattttatatttgtgcgcgacgccgatcggcaatctggaagatatgacgcccagggcgcagagaatgctggccgaggcggatattatcgctgccgaagatacccgtcatacactgcagttattgaaccgtttcaatatcaagggacggctggtacgctatgatgagcacagcaaagaacggcagggagcttatctgctggacgaactgctgtccggaaaaaatatcgctttagtcagtgacgccgggtttcccggtatcgctgatccgggtgaacaactggccaggctggcgatcgatgccggcgtgcaggtagtgcctgtacctggtgccaacgccgcgttatgcgcgctcattgcttcaggtctgcctgcctcaccgttttttttcggcggatttctgcccaagagcaaaaaaaacaggcggcagcagctggaagaatggcagtatctgccggctacggttattttgtacgaagcgccgcacaggatcgaacaggtgctgcgggaagtgctggaggtctggggggacagacagctggcagcagcgcgtgagctgaccaagctgcatgaggagtttttccggggcacggtcagtcagtgcctgatctggctgcatgaaaataagccccgcggtgaattctgcctggtcatcgccagaggcctggaacagccgcagcctgcgcaggaagcaaaggatccgctggcgcaggtacaggaactgctggctcgcggcgtcgataaaaaaacggcgctggcgcaggttgctaaagcaaataagattcccaaacgggaattatataataaattaatttcagaagaagaagggatcaacatatgacaaaaccaacgttttatatcaccaccccgatctattatcccagcgataaactgcatatcggtcatgcttactgtacgactatcgctgataccgtggcccgttatcatcgtgccaagggcgaagacgtcttttttctgaccggcagtgacgagcatggtctgaagattcagcgtaaagctacggagatgggtgttaccccgatacaatatgttgacgagatcatcgcaaatttcaaacttttatggcagcgcctcaatatcaccaataacgattttattcgtaccagcgaagaacgccatcataaggttgtgcaaagtattttgcagaaaatctttgaacagggcgatatttataaaaagaattatgaaggctggtactgtgtaccctgcgaatcctactggctggagcgtcagctggtcgacggcaaatgccccgactgcggccgtccggtagagcgtatggaagaagaaagctatttctttaagctttccaaatatcaggaccgtctgctggaatatatcgaaactcatcccgacttcattcagcctgtggcacgccgcaacgagatgatcaacttcatcaaacaggggctggaagatctgagcatcacccgcaccaccttcgactggggcatccctgtgccttttgacaacaaacacgttgtctatgtctggtttgacgcgctgctcaactactttaccggtatcggttacggcagtgatccggaaaaattcaataaatactggcctgctaacatgcatctggtcggcaaggaaattgtgcgtttccatactatcatctggccgatcatgctgatggctatgggtgaagaactgccgaaacaggtttacggacatggctggctggtagttgaaggcgacaaaatgtccaaatccaagggcaatgtcattgatcctctggcgctgatcgacgaatttggcgccgatgctatccgttatttcctgctgcgcgagatcaacctcggcagtgacggcaatttttcgcgcgacgcgctgatcacccgcatcaacgctgatctggccaatgaccttggcaacctgctgcaccggacggtcagtatgatcgaaaaatatcacggcggcgtgatccataaaaccgcctgcagtgatcctcttgatgacgagctgatcgtcctggtcaatgaaactgttgcgaaatatcaggacgctatggatcatatggaaatcaacacggcgatcaaagctctgtgggcgcttatcagccgtgccaataaatacattgatgaaacaggcccctggctgctggcaaaagatcccgccaaagcagcgcgtctggaaacagttatgtataatctggcagaggtattgcgcatcgtcgctatccttacaagtccttatattccttctaccagtcccaagatctatacccagctgggcctcactgctcccgagcagttcctgctggccgataccgcctggggcgggctgcctgacggcaccaaagtgcagaagggtgagccgctgtatccgcgtatcgagatcactgaaagcggagaaactgttatcgccgctaccaaaaagactgctccggccgctaaacaagcagttaaggccgaagtaaaagctgaggccaaaacggaaagcaaagccgcggcaacagaagaaataactatcgatgattttatgaagatagatctgcgcgtagctaccattaccgcagcagagcgcgtacctaaaaccgataagctgatgaagcttgaggtcaggatcggcgaagaagaacgtaccatcgtttccgggatcgcgcagcattatactgccgaagagctgatcggccgcaatgttatcgtgatcgccaacctgaaagctgcaaaactgcgtgggatcgaatcccgcgggatgctgctggccgcctctgacggagaaggtaagctggtgctggctgatgcccccgatatcgcttccgggagcaaggtgaaataagatgtcacgtacaggactattcgattcccatgcccatatggactcggactattttaccgatgaccgcgacgcgctgcttacacagctgcaggaagaactggacgggatcatcaatcccggctgtgatgagatcacgtcgggtttcgctgtaagtttagctgaaaaatatgattttatgtatgccgctgtgggctggcatcctgaagaccttgagggtattttggataacagctatcttgacgagctggcagcctgggccgtccaccccaaggtagtagccatcggcgagatcggcctcgactattactggaagggcaacgagccgaaggacgtgcagaagcgccgtcttttagaacagctcgatctggccaaacagttcgacctgccggtgatcattcacgaccgcgatgcgcacggcgatatcctggagatcttccaaaaagaagtcacaggtgtgcgggcagtgttccactgctattccggctcactggaaatggcgaaggaactgcttaagcgaggattttatcttggttttggcggcacctctacttataaaaatgccgcaaaagtgcgcgaggtcctgcagtatgtgccggatgacctgctgctgtttgaaacagattcaccttatctgacgccggtgccttatcgcggcaagcgtaatcagccgggttataccgagctggtggcacgcaatgcggccgaagtgcgcggcacgacctttgaagcgctggcagcgcagactactaaaaatgtcaaaactctttttaataaaataaaataaaataaaataaaatacaaactgcctgtttgtttttcgcaaacaggcagtttgtattttaaggctgttattttccagaagtcaaaacaagtatctgtgtccacagtagtttttacgtttttgttttttgtgcaaaagcttatgtgtgtttaagggcgacagtttgacagaaaatttttctttatggtaaaattatacgtctttaaaaggaggtacaatttatgcctaatagaaaatcattatatagagcaatggaaattttgccgctgctgttagtggtagttttagttttcagcgctatttgtctggccaacagcaaagaaatagttttgcgttacgacgggcaggaaaaagtagtgaccactattcttgaagatccccgttctattttggaagagtccggcgtcaaggtcggcaaagaagaccgcatactgatttctccggcaaatgccgaaaaaaagaccagggaagttattgagctgaaacgcgctctgcctgtaacgatcgaaaaatatggcgtcagcaaaaaattctataccggtaaagcaactgtcggcgaggcgctggatgccctggcgatcaattatgaaggcaaaacagtctatcccgctgtcgatacgccgatcacttccgacctggagatccatattttagggcgttttgatgagctgcatgaagaagagcagccgatcgagccgcctgtggagtttgttgataatctggaaaagccgtatggtgagaataaggtgctggaaccgggcgtacccggcaagatgaaggtgaccagaaaaactacgcttaaagacggcctgttccaaactcatatcatcagcaagacagtgctggaagagcctagacgtgaactggtagagcgcggcatggcccgttctatcgaaacttcgcgcgggcggatgcgttataataaagttatgaccatggaaatcaccgcctataccttgggtgagggcagcggtaccggacgaacttcgataggactggtgccttacgaaggtatcgtggccgttgacccgcgggttatcccgtattatactaaactgtatatccccggttatggcattgccatggccggcgataccggcggcgctatccgcggcaatcggctggacgtgtttatgcacgactggcacagagctattcaatgggggcgccgtaccttagacgtatatatcttagagtaacggaggcgcggacttgctgaaagaagttctcgtagtagaaggaaaaatggatacagtggcgatcaaacgcgccctggaagccgataccatcgaaacaggcggttttaccttagcgccatataccctgcggcagatcgaagccgcatataaaaagcggggcatcattatcctaactgacccggacggtgccggcgaacgtatccgccgctttctgacgcagcgctttcccgaagcggggcaggcctttgtacctaaagcggacgctacggcgcacaatgatgtgggcatcgagcaggctcagcctgaggcaatcctggcagcgctgagtaaggtgcgccaccatgaatataagcctgacagcgaatttaccagccaagacctgtggcagaacgatctggccggaacaggcagtgcggcgtatcgccgtgataaaatgggcgctttgctgggcatcggctacggcaacgccaaaaggtttttagagcggctcaacagctatggggtcacccgcagcgaatttgacgaggcgcttgcgcagttaggagaacagcatggataaaccgatcattgccagacgcgaagtcaccaatcatatattgcacacctttaaattaaaagcggataaaagactgggacagaacttcctgatcgacgaagaagtcgtacgcaggatcgttgctgctgcagaactgtctgaggacgacacggttttagaggtcggccccggtataggcactttgactcagggactggcgcagagcggcgccagggtcatagcagtcgagctggataaaaggctgctgccggtgttggcaaaaacactggaaggctacgataatgtgcgtatagaaaacggcgatatcctggaagtcgatatcaaaaatattgttggcgcgccgacctttaaggtgacggctaacctgccttattatattaccacgccgatcattttcaatctgctggaacagcgcctgcctatggaacggctggttgccatggtgcagaaggaagtagctgagcggatggtcgcgaagcccggcggcaaagattacggcgctttgtcagtttcgatccaatattataccgagccggagatagcctttatcgtaccgccggaatcctttatcccggcgcccaatgtcgatagtgccgtcattgtctgcaaacgccgtaccgtacctccggtcgaggtctgcgacgaaaaactgttcttcaaagtcgtaaaggcggctttttccgtacgccgtaaaatgctcagtaacgctctcaaaaatatgggcatcagcagcgtacaggctgcggcatggttggaacgtgccggtatcgaccccaagcgccggggcgaaacgctgtcgctggcagattttgccagcctgaccaactgctttaaagaagtgctggcagaaacagagcagtaaaaataatcaaaggaaaaatgcctatgaaaaagatcgctgttttaagatgtctgcgtaccagtaataactgtaccggcagcggctgtcttaaagctttcaataataaaaccaacgcttttgccgtttatgaggcagaggaaacagaactggccgcttttttgaactgcagcggctgcggtgatgtacagatgcccaataacgaggaaggtctgcgcaaaaagctggaccgccttgttactatcggcgttgaagccgtgcatttgagcggctgtaccaaaaagaaggacgcacagggagaaaaacatgaatgcccggtgatcaccaaaactgccgaatacctggagcagcaggggattactgttgtcagaggcacacatcactaaaaataaaaagctaaaaagcatcgacaaattttgtcgatgcttttttatttttatctatgaaattacggcgattagttgagccggtcagccgttctgcttcagcagcagccgcagcttatccagccctttgagccggtgcttggtgacgttgcgtacactgcagcccagcaggcgggctgcttctttcggtttctgctcgcgcaaaaacaacagctcgataacctgctgctgttcggcagtcagctgttttaaagcctgccgtacttccagtgacagcagcagttgggcaatatcgtccggcagcccctgctgcaacccggcctcatccagaagggcggtgccttcctcactgtcagtattgatggcgatctcgttttcccagatccggccctgcttctgcatggcgtcgaacaaagcgaaatgtactctgcagcgcgcgtaaccgggccagtttacataatcagtaccgctgtatttgagtaccagctcgataaaagccagcacagcgatgccttccgcatctttccccagtgaattataaaacatctcgcgccgtgcttcgctgctgagcaggggcttaaaatcactgcacagcttcagtaaagcaccgttgtcgcctacctgcgccgcagttatcaaaagctgcagtgcctgggcagccgcgctgcttgtattagtatctgtcaaaatagctatttatatcagttcttcccataattttatgacggcgggccgtactgtaaagcgttatgcataacagggctcagtatgcgcctttgtatttgttttgtaaacaacctttggggtaggctataagaaatacaacccatagggttattttgctttgctgcttttgcggttaaaatttttcacagtcaaaacttttagctgaggtgcaaaatgagcaagcatacttataataacatcggccgcaaattataccagctgcggctggagctggggctgacccaaaacgacgtggccgaacgctgtaatatgtcggtcaattattacggccgtatcgaacgggaggaatgcaactgcagcgttaatctgctggataagatattgcaggtgctgggaaaggaaatagattttaagtaaagtcttgtaggaagaaactgctgttagattaaaagataaaaaataatcgctctcagcgaaagttgagagcgattattttttgccgggctctatgggaatagagtcaggctttttgttgttgtagatcaggtgctggcaagtgagattgtaaatattactgcacaggtacgataaaaatataagtaagagcaaaaacgttactgaaatataaaatctaaagtgcttgtgtcttgcgggggggtacaactgtggtacaataattataaaacatttaggaagttttttatgtattaaaaaagatacaaaaataaataagaaaataatgaataactaagacataactataacagataagcataaattctggtaaaattatggcttcgtacttttagtgacaaatagttgctggcaagcagaagtgtaacaataataacgaagaaacgaagaaaatataagtaagagcaaaaaagagacgaaaatataaaaaacagccttcttatgtcttgtggggggggtacaagtgtggtataatctaaagttaataaaacaaatatcttaattgttttatcaaagcattaggatacagattgcaattattacgaaattaattaacaacactaagttcaagatagataaaggtgatcatttgctggatacacatacacatatcttatggaatatagacgacggttctaagaatcagtgcatgtcgttacaaatgctggagattgcggccagaagcgggactaaagctatctttgcgaccccgcacgtcatcgaaagagcgaacaagccttcctgggaagaaataaaggaaaaaacacagcagctgcggcagttgtgtgcagaagcacagatagatattatgctttatcccggagcagaagtgcagatgaactgggagcttttgccggagctgggagcgactggcgcgtactgtttaaacggcggtagatatctgctgatcgaactgccggcggcagaaatccctgcctatgccgatgaattctggtatgagctggagctgaaggggatcacgccgatccttgcccatccggagagatatcagcagctgcgcgaaaaccctgacctgctgttactgtggcggcggcgtggcatgcttatgcagtgcaacagcggcagctttaccggcatgttcggcagcagcgtctgtgagaatgccaaggtcttgctggcaaatggtctggtcgatctgttagggtcggacgggcaccgcagcgaaggacgcaatacggatatgtcacgggcagcggcggtcatcaggcagctggccggagaagaagtactgcggcagctgacagaaacgaacccgcaggcgattttaaaaaatcaggaaatagagctcaagcagcccaaagtacttttagaagacaaaccaaagagcttctggcagaagctctttggcaaataataaattaaagattgaagtaaagagaaaaaggagaattccgatgaagaaaacaattctgacgctgatcctggcgctgagcctgcagggactggcagcagcgtcagcagcagacaacgactatattatgtgtcccggcgaccagctgcaggtagtagtctatggacatgaagatctgagcagcccgcccaacagcaacactaccccctatacagtacgccctgatggaaaagtaacctttcccctgatcggcgatatagacgtgacaggaaaaacagtaacagaatttacgcggcaactggaagctagtctggccgaataccttgtcaggccgcaggtcagcgtcaatatcttaaagctgggaacgacgcgtgtctatgtgctgggggaagtaaaaaaaccgggactgtacgagcttgaaaaaagccaccgcgtattagatgccctgggcaaagcggaaggctttacagaaaaagccgccaaaaagaaaatctttctgatcagaaaaggtgcggaaaaacctgtactggtcaatatcaataattttctaaaaaaatccgaccagagccaaaactacgttttaaacgaaggcgactgcctgtatctgaccagcaacggcaagatagatatcgggcgtgacatcatgcccttcatcagcggcgcatacatggtatcggaaatcaaaaataacgactgatctgaggagagataaagtggaagaggaaatcacaatcgacctgcgcgagctggcgcatatagtgcagaaaaacgcaaggttcatcgctaaagtcacgggcggatgtatagctgtagccgggctgtatttgcttatagcttcaccggtctacgaatcagattcgctgctgcgcatcaagcagcccaaagggataggctcgtcgcttttagaaagcatgcctatgggtaatgccatggccagcaaacagctgatgagcacctatgcggaaatcttaaaaagccgcagcgtcatcgttccggtcatcgaacaaacggaagaagcagacagtgacggcaaatatatgcgttatgaagattatatcaaaaacaggatcactaccaatccttttaaagataccgagatcttaaaagttacagtcaacgctaatacgccggaaggggcccagaaagccaacgacctgatcgttaacggctttttgcagcggttgaccggtctggtacgtgaagaacagaaaactacccgcgcctttatcgaagagcgggtcgtagcctctaaagccgagcttgaagcagccgaaagtgcgctgaccgaatataaaaaagccagcaagatcctgtcaccgacggacgaaatgaagttggcggccgataaaatgggtatcgtcgataaactgcgtgcagaaaacaaagtggcgcttgccacagcgcaggcacagctgtcagcaacagaccagcagctgggcggcgaagccaaagcgacagcggataacgcagttatcaagcagtataatgcaaaattggccgaactggagacccagaggatagattatctggacaaatatacagccaaacatcctaaagtcatcgaaacagaagacgctatcgccaatttaaaaagcaagctgcagcaggaaatagccaaagtagcctcactgcaggcgccgtcggataacccagtgcaccagcagctgctgaccagtaaattcggcagcgaagcggcgatcagcgtagccgaaagcaaccttgccgagcttgagcgtctggataaaagaaatcaggaagacgtagaacggctttccgagaaagaacagaaatacctgagcctgatgcgtgacgtcagcgttgccgatgaaatttacatcatgctggccaaacgcctggaagaagccaaggtagccgaagtagcggtatccaccgaggtacaggtagtagatacggccacactgccggaagacccggtaaaaccgaaaaagcttttgaccctgcttttggcagcctttttgggaatcttcggcggcagcagctttgttattgccaaagaactgatgaacagaaccataaagacaacggacgatgtagcaaactatctggacctgcctgttctgggctcggtgccggattatgaatcattgaataaaaacatgaaaaaagaacagcaggagcaaagcttgactgccaggctacggaggtacttatggaaacgataacactgattgccgaccgtgatgccaaatcaccggtagcggaagcatatagaacgatcaggaccaacatccagttctccaacgttggtcaggagctgaaaacgatcatcgttaccagcgctacgccaaacgaaggtaaaagtacaacgatcagcaatctggcggtggtaatggcacaggccgggcacaaagtgcttttaatggactgtgatatgcgcaacccgacacagcataagctttttaagctgactaataaaggtctgagcaactgcatttcggcgagtgaagaggtgcgggaagtcattcaaaaaacagggatagagaatctggagcttttagccagcgggccggtagcgcccaacccatccgagcttttgggaagcaaacggatggaacagttactggaacggctaaagccggattatgactatatacttatcgatacgccgccaatcatgccggtaacggatgcggcagtactgtctggtaaggtagacgggctggtcatgttggtcagctccggcgaagttacaccagcagcagctaaagaagctaaacagaggctgctgcaggcaggagcacatattttgggagttatccttaacaaggtagaattgtcccatacgcacggctatggttactactattactatggttccgatggtacatccgggggggacattcgtcgctagaagtgagatggaagctgcgcaggtattgaaaagatatcacaaaataattgcataggggtggaatatgcagtaatgattaaagatggtgaattaggaaagactatttttgattttacattaacatttataggaacgatatgtataagcccgcttttagcttatatagcgtacaggataaaaaaagaagatccgggacctgtaatatttaaacatatgcgtgttggtaaaaatggaaagtcttttccatgttataaatttcgcagtatgtgtgttgatgccaaacaaatgctggaaaaatatttaagagaaaatcctgaagcgcgaatggagtgggaacgcgactttaaattaaaaaatgatccgagagtgacaccaattggcgaatttttaagaaggaccagtttagatgaattgccgcagatttttaatgttttaaagggagaaatgagtttggttggaccacgtcctattgtccaggaagaagtgccacgctacgggatacatataaaaaaatattattcagtaaaacctggcattactggactgtggcaggttagtgggcgtagcgacatatcttattcggaacgtgtcgccttggatgttgaatatgtggttaatcgaagttttctaaaagatatccagatacttataaaaacatttgatgttgtattcagaaaaaaaggtgcatattaaaataagggaggcttcttattatgaaagtagttcttcttgccgggggattgggaacacgtataagtgaagaaagtcaatataaaccaaagccgatgattgaaattggtgggatgcctattttgtggcatattatgaaaagctattcattctatggttttaatgattttattatttgcgctggttataaacagcatatgatcaaagaatggtttgccgattattttttgcataccagtgatgttacgtttgactttaccaaaaagaacgaaatcgtgatacacaagcaacacacggaaccttggaaggtaacagttgttgataccggattaaatacgatgactggcggcagggtaaaaaggattcaaaaatatattggtaacgaaacttttatgatgacttatggcgatggtgtatgtgatgtcaatattcaaaaactgttggattttcataaagcccatgggaaattggcaacacttactgctgttatgttggaacaatccaaaggtattttgaatattgacggtgataatgcagtaagatcatttcgtgaaaaatctattgcggatagttcaccgattaatgctggatttatggtattggaaccacaagtttttgattatctggaaaatgacgcgactgtttttgaaagaggtccgcttgaaaaattagctgcagccaatgagcttatgagctatattcataagggcttttggcagtgtatggacactaaacgtgaaaaagatgaattagaaagcttatggtctaccgttaaagcaccatggaaggtatggggagaatgaatatattttctgagttttataaagggaaaaaagtacttgtaaccgggcatactggattcaaaggaacctggctctgcaaaattttgactatgcttggtgctgatattattggttattcgttggaatcgcctacagtagaaggatgggaattttttcgcatggctcaaattgaagaaaagataacttctattatcggcgatattagagattataaacatttaaaaaacgtttttgatgaatatcagccggaaatagttttgcatttggctgcgcagccacttgtgttggaaggctataaagacccggttgggacatactctactaatgtgatggggacagttaatattcttgaatgcgttagaaataccagttgtgtgaaatcttttttaaatgtgacaacagataaagtttatgaaaataaagaatggatttggggatatagggaaacagaaccattagatggttttgacccatattcgaacagcaaaagctgttctgaacttgtaacgcactgttataaaaacagttattttaaagatgaaaaagttgcaatatccacagcaagagcaggaaatgtaatcggcggtggtgattttgctgaaaatagaattattccggattgtataagggcggcgtataaaagtcaagaaataattgttcgtaacccctattctataagaccttatcagcatgtgttggagccattgtatgtttaccttatgatagctaaagcccaatgtgaaaatattgagtttgcgggctattataatgttggtccggatgaatgtgattgtataacaacaggcgatcttgtagatttattttgtaaagaatggggaaatgggcaagcatggaagaatgtttgcaaccaaggccctcatgaagcacagtttttaaaattagattgctcaaagttaaaaaatacttttggatggggaccaagatggcagataacagaagctgtggttaagacggtagaatgggctaaggtttatgagcaaaatgacagtattgttgattgtatggaaaagcaaataaggttatttatgttaggttaaaatttaattatgttttatgaaagactgggggctcataaaatgtctaatagaatacagattttagattgtaccttaagagatggtggattaggattagaagacagtaaaaaaaataaaatatcttcgatgcagttcgatttagattcagttaacgacataattgataagttagcgaaaagtaaagttgacataattgaattaggctctattgaaatatcagaagaaaataaagttggatatgcaatttacaatgatattgagtctatttctcaaaaaataccccccaaatatacaagaaatcaaatgtatgcagctttatatagagggccagatacgcccatagaaaatataccggtttggagttcagaatattgtgaagcagtaagagttattattcgctattctgaacttaaaaaatctttagatttttgcaaagctttggccaacaaaggttataaagtattcattcaacccatgttaacaatgcgttacagtgaaatagaaatacagatggtaattgatgcagcaaacgcaatgaatgcttatgcagtatattttgttgatagttacggctatatgcatgaaaatgatgtgattagattttttaagagatttgatggaagcttggatgattctataaaaattggatttcatgcacataataatatgaatcttgcttttgcaaatgctcttacttttattaaacaggaatcagatagaaagattatagttgatgcttgtattgcaggaatgggtcaaggtgcaggaaacttacagacagaaataattatagaacatatgattaaaaattatggctatgaatataactttacgtcaattttagaagcgtgcgaagttattgaaaaatacgttgctaacaatttgtggggatattctgtaacgagatttttgccagcaatacataaaacagcatacaaatatgcgattgctttgcgtgatatttatggacttgattttaaagaaattgattatgttttaaagtctatgccagacaatttaagacatagatatacacctgaaaacactttagaaattttaaggattgctggttatgagtgaacatgcgacttgcttagtaaaaggatctgactatattgtcagctttttaattgataatggtgttactgatgtttttggtattccaggcggagttgtattagattttttatatgcattagacaagaggaaccaagacattactgtgcatttaaattatcatgaacaaagttctgcgtatgctgcttgtggatattcacaagttgagggtaaattaggtgttgcatatgctactaggggacctggagttactaacatgataacagctattgcagatgcatattatgattctattcctgttatgtttattacggctcactcatattgcaataaatataaaaatatgcgagttgagcaggatcaagaaatagatttagttccaatgatatcccaaattactaaatatgcaaaacgtgtggatgagggaaatgatctaccaactgaacttacaaaagcatataatttagccattagcggaagaaaaggccccgtttttttagatatttcaaataatatattatctaatgaaataacaattaaaagtgaaaaatatatagatgaaagcaatgtggaatcaattaatgtaaaaaatataacagagtacatcaggatggcattagaaaattcggaaagaccgatacttctgattggagacggaataaggaatttaaaggctatatcaaaccttaaacagtttgttgagaaggtagagataccagtattgtctagtcgtttttcacatgacataatgcagaattctttgatgtactttggttatatcggcagtcacgctacacgatatagtaattttattttagcgaagtctgatcttattatttcaattggaaatagaatgtcatttcctttaagttctcaaagttttagaccgattgtagaaaacaaaaaaataataagggttgatgtagataataatgaattattgagaaaaattccaaattgcaagaattttaatgtggatataaacacactttggccgcaacttattaacacaaagctaacttataaatataaagagaaatggctttcagtttgttgtcaactaagagaagttttgtttagccacgatatggactacccatcagaaatgattggccgtatattagataatattaatgaaaatacagttattataagtgatgttggaaataatgaattttggttatcaagagcaagtgtgtttgctaaaagaaaaaatcgtgttctttactcaaaatcattcggatcacttggatgttctttgcctaaggctataggtgcttattatggaacacgaaaaccagtagtttgttttactggtgaccaagggtttcaatttaatatccaggaactacaatttgtggttcagcataaattgccaataatgattgtcatattaaataatcactcatctggtatgatacgcagcagagaaaaacagttatcttatccaaagtacctccacactacagaagatagcggatataaagcagtaagttttaatgaaatagccaaagcatataactgtgaatattatgcgcatacagatacaaaagaaaaatttgatgaaatgataagtaaggtggtaaaaccgtgtattgtggagatttttgtagatgaaacaacagaaatttcaccaatattgcttaaaggcaatgagtgtcagaaactcacaccgaatcttccaaaagaaatgtataaaaaattaaatgaattataaggattttataggagaaaattatgaagtctttttcagggaaaacagttctggttactggtgctacaggactaattggtagtcatatagtgtatgaactgatgagtatgaaaaatgtgcgggttattgcacttggccgaaatattgaaaaaataaaaaaaatttttaaagattacattaacaatgcaaatttttattatgtcgttcaagatgtatctgatccaatagatttaaaaaatatagaagtaaattatatttttcatgcagccggtccaatggaaaataaaataattgataaatatcccttggaagtaatgaaaccgaatattatgggtgcgattaattgtcttgaatttttaaaaaagcaaaaagaagaaagaagtgtaagcggcaggatggtaattttttcttctgtaacgatttatgggaatataacgggtaatgatttagtagtaggagaagaggatactcaagttactataccattagacgcttcgaacgcgatatattctcaatcaaaacggatgtcagaagttatttccagagcttatagcaaacaatacgggcttgatatagtcattgccagattaagtactgtttatggaaatacattttttaaaccggaaacggctttttttgaatttataaacagggcgctttctggagaaaatattacattaagggattctggggtggctagacgtgacaatatttatatagacgatgcagtttcagggattttgcttctggggttaaatggtactaattgtgaagtatataatgtttcgtctaatggtgaaatggggaattttgctgctgttgatgagatagcgtccataattattgacctggttaatgaaaaatataatattaatataaaattaattaatcaaagcagtaagaataaaattaggagatcaggtattgtgttgagcaatataaaactcaaaaatttaggctggaatgttaaaacaagcttgcgtgaaggaatagcaaagaccttaaaagtgtttgaggagaaaaaataaatgaatgtggtatatcatagcagtgattcctttgcggttgttacaggagtctcaattacttcattattcgaaaataataagagtgcagacacaataaatgtgtggttgatagaacatgatattacacaggaaaataaaaataaccttatcaaaatagcgaataaatatgaacgtaaaatatattttattcctatgcctgacatcaatagtaaatggcatttaaatctgaagatgattaaggatgaatggttatttgattcatatgtcagactttttttagatgatattttacccgtatcagttgaaagagtattgtacttggatggagatgtactaattactgattctctacaagaattgtggcatattgatttacagggaaagtgtgcagcagcagttacagacagtattggggaaagttactatgaaatgtttaggctttctaaaaacgcacgttattgcaatagcggtgttattttgatggatttaatcagatggcgtaaacaaaaaataggtgataaagttgctgaatatgtacgagagcacaatggttatgtgttttttatggagcaaacagtttttaatgccgtactggattcccaaatatatattttgcacccacgttataatgtattttctttaatgcaatgtatgagttacgatgagcacatgtatctacgtcgaccggaaaggttttatgcaaaaaaatttatacgagaagcagttgaaaagccgtgtttagtacatttaacgacatgtttttttataattaacagagcttggataaaaaataataatcatccttttaaagagatatatttaaaatataaggaaatgactccatgggaaaaagaaccattatcggcggataagcgcaagagtaaaaagaagatagttgatttttttgtgatgcatttaccaagaccattcgtaatttttgttgcttcttttttatatagatatttacgtgtatggaaaataggcagtgctatgaaaaagttccaagtatattgattggcttgttaacctattgtaaacaacttaaaaaagctgacataaaatttaaagatagtgttgagatgagaaaagatgaatataaacattaggaagattatatataaattttcttttattcataatatgtgcataaaacatgttcaaaataaaaatttaaaattttataggaaaatatgtaaaaaaaggaaaggaatagctgaattaaatttaaaaaataagtttaaaaacaagagatgttttattgtaggaaatgggcctagtttaactgtgcaggatttagataggcttgttggtgaagattgttttgcggcaaatttaatttttaaaatttttgataaaacaaaatggcggcccaaattttactgtatacaagacaggtatgccagaataggtgattttttagataagacagatttagaatatatatttgttggaagttatttttggcggactagaaattttaataataaaaatgcatattgttttcatagtaaaagaactgcaaaaaatgaagatataaagtttagttttgatccggaagaatacgtctatgatgcatatactgttacatatactatgcttcagatggcagtttttatgggatataaagaaatctatttgttgggtatagatcataattattcacggattattgagaaaaacggcggagttagagtagcggatacagtaaaaagtcatttttttaaagatgataatccggcagaagtcattgccaatatatatatgatggaaaaaggttattacaaggcaaaatctgtatcagatgaattggggataaaaatttataatgttacacgtggcgggaaattagaaatttttgaaagatatgacttagaggagataatatgaaaaaatttttattaaatgctagtagcggaatcggagatataatgttttttttacccgcggtactggcgttaaaagaaacatatccggattctcaaataggctttttgtttaggggtgatgaaaccactaaagaaacagtttctagtattttaagtattgcacataataagattgatgatcttcaatactataataatagtaattttatacataatttcaaagtgttattacagctaaaattacaaaaatacgaatatggtatgattttaaaatatgatggtcagagtaaatcagtttgggcagctctgatattaaaacttgtaggttgtaaaacaattgcattagatggatatgttaaagaaaatcaatatatcgataatattgttcctgtagcaaaaagagaaaatattcataatgttgacagatgctttgagtgtttgaagtattttggaataaattctgaatataacgaaaatatatattatcgtcggatatttaataaggagaaaattgaaaaaacatatacgcaattgaatttaggattatctaatgaagaatttattgtattatgtgtgggtgctaataaagttagctttaaaataaatggtaaatataaatcaaatgatgttaaaaattggcccatagaaaactggattgtacttgctaattcattgaataaagaaaatattagagttgttttagttggtgggaaaaatgatattaagaaaattatagattgtaaagaaagattagataatagtattttaaatttggtaggaagaatgaatattgcagaaagtattagtattttagagtatgctaaaatggttgttggatgtgatacgggattaatgcactgtgcagcatcactaaataaaagaacactaatgttgctaggtggtataactcctatacaggcacaaggatatggtaaaaatagcgagtctatatatctgcacaagcaatgttcgccatgctttgggactggaaaggatgttttttgtaatgaccccgtttgtatgaaagaaattagcgtagaaaatgtattagaaagaatattaaatatatgttaggcggtgttttatatgatgtatattgagatatattttctaatgcaattgataatattgataacattgattgtgttatatagaaaagattatattgctcctgaagttatttattctgcttctatggttctttcttcgttttcgtatatacagttaaaggattattggggtagagatatatccaaggaaacttttgaagtaatgttggcatcttcatgcatatttatatttattactttggtttcacggttcttttttaaaaagacaagcaataatagtgtaagtgagtataatataaaaatttcaaatatatatttagcaggaagtttttttttggctactataaatattatatatacgataagctttataggtaacgttggaagcgtattagaatataaggaattactttcattcaaacagctagaaaatgtattcatattaaaacaattaaataaaataattttagcatatgtatatattgctatatatatattagtcaataatgtagttttacgacatgaaaaaatagcacaacaaaaaatattgttctgtaatattgtttattgtattatctcagtagttgtcgtttcattgtcaagacaaccatttattgaatatttattatattcaatagtaatttatttttatttaaaaaatggctctgatgtcactggtaattctgttttaactattttcaaagttctattatgttgttttttatgtgttccatttttttattatgttgctgggtatatagggcgggattttgaacggattagcagttatggagcttttttttatgtagggttatatctaagttctggtatcaatttttttaatgtaattattatgcctaatccagcaattacagaatattttggacaatcaagtctttctgcaatatattataattttttaataggaaaggttttgccggacaatgttgttgatatgacataccatgagttttcaactgaatatggaaatacagtaacaatttttggcaggtggtatgaagattggggaactagtggcgtatttataatgatatcattgattgcttgcttttattcatatttttattatagtaatgtaagaaataatagcgataataaattttatggaattttatatgctaagattattttagctctggcatgggctggatatgatgatagaatagctccattgctttccgttaatatattttcaatcttattcttaatgtatctaatgtatatattgattgttataaaaaaaatcaagataaggatgaaagtatgatgatagagataaaaggcaaggatatcgtttggagttatttgggtgcactcttatcaatggctgcaaatatagttatgataccttttttagtttattatttagatgaaaatttattagggctgtggtatgttttctgtagcattggtgccatgacagcattatttgattttggatttgctactacttttgctcgtaatattacgtattgctttagtggagcgaaaaagctttgcaaagaaaatatagacgaatctggtttatcagatattgattggcaattgatgaaaaacatattatatgcatgccagaaaatatatttttttatttccagcatagtaattattttattaatgacatgtggaactatgtatatacaatatatttcaaccgatgttaatggctataaccattattttgcatgggttatttatgtatttgctattttcttaaatttatattacgggtattatgcagcttttttacgtggggtaggggcgattgttgatgtaaataaaaatattgtttattcaaggatactacaacttctagctactgtggtgctactatattacggatatggacttataagtgcttgtattggatatttagtttatggatttacatttagatatttaggtagaataaaattttatcgttatcaaggaatagggaaaaaattatataaatataaaattgagaataaaaaagcttctgaattaattcatattgtatggcataatgcttggaaagatggtgtagtatcttttagtaattacttttctgatcaagcaagtgttattatttgttctctataccttagtttggctgatacgggtatgtattcattgactatccagattgctacttcaataggtttagttgccactattttatacgctgcagaacaaccggaattacaatcggcatatattagcaatgatagaaaacggataatagatatcatgtctacaattatagtgacatttatatttttgtttgtgactcttctaattcttgtcatttttgtcggaataccagttttaaatattataaaaccagatatcaatatttctataagactattgctttttttatctttatatcaatttatattaaagttcagaaattgttatacgtcatatttttcctgtacaaacaggattccgtattacaggagtttcataatatcttctattttaacaataattttaggagttgcattaacaggatattttaattatggtgtttatggccttgtaattgcacagttatttagtcaaatcgtttttaatatgtggtattggcagtataaagtacatttagaattaagaatcagtttttggtgtttttttaaaaatggcgtagcaatcttagtgaattctttaggtaaaattatttgtataaaaccccaataatgcaattaaaattatttaatagcgaagttatgattaaatatactaaacttaaaaatttatgttattccagcctctgctggacgttgccatttgcgtggaaagtgtcagttattaaaagttcggagttagtaattttaggaggcgtacataggatgaataagtttttaatggcgggtatagttgccgcaatggcagcagctaccagtgtggcaacagcgtcgccgctggtaacggcaaatgtgccgctggacagcagatattacagatatatcgacaaactggaaggaatgggttatatcaaagacatgccgacaggcaccagaccttacagccgtctggatatggcaaaatggatcatggaagcacagcataaagcacagacgaaaccaatgccaggctatctgaaaacttattatgaagaaatgcgcgccgatctggcagaagaaattgcttatttacagggtgcaaatacagactatggcagcaacatcaagctgcgtgctgtcgaagccaggctggcttatggcgatatgcggcaggattcctatcgctaccgtaagggtatcaatgcttcctggcagccgctgaaccgcaataacaacggctataggtatggcgacggcattaatattatcggcgcagcagagatcttcggcagtttgaataaagatctggctctgagcctgacgccaaggttcagctatgataaagatcagcatggtgacgccagtattgaagaaggctatgtaaaaacacatctgggcgtctgggggatagaacttggcaagcaggctgtgcagtgggggaaagctccctttgctatgagtaacaatgcaacgccgcagacgatgctcaagctgaatctactggaaccgcacacctttgataacgggtttttaaaatttctgggtaaagctaatgtcaacgttttttacagccgtttggaaggtaatcgggcagacaaagcgcatactgccgggatagcaaactggcagcgtgaaaaggatcatgccgggctgctgggagtaagggttgatatagtgccgacagataacttgtctttaggtcttgaacgtgtatccatgttcaagtctttaaataagcattggatactgggtgataatgccgagagtgacgaccagtggaacgatattggcggtatagacctgcgttaccgttttcctggtgtccagctttacggctctttgtatggcgaagatcaggccggcgggttccccagtgagcatgcccgcagtgtcggtgtgtatttcccgcagctgtttggcggtgacggttgctgggatatgcgtctggagctgagtgatactaataattggtggtatggacactggtatcttgttaatggctggacctataaagacgatattctgggtgatgccatgggtaaaaataccaggaaatattatggcagtatcagccattatctggctaacggcgacaggatcggtttggaatataccagtatggatatggaccgtgctgctgccagtaatccgcgtgtacatgaagtgcagctgacctatgcgaaaaagctgaataagtctttgtatctggatagcgtacttggatatgccaaaatcaaaaatgcggattataccagtggacgcagtgacagcagcaaactggtagctgtaggcttgcgctgggaatattgatagagttacagagcaacggtcagtaagtaaaagcagtattttgtaaaaataaagataggaagattttagaatgtatatcaaacgccatttggagacgacaattgaaaaactgagcggttgttgtaaggtacttctggttactgggccgcgtcaggtaggaaagacgactttgctgcgcaggctggcagaaggcaacaggacttatgtgacgatggacgatatcaacgtacgcagcttggcaatgacggaaccggggctgtttctgcagcggtataaaccgccgctcttgatcgatgagatccagatggctccgaagctgctgccgtatattaaaatgtacgtagacgagcatggcaataacggtgacttttggctgacagggtcgcatgcttttgatttgatggagaacgtcacagaaagcctggcaggcaggatcgctatcgttcatctgcttgggttcagccatgccgaagtagccggtcttggtgcgggagcttttgtgcctgaagaaaaatttttactgcagcgggcgcaggaagctgagatactgccgatgc

SEQ ID NO: 9988 - DNA, 25492 bp, Unknown
  gut microbiota DNA sequence
ggcggattgttttagcaagaactataaagtaagtatagtttctatgcgtactaatttggatgaaccagataacgaagtctataatggacaagaaatttatcggatagctacaccagagatgctgcttcgttataaggcggtaaaaaatgataataaattgctgttgcaattactgcggatatggcgtacaggtaggatgttattgggaaaagatttaataaaccaagctttggttgacgcttatactcaaggcataaataggattaaagagcctattgacattattataccaacctgtaatcccatggaatcaggcattgccgcacttgactataaagcgaaggttagccaaagggttaaaatactgccagtactatttgatttgtttgcagaacgtgagtttttaaacaggtttaagtggaataaaaaaataaaaaataaccgggccatagaaaaaaagttgtttgaagtaagtgagcatgtattttatgttcataattggagcgagtatttagagcgaaactttaaaaaatatactggtaagtttacggagattgagcatccgctacttgtactaccagaaagattttcaggaatgcagataacaaataaagtacctatagttgtatatacaggcactgttgatatcattaatcgtaatccgaagtgggcggtaacactattggcagaagcagctaaaaaaaataaatttgaagcacatttttattcttttggcaatggtgagcaggtaataacagctgctgcaaaacatagtaactgtatacatgaaatgggacgggtgactactcaggtagcggctaaggcaagatcagaagcagatttgctgttatctttgggaaataaaaatacttcgcagattcccagcaagctatttgaatatatagctacaggtaaacctatcatccacttagctgtcagtaacaacgatccggctataagtttattggcaagctatccgtacgctcttgtgctcgttaatgatagtggtgacgattgcacagttcaattagttgacttcataaagaaatatagtgggaaagagctggattttcctactataagcaaattatttcccgaggccttaccctctaccacatgcaatacattagggggggtacttctgacctttacagggagccttacaagaaattatgtcgagcctgattatttactgcggttgttaagtggttgtagtgattataagctcaagttattcacgacaggcagcgcggtgacaaatatatataaatatcctaaggcttatgtaattctaaatgattggatatcaaaaagtgaattggtgctggagttggagaccgctaatgtattggttaatatagcggaagtaagtggtaggaatgtgtcaagtaagatttttagctatatgttggttggtaaacccattctccatatttactatgctgacgatgatgtcaatttgcagtatttgagaaaatatagtttagcactgtgtattaaagcggatgatatgagattaaatgagaattgtacgatgctggcaaaatggtgtgtgtttgttaagaatcgtaatagtgatattttgaagttaaataaagaatttgaaaaatgcagtgctgcacatattgcaaaagaaattcaatgcaggttctaatttagggatggaggaatggttgcatgaataaagccatattaaaacggaatttgtctttctccgttggcagtaatgctatttctctattagtttctgcattaatgatatttattctgcctaagattatgttgcctgatgattatggcggctggcaattatatttgttctacttttattatacaggcttttttcactttggctggcttgatgggatgtatttgcgttatggtggcagtaactatgaagatttaaataagactctttatggtacacaaattgcctgtcttattggattagaaagtcttttggctatatgtataataattggtacatatatatatataactgagccaaacttaaaatttgttctaacagcagtatcaatcactggtacgctaaatatattaaggtctttttatacttttgttttgcaaatgactaatagaataagcgagtacgctaaaattactgttgttgagcgtattctttttgcatttgccatctgcacttttgctattagcggattaacatattttgaacagttggtttatttggatgttttagtaaaaattattgcattatcatatgcagtgtgggtgtgcagggacttgtttcagggattatgttctgttgcagcagtattttctgaaataaaaagtaatgttcttgtcggagtaaatttgatgtttgccaatattgcttcaatgttgatagttggaatcttaaggttttctgtttccagacagtggagtttggctgtatttggcgaaatttctttaacattggctttatcaagtctgctaatggtattcattaacgctataagcatagtattatttcccgcattaaggactgttgataaagcacgattagcggacctttatatgaagggccgaaacttgttaatgccaattttgctggcaggacttattttatatttccctctcagcgtagttttaaaaatgtggttgccaaaatatgttgatagtatttcttggatggctattttatttccggcctgtgtttatgaatgtaagatgcaaatgcttatcaatacctatttaaaatgtcttagacaggaaagactaatgctaaatgttaatttagcggcagtgtttgcaagtgctgtcttggcgttgattacagcttattggttgcataatctgacattgatagtacttgcaatggttactgtttttgcgattagaagcagcgtagctgagtattgtttgagtaaaatattgaaggttgatgttggaaaagatttattggttgagtcacttatggttgtattatttattgtctgcagctgggcaattggtgatgcactaggtgctttgctatatagttttataggagggacgtattgttggctaaacagggatcgtattaaacatgcctatgaatgtattgtatgtaaatcaaataaaaaaacatatgaaaggggatacattaaagaactatgaaaaaagttggaattgcaacctatattaaagggcataattatggttccgtactgcaggcactggcattacaagattttattgatgagcggggttatgatgcttggataattgattttttggatatgcatctgatgcataacaaatttatgagactgctggttttggcaaagagcagtacttgctttttgaaaaatccgggtttgtttatcaagtttataaaggaacgaaaattatcaactaaaaaaataggtgaaactccaaattttataaatggtatttttaaaaattttcataaaaacaacttaaagtacgatagtagtaattattttgtaaatcgtaattttgctgcatttgtttgtggcagtgaccaggtctggaaattaacagtgcctggactccatgcttttttctttttacaatttgcacctccacaaaaaagagttgcgtatgcgcccagtttcggttgtgattatttaccaaaatataataaagccagattatcttcatatttgcaatctttcgcatatatttctgtgagggaaaaatcaggtcaagagttactaaaaagggagttaggacttgatattccacaagtacttgatcctgttttaatggtaggtaaaaattattggcaaaataaaataagaaaaatagaacctttgatccaaggcaaatatatcctatgttattttttgaataatagtacctgtggggaagcagtagcaatcaaacttagcaaaaaaacaggctatagaattgtctgcattgttactggtaacaaaagtactagtattggagataattgttatcctacaccattagagtttgtaaaacttattgatgaggcggaatatgttgttactgattcttttcacggagtggccttttcaatcttgatgaatactaatttttatgttgttaaacgcgaatacatggttgaagacggccagcaaacacgtatagattcgattttaaatattgtaggactggaagaaacattagtcaaaagtagttttgattttcataaagacattatttgttttaaaaaaattaatcttattttagaaaaagagcaagaaatatccagaaaatatttaataaatgcattgagagatgttattgaaaggggggataaatagatggataatatttgtaatgaagacatttgtacaggttgtggtgcatgtaaagcaatatgccctactaatagtataatacttaaggctaacgaagaaggctttattatgccagtgattaatgacatgagttgtattaactgtggtaaatgcaaagagatgtgtccgagtaataattctttgaacagaaacaaagctgtatttaaagtttatgcggcgcaaaatatggacacaaatgttttgaagaatagtacttccggcggtgcgtttgctgctttagcaattccgatattacaaagtgaaggggttgtttttggagcgacgatggatactagatttaacgttaaacatataaaggttagcaatgaaaaagaattgcaattattacatggatcgaagtatgtgcaaagcaatacagctaatacttataaagaggctgaaaaagagttgaaagcaggaaagaaagtgttatatgtaggaacgccttgtcaaattgctggattgtatgctgttcttggtaattcccattatgataacttaattactgctgatttggtgtgtcatggggttgcgccacaggctttattcagaaagtatttggatgagcttgggaaaaaagaaaattcaccggtagttaactttcaattcagaaataaagaacaattaagtgaacagtataacagcaaaatctcttttctcaacagcaaaatctcttttctcaacagcaaaatctcttatgttgattgtatagataatgactatcttagctgttatatgcaacttgctatatatcgggaaagttgttataaatgcaagtatgctaatattccaagagtagcggattttactataggagattacatcggtgttgattctaaagtagtaaataaaaatattaaacaaaaaggcatatcggttttgttggtcaataatgaaacggctttgaaatattttgaggagattaagcgttatttgaaattatgggaacgacctttggaagaagcaacgagtacaaatttgtgcttaatacagccttctaaaaggccggaaataagagattttatttttgcggataaagagttaagcgttcacgaacttcgtagtaagtattgcaaagtcaagctgagacataaggttgctacgtatttaggatatgacaggactttaaaggttataaaattggtgcaaaatgctaagaatttttttgtaaagcggtagaattaatataataagttgtttgaaaaaataatttgctaaatatctatttggaagtttgttggagttggaaaaagtaatgaattttaagggggatatggttcatgtgcggtattgttgggtatattggttgcaggcaggcggcatcggtgttgctggatggattgtcaaggcttgaatatcgtggttacgacagcgcaggcatggctgtgcgcagcggtggcagtgatgtagtcgttgtcaaagctaaaggaaggctaaaggctttgtcagataaaacagatgcaggccggatgcttgagggcacatgcggtattggacatactcgctgggctacccatggtgagcccagcgagctgaatgctcacccacatatttcagatgattgcgccgtagttggcgtccataatggtattatcgaaaactatcaggaactgaaagagaaactgcttaaaaagggctatgcttttaattctcagacagacaccgaggtggcagttaagcttgtagattattactataaaaaagatgccgcagcggaccctgtaaaagcgttaagccgcgctatggtacggattcgcggcagttatgccctggccttgatgttcaaagattatccggaagagatttttgcggcccgtaaggacagcccgatgatcataggagtagaaaaaggtgaaacctatattgcaagtgacgtaccggcaattttaaaatatacccgcaatgtttactatatcggcaacatggaaattgccagactgcagcagggcacagcaaccttttataatctggataaagaagaaatagataaggaattggtagaaatcacatggaatgccgaagccgccgaaaaggctggctttgaacattttatgatgaaagagatccatgaacagcctaaagctgtgcgtgatacactgaactctgtattgaaagacggactacttgatttatctagtgtgggtcttactgaaagcgagattggccgtatcagccagatttatatcgttgcctgcggcagcgcctatcacgcaggggtagtaggacaatatgttatagaaaagctggctcgggtttcggtacgtgtagaactggccagtgaattcagataccgtgacccgatcttggacccggatggacttgtgatcgtgatcagtcagtccggcgaaacggccgatacgttggcagcattaagggaagcaaagcagcgtggtataaaaacactggcgatagttaacgttgtagggtcaagcatcgcccgcgaggctgataaaatattttatactctggcgggaccggaaattgcagttgctactaccaaagcatacagtgcgcagctgattgcctgttatgcaattgcagttgaatttggacggtgcagacaaacggtaagtgatgttgactataagcgttatctggaagagcttgccgtgctgccgactaagatcaataagattattgaagataaagagcggttacagtggtttgctgccaaacatgccaatgccaaagatatttttttcattggtcgcgggatagattatgccgtttgcctggaaggcagtttgaagctgaaagaaataagctatatccattctgaagcttatgcggccggagagcttaaacacggtacgatcagccttattgaagacgggactctggtagtaagcgtgctgacgcagccggagctgtatgaaaagaccttatctaatctggtagaggtaaaaagcagaggtgcttattgcatggggcttacgaccgtcggtaattataaaattgaagatacagcagaatttgtgacttatattccgcagattgagccatgctttgcggccagcctggctgtagtgcctttgcagcttttaagttattatatatcattggctagaggccttgatgtagataaaccaagaaatctggctaaatcggtaacagtagaatagtaaaaaagaaataaaacaaggagcgtgcagacgatgaataagtttttaatggcaggtatagttgccacaatggcagcagctaccagtatggcaacagcgtcgccgctggtaacggcaaatgtgccgctggacagcagatattacagctatatcgacaagctggaaggaatgggttatatcaaagacatgccgacaggcaccagaccttacagccgtctggatatggcaaaatggatcatggaagcacagcagaaagcacagacgaaaccaatgccaggctatctgaaaacttattatgaagaaatgcgcgccgatctggcagaagaaattgcttatttacagggtacaaatacagactatggcagcaacatcaagctgcgtgctgtcgaagccaggctggcttacggcgatatgcggcagaattcctatcgctaccgtaaggggatcaatgcttcctggcagccgctgaaccgcaataacaacggctacaggtatggcgacggcattaatattatcggcgcagcagagatctccggcagtttgaataaagatctggcgctgagcctgacgccaaggttcagctatgataaagaccagcatggtgacgccagtattgaagaaggttacgtaaaaacacatctgggcgtctgggggatagaacttggcaagcaggctgtgcagtgggggaaagctccctttgccatgagtaacaatgccacgccgcagacgatgctcaagttgaatctgctggaaccgcacacctttgataatggatttttaaaatttctgggcaaagctaatgtcaacgttttttacagccgtttggaaggtaaccgggcagataaagcgcatactgccgggatagcaaactggcagcgtgaaaaggatcatgccggactgctgggagtaagggttgatatagtgccgacagataacctgtctttaggacttgaacgtgtatccatgttcaagtcattaaataagcattggatactgggtgataatgccgagagtgacgaccagtggaacgatattggcggcatcgatctgcgttaccgtttccctggtgtccagctttatggctctttgtatggcgaagatcaggccggcgggttccccagtgagcatgcccgcagtgttggtgtgtatttcccgcagctgtttggcggtgacggcagctgggatctgcgtctggaactgagcgatactaatagcgcttggtacagccactggactttagttaatggctggacttataaagacgatattctgggtgacgccatgggtaaaaataccaggaaatattatggcagtatcaaccattatctggctaacggcgaccggatcgggttggaatataccggtatggatatggaccgtgccgctgccagaaatccgcgtgtgcatgaagtgcagctgacctatgcgaaaaagctgaataagtctttgtatctggacggcgtacttggatatgccaaaatcaaaaatgcggattataccagtggaggcagtgacagcagcaaacttgctgttgtaggcctgcgctgggaatattgatagatttacaggtgaaaataatgaccggtaaaaaatatgatgtggaaaatttaggacacactgtaaaaatgctgagaataaacaggaaaataagtcagattttattggcagaaaaattgggaatatctcagacatatctgagtaatttagaacatggcagagggatattcagtttaaaaatgctagtgacaattgcagaaatattcgatattagtatggacgaactgctgtcagggaaggttaatgaagatcacaatgcagaagctacttattctttgcacgaattgaaagtacttttagaactgctgcataaaaatggtaaattttaaacagtataaaagtatatggaagcttattaaacgtttactttcctaaatttgtaataaaaggaagaaattacgatgtatatcaaacgccatttggagacgacaattgaaaaactgagcggttgttgtaaggtacttctggttactgggccgcgtcaggtaggaaagacgactttgctgcgcaggctggcagaaggcaacaggacttatgtgacgatggacgatatcaacgtacgcagcttggcaatgacggaaccggggctgtttctgcagcggtataaaccgccgctcttgatcgatgagatccagatggcgccgaagctgctgccgtacattaaaatgtacgtagacgggcatggcaataacggtgacttttggctgacagggtcgcatgcttttgatttgatggaaaacgtcacagaaagcctggcaggcaggatcgctatcgttcatctgctagggttcagtcatgccgaagtagccggtcttggtgcgggagcttttgtgcctgaagaaaaatttttactgcagcgggcgcaggaagctgagatactgccgatgcgtgatttgtttgggcagatttggcgcggcagtatgccggcgctgaacaatgcctcagagcaggactggaacaactattactcttcctatgtgcagacctttctgcagcgtgacgtcagggcgctgacccaggtcaatgatgaactgcaattttaccggtttttatgtgcggcagccagctataccggcagtatgatcaactatgcggcgctggccaaggaagcggagatcactgcgccaacggcgaagcagtggctgaaggtactggcagcggcggggctggtatatttactggagccgttcatgcatccgaatttaaaatatggtgtgaaagcgccgaaggtatattttaccgataccggcctggctgcttatctgctgcgctggagtaatgccgagatcttggaagcaggggcaatgtcgtcgagctttttggaaacctgggcggtgatggagatctacaagagcttcagtaattgcggacagataccgccgcttggttattaccgtgactttaacagccgggaggtagagcttgtgctgaatgttgatggcagcatacatcctttggcgatccgcaaaagctccagcccggtgaaagaaacgaagaagtttgatatcctgcggccggtggcagagggagaacgggccttgaaattaggtgcaggcggcgtgatctgtttcgccaatgatttgctgccgatagatgccagaaactggtatataccggccgggctgttgtaaaattatcaataagtattttaaggaataacctttgctgattttgaatgtgagattcaaggcagtaagggttattttatatttagctgaaagtaaacggtttttattgccggggaaataaatatgtttgaagttaagacgaactgccttttgtctttgccttaggtgtagtataatgaaaacatcttttaaagaaaatgaggcagaaaatgcattataatgaaataaaacagggttactttattgcacgacccaatcgttttattgctcatatcgagctggacgggcaggtagaggtttgccacgtgaagaatacagggcgctgtcgtgagcttctgacgccgagagcggtggtttacgtggagtgtcatcatgaccccaggcgtaagacaaaatattcgttgatcgctgtcagaaagggcagcatgctggtcaatatggattcgcaggcgccgaataaggtggtgggcgaatggctggcgtcaggcgaactgctgccgggtcttacgctgctgaagcctgaatgcaggtatggtgcttcgcgctttgatttttatgcagaaacgcagcagcagcgaatgtttattgaggtgaaaggcgtgacgttggaggaaaatggcgtggcaatgtttcccgacgcgccgacagagcgcggcattaagcatttagatgagctggcgcaggcggtgcgggatggttatgccgccacggtgatttttgtgatccagatgcgcggagtgaccagttttacaccgaatcgccgcacacatgcggcttttgccgaagcgctgcagcgggcacagcaggctggcgtacaagtgctggcttatgattgtgacgtaacgccggatggccttagtttgggaaagcagattccctgctgtttttaaattgggagatatgctataataaaaaatcctagcgctgtgcctgcttcaagagctgggggcagcataatggcagtacagctgaaaaagaacggagcagattatgagagcttatactaaattttatattacgccaaagggcgaaagagccgcccgcagcggccatccatgggtctatgctgaagaaatcaccaggatcgaaggcgaataccaaaacggtgatctggtcgatgtggtaacaaacaagggcaaatatctgggcaccgggtttgtcaatgaccattccaagatcagggtgcgcctgatttcgaccaataccaatgataaatttgacgctgatttctgggaacggcggttgcgttatgcgatcgattatcgtcgtactgtaatgccaggagccgattttaaatgctgccgcctgatttttggtgaggccgatcattttccaggtctgacagtagaccggttcaatgacattttggttgcacagactttatcactgggaatagaagtgcggaaagagttgatttttaacctgttgtacaagattctacgtgagcagggtgaggaaatcaggggcttgtatgaacgcaacgatgtgaagatccgcctgctggaaggcatggaggaaaacaagggctggtttgcgtttgcagaggctgcagaaccaggggagccgttgacggaaatcgttgaaaacggaatcaggtataatgtagatgtagagaacggtcagaaaacaggcttcttcttagatcagaagtataatcgtcaggctattgctaagatcgcccgtggtaagcatgtactggactgttttacccatacgggtgcgtttgccctgaatgcggcggcaggaggcgctgctgctgtaacagctgtagatatttcggccgaggcagtgcagatgacggacgccaacgcctccaaaaacggcttggataaagtcgttaaaggcttgaaggccaatgtttttgatctgctgtcagagctggtcaataataagtcccgggaatatgattttattattttagacccgccggcgtttacaaagtcgggcagtacggtcaaaaatgccatccgcggctataaagagatcaatttaaaggctatgaagctgctgccgcgcggcggttatctggcgacttgttcctgctcgcattttatgaaggaagagctgtttgtgcagatgctgcatgatgcggctgcagacgccaatgtacagctgcggcagatcgaggcgcgccagcagtcgcctgaccatccgattttatggaatgtcccggagacgtattatttgaaattttatattttccaggtagtttaagttgtgatttggaggcaagataatgcagctgcagcagttattggaagctatgatcgcttatatgggcggcgacgcccggcggatccagcactttattaaggtacatgccctggcgcagttgatcggacgtcaggagcagctgaacgaaaggacgcagtttattttagaagctgcggcgctgactcacgatatcggtatcaaaaatggcgaggcgaagttcggcgccggtaaatgcagcggtaaaacgcaggagctggagggaccgccggcagcggaagaactgctggcaaagttaggttttgctcctgacgtctgcgagcgggtatgctatttgattgggcatcatcatacttataccaatatcgatggtatggattatcagattttagtggaagctgattttttggtgaatttttatgaagatggcatgagtaaggaggctatccagactgcctgcgggcgaatttttaaaacggcgtctggtatcaggctgtgccgccagatgtttggaatttgaatgatgtataaaaagcacttgccgtaatgaagcaggcaagtgctttttctgttataaataatcgtgggagcctgcgcctgcaggagccgaaaatggaacagacccttatggcagcggcttatgccgactgaccgtaagggtctgttcactatgttaaggagaggggaacgcttatttaactgccgtcagatatttgtcaatggcggctgcggctccgcgtccctcggcaatggcccagactaccaggctttggccgcggcgggcgtcgccagccgcaaaaataccggggatcgaggtcatataatcattatcattggccgcaatagtattggcctctgatctggcaaatttaaattcgtcaaataactgtgtttcagtgccgataaaacccattgccagaagcaccagctgagctgcaactatttgttctgttccggcgatctcgacaggaattaaacgcccggcttccttctgccagtcgatctggcagagccgcagtttatcgactttcccatttttgccgataaattccttgctcatgatacagtagtcgcgcggatcctggtggtacagctcgaaggcttcttcctgcccgtaatcagttttgaaaacacggggcatttccggccaggggttatctgcagtacgggaatggggcaggcagggcatgatctcgatctgttttacgcttctgcagccctgacgaatggctgtcgctacacagtcggtgccggtatcgccgccgccgatgacgataacgtctttccccttggcggaaacagcttttttatcctgcaggctgctgtctaaaaagcttttagtgacgctgtgcagataatccttggcaaagtggatgccctgcagctcgcggccggggatggtcagatcacgcggtacggtactgccggtacaaagggcgatcgcatcgaactgtttcagcagtgtttccgaagaaattttgtggccgatctcactgttcagttcaaaggtgaccccggcctcttccagaagcttgatgcgtcgttctaccagatgcttgtccagcttcatattgggtataccatacatcaaaagcccgccggcgcggtcggcacgttcataaacggtaacgctgtggcctgccttgttaagctggtcagcacaggccaggccggccgggccgctgccgataacggcaactttttggccgctgcggtgagtcggcttgttgggtttgacatagccttctgcaaatgctgtttcaatgatatattgttcaagattgcggatactgaccgcactgcctgccaggctggcactgcaggctccttcacagggagccggacagacgtgcgaggtgaattccgggaaattattagttttattcaggcgcgcataggcgaaatgatccagcccctgataaacaaagtcgttaaattccggcatcagattatgcagcggacagcctgataaggctttgcccagcattacgccgctgtggcagaagggaatactgcagtccatgcagcgcgcagcctgtttttgcagttcttctttgtgaggcagactgctggttttgatttcttcccagtctttgatgcgctcctgaggcgggcgcagcgcaagttcctgccgtttgtaatccataaatccggtcggtttacccattatgcctgcacctcctcaaatactttgatcgtcgcttcctgctcgctcataccgctttgcaggtattgggctactttttcggtaacgcgcttataatctttgggaatgaccttgacaaattttttgacgtaactgtcccagtctgccagaatccggcgggcaatactgctgccggtatattctgcgtgtttcaggatcattttctgcagctgcatggtgtcattgatttccttcaactgttccagcagtacgatttctttgttacagtagcccgaaaaggtaccgtcttcatctaaaacataggcaataccgccgctcatgccggcagcaaagttccgtccggtcttacccagaataacgacggtgccgccggtcatatattcgcagccgtggtcgccgacaccttcgataacggcattgacgccgctgttgcgaatgcagaaacgttcaccggcaataccggaaatataggcttcaccgctggtggcgccgtagaaggcaacgttgccgataatgatgttttcgtgaggattgaaaggcgcttctgcaaagggatggatgatgattttaccgccggaaagacccttgccgacgtggtcgttggcatcgccttcgagacgcagggtgataccgggcggtaaaaaggctccaaagctttgtccggccgagcctttgaagtgcagtctgatcgtatcttccggcaggccatccaaaccgtaaaggcgagtgatctcactgccgaggatggtaccgacgacacggtcggtatttttgataggcagcgtgatatcgacctgttttttgccggcgacagcggttttgcagattgccagcagctcgcggcagtccagcgatttttccagctggtggttttgttcggtggtgcagacctggctggtgcccggttctacctccggtttataaagcagcggcgctaagttaagatttttatttttccagttacgctccggtttagccagcagtacttccgtacgtcccaccatttcgtcgatactgcggaagcccagttcggccatatattcgcgaacctcctgggcaatgaagtgcataaagttgacgacatactccggtttacccttaaagttacggcgcagcttcgggtcctgggtagcgacgcccataggacaggtattcagattgcagacgcgcatcataacgcagcccaaagcgatcagcggcgcagtggcaaagccgaactcttcggcacccagcaaggcggcgatgatcacgtcgcgtccggtcatcagcttaccgtcggtttccagagtcacacggttgcgcaggttgttgagcagcagcgtctgatgggtctccatcagtcccagctcccagggcagtccggcgtggttgatactggtgcggggggaagcacctgtaccgccgtcgtagccggagatcagcactacatcggcacaggctttaacgacgcctgcggcaatggtgccgacgccaacctcagaaaccagcttgacgctgattttggcacgtgggttggcgtttttcaaatcgtgtatcagttcggctaaatcttcgatcgaataaatatcgtgatggggcggcggtgagataaggccgataccggcagtagtcccgcggcattcggcgatccagggatagactttacctccgggcagctgaccgccttcacctggtttggcaccctgggcgatcttgatctggatctcatccgcgttgaccagataattgctggtaacgccaaagcggcctgaggccacctgtttgatagaactgcgcttactatcgccgtcaggctggggacggaagcgggaaggatgttcgccgccctcgcccgtattggacttaccgccgatacggttcatagcgatcgccagacattcgtgcgcttcctggctgagtgagccgtagctcattgcgccggttttaaaacgtttacagatgctgtctacagattctacctgttcgataggtatcggcagccgctgcggagtgaaggtcagcatactgcgcaggttctgattggcaaaagcactgctgttcagttcgctggaaaagcgtttgaacatagtgtaatcgttttcgcggcaggcctgctgcagtgcaaaaacagtctgcggattgaacatatgccgttcaccgccgctgcgccattggtaaacactgccggattcatagctgcacagatcagacgcatcagctttgaaggccggcagatgacgcagctctacttctttggcgatctcgtccaggccgatcccttccagtcgggaaggtgtgccggtgaaatatttttcgatcacacagctgctgatgccgatagcttcaaaaatctgggcgccgcgataagactgcactgtagaaatacccattttggaaaggatcttggcgataccgtgggtgcaggcgtcgatatagtttgcggtggcctgctctactgtaacgccggtgatcataccgttagagcacatttcttcgatcgtttcaaacgccaggtagggattgatgccgctgacgccatagccaagcagcagtgcaaaatgatgcacttcgcgcggttcggccgattcgataataatggaagctttgagccggctgccgcttttgatcagatgatgatgcaggcaggcgccggccaaaagggcaggaatagccgccatttcttcgttcatttcacggtcagataaaatcagaatacatttatcctgtgcgatcatagcgtcagcctgtgcacacagactgtcaagtgcgtgtttgagccctgtgccgccggcggctaccgggtaaagcatcggcagtgtcgccgcctggaatttaggctgctggatatttttgagcttggccagctcgatattgctcaaaacaggcgattcggctgaaatttgccggcagctgtcaggctgcgggtcgatcaggtttttctccggaccgatgccgctggtcgtatcagtaaacacttcctcgcgaatagcgtctataggaggattggtgacctgggcgaaaagctgcttgaaatagttgtataaaagctgcggttcttcggataaaacggccagtggagcgtcgttgcccatcgctcccagcggatctattcctttagtagccattggtttcagaaacttggtcaggtcttccagcgtatagccaaaagccagttgccgtcgcagcagggttttgggatcgggcttcggcagctcggtagtgagcttgatcgcattcaatttaataaggttttcgtccagccatttgcgatagggctgttcggtagctattttatgtttgatctcgtcgttaccgatgatgcggcctgctacagtatcgatgaccagcatcctgcccggccgcagacggtcttttttgacaatggtcgccggatccagatcgacgacgccgacctcggaggccagaacgatcgtatcatcctgagtaatgtaatagcgggaaggccgcagaccgttgcggtccagagcggcgcagatagtgcgtccgtcggtaaaggccatggcggcaggtccgtcccatgcttcgatcagagaattatggtattcaaaaaaagctttcagatccggatcgatatggggatttttgccccacggttcgggaatcatcatcattacagcatgcggcaggctgcgtcccgacatgacaagaaattccagacagttatcgaacattcccgaatcagagccggtttcgtcgatgataggcatgatatctttgatcttgctgccccagaggctgttgccgcacatcgtttggcgggcgcgcatccagttgatgttgccgcgcagggtattgatctcgccgttatgcatcagataacggtaaggatgggcgcgttcccagctgggaaaggtgttggtgctgaaacgggaatggactaaagccattgctgtttccatagaactgtcctgcaggtcagaataaaaagaacccagctgctccgtagtcagcatccctttataaacgatagtccgtgaagacaggctggcgatataaaaatacctgccgccgcgcagcctgccatagcgaatatgattttcggcctgacggcggatgctgtacagctgccgttcaaaggcattatcgtcgatgctcagccggtcgatgatctgcgggctggccttgataaagacctgtgccatgaacggctggctctggcgtgatttttcacccagtaccgccgggtcgaccggtacgttacgccagcctaaaagctcctgtccgtttgcagtaacaagcttttcaaaatgacgctgggtgttttctctctctacagcgtcaggcggcaggaacataaagccaacggcataatggccgggctgcggcagttcgatatcgagcttggcacattctttgaccagaaaggtgtgcggcagctgaagaaggatacccgcgccgtcgccggaattcatatcggcgccttgtccgccgcggtggtccatattgcgcagcaccactaaagcctgccgcaggatcttattggatttacggcctttgatgttggcgacgacacccagaccgcaggcgtcgtgctcgaaccagggatcataaagcccctgcttgggcggtaatgaagtatacatgtgattttcccctctcaaagcaaattatatctatatacaaaactgcaagtttaattataaaatacgcaaaaaagaaatgcaaattgtatacattatattttaaagtctttgacaagcggaataaaatactgtaaaaattaaacaaaaacagcttgcagcaagtcagcaactgtaaaaagacagaatattgaaatgtttgtgaaaaatcagtaagagcggcttttgcactatacaaagtttatttaatagtgtaatattaaatactgtaaggcaatgaatattgcagataggggagatgaagatgagtaaggccgcaaaatttgatgaatttttaagttccaataatatcaactgtttttcaaaggaagaaatcgataacgaaatgcacagcatcgtttatcgtgcccatatggaagtcagcagtcagaatctgccaacgatgatcgtgctggacgacagcatctatacgatgatccaggtgcgcgttgccgctggcgttgtcaatgccggcaaccgcgaaggcgttttgatgcatatcaacgagcttaataaaaaatacaaggtttttaaatactatgaaggcgacaacggggatatctgccttgacagctgcatcactacgactgacgaaggctttgaagcgcctgttatccacacagtgatcgatgttattttaaaacatctggtagaagaataccctgtcctgatgcgtaaagtctggggcaattaatttataatcataaatagcaatgaagctgtgaggccttgggtcccgcagcttttttgtaaggaggagcaaacacagtgaacaagttcggcttgactactgaagaagcgagcaaagcattatccgagcagggcaataatgccctgactcagcccccgcgcgaaaccttttgggataagctgtgggagaattttaaagaccctatcatccggatcctgatcctggcgctgttggtcaacgtagtttttgtttatatggggcacggcgactggatcgaaacgatgggtatttttctggccatcattctggcgacttttgtttctacttattctgagtacagcaatgaaaacgctttccagaaactgcaggaagaagccagccgtatccgctgcaaggtttggcgtgacggcgagccggttgagctgcatatcgatgatatcgtcgtcggtgatgcggtaattctggaggccggcgataaagttccggtcgacggtatcttactggacggtgatgtgaagcttgaccaggcggccctgaacggcgaaagcaaggaagcccataagctgatcgctccgcccgattttacctggggcgatggtactatcgattttctggacgagcataagctgttccgcggcagcgtcgttgtcgaaggtcagggcatcatgcaggccgttaagatcggcgacagctctatctacggtcagctgacccaggagctgaaggatgatgaacgtgacagcccgctgaaattaaagcttaagggactggcgcatcatatcagccagtttggttatgccggcggtgtgctgatcgctttggcagtcatgctgcataaagcctatctgtacggcgatttcggcgcttattttgctaatacgccgcttttgctgtctgatctggtgcaggcagttatcctgggtatcatcattatcgttatggcggtgccggaagggctgccgctgatgatcgcgatcgtttcgtcgctgaatatgaaaaaaatgctgcgcgataacgtacttgtgcggaagctggtcggtatcgaaactgcgggcagtttgaacctgctttttaccgataagacaggcacgatcacaaagggcaagctggaagtcgtacggttcattaccggcgaccgtcaggaataccctgcgtttgacgtactgcctgcaaagctgaaggcctttacttaccaaaacgttgtgctcaatacctcggcagccgtttctgacggcgctatggtcggcggcaatatgactgagcgggcgctcagcaactatgtaggcagctaccgtatggaagaaatgctgcaccgtgataaattcattcctttcaacagcgccaataaatattcttgggcggcagtcagtggtaacagcgagcgttactgcctggctaaaggcgctccggaaaagctgattttgcaaaccagccactactgggatgcggaaggcaaccgccagccgctgaccgaagaaatgaaaaaaacactggatgacagaatgctggaactggcagcagatgcgatcaggatgctggcactctgcacctatgaaagcgatatcgaaggcgatgagctgccggcagacggactgacgctggttggtattctgggtattcgcgacgaagtccgtcccgaagcgatcgaagcgattgctgaagttcaggatgcaggcgtacagatcgttatgatcaccggtgaccgccgcgaaaccgcggtagcgatcgctaaagacgcaggcctgctgcagcgtccgaacgagttggtctggacctcggctgagcttgcggaaatgagcgacgaacaggtgaaactggagctgcataagctgcgtgtagtagcccgcgccctgccgatggataaatcacggctggtgcgcctggcacaggagatgaacctggtagtaggtatgacaggtgacggcgtcaacgactcgcccgcactcaaaaaagccgatgtaggctttgcgatgggcagcggtaccgaagttgccaaagaagccggtgacatcgtaattcttgacgataatttcctcagtatcaaacaggcgatcttatacggacgtacgatttataattctatctgtaaattcatcgtcttccagctgacgatcaacttctcagccgtagcgataaacttcatagcaccgtttatcggcatcgataaaccgctcaccattacgcagatcctctggatcaacctggtcatggatactctggcggcactggccttcggcggtgagccagcgctggaaaaatacctgcgtgaaaagccaaaagaccgcagcgcaccgatagtcagcaaaaaaatgctgtctaccatcactatgggcggcgtgtatatgacctttatcgcgatcctcttttataagagcagctatgtcgatcatctgttccgcaatgcgcccgaccatatctacacatatacgggcttcttctgcacatatatctttatggcggtagccaacggttttaacgtgcgtgtttccggtcttaacctgctggagcacatcgacaagaacaaaggcttcctgaatgtaatggcgctgatcgtggcgatccaggtgctgctgacctatgtcggcggccgcatcctgcgtacgacaccgctgaacctgcacgaatggagcgtagttgttttgttcggtctgtcgatcatcgttgttgacctgctgcgcaaaagcgtttgccaaatgctggagaaaaaataaaagccaacccctaaaaagagattatagaaaataggagtgatgactgtatggatcctctcgggtctatcaaagaagtatttattgttattgttttgattttaatgaacggcctgctggccatgctggaaatggcgctggtctcggcgcgtaaaagccggctggagcagctggctgatgagggaagcagcaaagctgcgtatattttaaagcttgctcaggaaccgactgagtttttatcaacggtgcagatcggtatcacactggtcggcatcggcaccggcgtatacagcggcgccatgctggcagcgcctttggaaggactgctgcgtgagatcagcgtactgcgtccttatgccggcgtagtgtcgtataccttcgtcgtggcactggtgacctatctcagtttgatcttaggcgagctgataccaaaaaaaatggcgctcaacaacccggaaaaggttgccatgagctttgccggttttatcaaggtcattattaccgcgtttaaaccgctgactgtctttttaagcgtttcgaccaggtttttactgaaggcgctggggcttaagcccagtgacgaacctccggtcacggaagaagaagtgcgcgtactgctggagcagggccggctgcatggcgtatttaacgtcggcgagcagaaaatgatcgaaaacgtttttgaactggatgacctgcgcgtaagcgagatcatgacgccgcggaccaagatcacctggcttgacgtcaacgatccgctttataagcacttggaggtcattgcggaaaaacagtattcctgctatgttgtggccgaagaagatttggaacacgtcctgggagttgtctatacgaaacggtttttagccgatgtcctgggcgctaccggcgcttcgatgcgcagctcggtgcagcagccgctgtatgtgcctgaaggtatgtatacccaaaagctgctggatatgttcaaggacactcggatcaaggtggcgctggtcatggatgaattcggcgggctggcaggtatggtgaccctgcgtgatattattgagcatctggtcggcgatctgccttcctatgatgaagaattcaaacaggagatcgtcgaacgtgaagacggcagctggctggtagacggcttactgccgatcagtgaatttaaagacttccttgatctggatgagctgccgctggaagaaaaaactggtttcaatactgtggccggtttcgtcgttaccaatatcgggcatatcccgactgccggcaactacttcctgtggaatggctaccgcttcgaggttgttgatatggacggcacccgcatcgacaaaatactggtcgaaaaactgccggaagcggaagctgcagagacagatgcaaaggaccaataaacagaataataaagccccggccgctggccggggctttaattttatacagacgctgtttttaaaatttaagggatgcggcacggtctaaaaagccgcgcagaatatcgcaggaagcggcaaacttggcttgttcttcgtcagtgagttcgacttctaaaatttcttccacaccgtttttgccgataacgcaggggacgcctgccgccacatcgtgctgaccatattcgccgcgcagcagggtcgagcagggccagacaagcttctgatcgtggaagatcgcgctgataagcattttggccacattggcgataccaaattcggtgcagcctttgccgtcgatttcaatatcaccggcttttttgacctgcgtttgcagatcttccaggctgatttctgccaaaaccggacgttcccggcgcagctgcagaaagggcttgccgccgataaaaatgcgtgaccagacgataaagctggaattaccatgctcacccatacagaagccgtgaatagaacggcggctgtagccggtggccttgctgagtacccgcagcaggcgataggtttccaggctggtgcctgtacagaagcagcgggaaggctgccagtccatctgccggcggatgtattcgcagatgatgtccgcaggattggaaatactgatcatgataccgcgaaaatcgatctgttttaaatgtgaaacaacttcgttggccattttgatcgaatcgtcgaacatatccagccgggtctcaccgggtcgacggctgcggccaaaggccatgaccatgatatcggcatcgtgcagctcttcataggagccggcgcggatactgacatctttgccgcacagcgagccgctgacacagtcatccagatccagcgcctgaccgatagctttttctttcaggatatctatcaggacgatatcgtcggcttcaccggattggatcagtgccagtgcgacatgtgaaccaacgtggccggcaccgacgataacaactttacgggtcttgaacataaatattcctcctctgcgataaatgattacttatagtataacactttttagaaacattgttgaaatgaagaaatttactgatttt

SEQ ID NO: 9989 - DNA, 2732 bp, Unknown
  gut microbiota DNA sequence
accttagtgagtgcttttcttatgtccatttgcagggaatttttataggttcttcctgagggcagcgagccttgcgggtctttcgagccccgaaaaaggtttagatttaaaaatattttttcctatttccttctctttgtagtagacaggtggtgaaaatagaagtggtaaaaatgctgaaacgtggctctgcaagagagcttgccgaattattgggcatcagcgaacgacgtgtaaatcagttggtaaatgaggaagttttgcatcgtgaaatagaaggagacttcgttttgacaatggcaatagcttcgttctatgaaaataaatattctagtaaagatgaagatgattattggtctgaaaaagcattgcatgaagctgcaaaacgtaaattagctgaacttgaattggcaaagcgacaaaatctgtcacatgatgcggcagatgtcgaaagagttatgacagacatgttatctaaattgcggagtcaacttttgggcataccagctaagatggctgctagactggagaatcagagcagaagtgttattatgacggaactttctaaagaaattaagtcaaggttaactgagcttagcgattataatccggagatatttagtaatgaagaagacagttgatcttttcaaaaaaatagtaaaacagtcattgatgccgttatcagatcaaactgtatccgaatgggctgatagctataggatgatatctggcgaagctgctgcagagcctgggcggtggcgaacagatcgtgctccatatcaaaaagccattatggatgcttttactgaaccaggcctaactagggtggttgcaaagaccgcatctcaggttggaaagtccgatatcatgaacaatgttattgggcggttcgcgcatctggcgcccgcaccgataatgatgatccaaccaactatcgaaacatcacaggactatagtaaatcacgtatagcgccgatgatcagagatacaaaagtattgagagatatttttaaagacgtaaaaagccgtgacgccggcaatactatcctttctaaacaattccctggcggcagacttataatggcgggtgctaacagtcctgccggtcttgccagtaagccgataaaaatattactggcagacgaagttgaccgctttccaaaaagcgccggcacagaaggagacccggtcagcttggctgcaaaacgtatgacgaccttttgggatagcgtcatggggctattctcaacaccgaccaatgctggagacagtcgaatcgaagatgaatatataacagggactcaggaagagtggcagcatcaatgcccaaaatgcaaagagtggcatttagtcacgcatcgggatatgcatactgactacgactgttctgttgataaaaagggaacaaggcaggttatcgttaagtcagttatttggcgttgcccagattgcgggtttgggtttacagaaactgaaatgcggcaggccgcacaaaaatatattgcacagaacgcttcggctctcactaagggggtacggagcttttttgttaactgttttgcatcaccttgggtgaactggtcagatgtaatgcaggaatggttggaagcacagggcgatccagagcgtgaaaaagtagttgttaatactcgttttggagaagcatatgagcgcaaaggaaattttgaaagccatgagcagtttatgcgaaggcgtgaaaactatggcgccgagctgccggaaggcgtactgcttttaacagcggccgttgacgtacaagacaacaggctcgagtatgagatttgtggctggggaatggctgaagaatgttggggaataaaaaagggcactattttgggcgtgccggatacacctaaagtgtgggatatgctggacgaacagctggataaggaatatcgctttgcgtcaggtaagggtcttttggtagccaggacgtttatagattccggcgggcactacacgaaagaagtttatgcgtactgtaaaaaacgatttgtaaggcagcgttttgctataaaaggttcatcgacaccaggagtgccgttattgcataagtacgctaaggttaaaaccgtaaggggacatacgataccgctggtaatgttgggcacagatagcggcaaacaatatgttatggatcggttatcgattgaagagcctggacctaaatattttcattttccgcttgataagagtgatagcgtaactgtacagctaactcgtggctacgatgaattttattttaaaggccttatatctgaaacgaaagagcctcgtcggaaaaatggagtattagtatatcagtgggtaaatatagctaaagataaacggaatgagcctttggatctgcgggtttataacctcgcatgtatgttaagcgtaaatcctgatttcgaggctttggaaaaattgatcaacagcccgaatgtaatcaaagaacaatcggtaaagtctaaactgaaaaacaagcctaaaggcggctacggctgccttagaaaaggaatgaggagtgattattagtggcaagtacggtacttaatgaacgattaaagcagtatttatctgcagaacagtctattttggtagcagggcaaagctacagaattggcaatagaacgctgacaagagctgatttatcagaaataagaaaagaaataaatgatcttattgctgcaggagcgactacggatgaggcaatgcatccaagaggg

SEQ ID NO: 9990 - DNA, 14778 bp, Unknown
  gut microbiota DNA sequence
tatttttatcgtacctgtgcagtaatatttacaatctcacttgccagcacctgatctacaacaacaaaaagcctgactctattcccatagagccaggcaaaaaaataacccctctcaacttacgctgagaggggttattttttatcttctatcttacaatcattatctgcttaaatcaaacaaaactttcattaaaatgcgggtacaaccgcgcctttatacttttcttcaatgaatttttttacttccgggctggtcagagctttgtccagtttttgcagttccggacgcttatcgtcgcctttacgtattgctaagatattggcatacggagaatccttcggttcagtaaagagagaatctttgactggattcagctgtgcttccatagcaaaattggaattgataacagacagatcaacatcatccatggaacgcggcagcaaagctgcttctatttccacgatctgcagatttttaggattatcaacaatatcgccaggcgtaccggaaatgcctacaccgtcacgcagcttgagcagcttggcgctttgcagcaatgccagagcacgaccgccgttagtaggatcattcggaatagcaactttggctccgcttggaacattatttaagtcttttaatttttttgaataaacccccattggttcgatatgtaccttggtataggcaaccagaggcagattcctttcggaagcaaatttctcgagatacggagtgtgctggaagaagttggcgtctaattctttatctgccaaagacagattgggtttaacataatcgctgaattcaatgatctgcagatcaacgccttctttagccagctgcggtttgatcagattcaaaatttcagcatgcggtacaggcgttgcgcctactttcagcaccacctttttatcgccgctgttagcggctggtttgctgtcgccgccacagccggcaacgactaatgcgatgctgaacactgccagcaaagccagaaataactttttcataaacaatctctcctttaaaataaatttaacacagtacctatcttagctcggtcggactaacaaaaaagctctttccgaggaaagagcgcttgcttctgctttcctctcatctatcaagaatgttcttgcaggatttagcaccatagctaggcttggttgccgggtttcacagggcctgtccctccaccgctctcgataagagtgtgttattcgattggcattatgatagctcaactaaataagcttgtcaagacttttgcaaaaaataaggaactgcttctgcagttccttaaagatttgttaaatttgttactctttactgtatttggcaatgccaactttataaaaatcgttgccttcgctgtcgatacagacgatagcaggaaaatctttaacttcataacggcgaatagcttcaggccctaaatcttcataggcaatcatttcttcacctttgatagatttggcaataactgctgccgctccgccaatagcagcaaaataaacagcgccatgctccacgcaggcatcaataacttcctgcgagcgcagtcctttaccgatcatcccacgcataccctgttcgatcatcgtcggggtatatttgtccatacgcccactggtcgtcggtccggcactgccaactacttcaccgggtttagtagggcttggacctacgtaataaatcacctgatttcttacgtcgaagggcaattgctctcccttggtcagcgcttctgtcatacgcttatgtgccgcatcacgggcagtatagatgtaaccgctgatacgtactacatcacctgcatgcaggtctttgatcgtagcttcgcttaacggcgcattgatatatttgataatcgcttcactcatctcaggcccctccttacaataccatttctgcacggcgtgcagcatggcagttcagattaacggcaatcggcaggccgccgatatgggtcggtgcatattcaatattaacagctacggcagtagtgctgccgcccagtccggaaggacctacgccagtcatattgacacgtttcagcagttctttttcaagttctgcatactgaggattaggattgtgctcccctaccttacgagtaagagaatactttgccaaaagtgcagctttttccatattaccgccaataccgacacctacggtaacaggcggacagggattagggccggcactgcgcacggtgtcgacaacgaatttgataacgccttcaacgccgtcagccggtttaagcatttttagtgcgcccatgttttcactgccgcagcctttaggcgatacggttatttttacctgttcaccgggcactatcgttgtatgaatgatcgccggcgtattatcaccggtatttttacgtacaaataaaggatcatcaacagaagatttacgcagatagccgccgacataaccatcggcgataccggcgttgaccgcttcataaagatctccgcctacaaaatgtacttcctgtccgatttccataaagacaactgtcaacccggtatcctgacaaatcggtacgtctttggcttttgctagttcggcattctcaacgatagtcgtcaatatttcctgccccaaaggagattcttcggtggcgatagatgcttttaatttttccagcagctcttccggcaggtaatagcaggaatctttacaaagcttactgacagcagcagttatctcctgaacttttatctcgcgcatgatagcctccttatctgccgacacgtttcatagtgttggcacgcacttcttctggatcgactttaatgcgggcaatgcctgtttccatagcaacacgggccactgcggccgcaactgccggcgcaacgcgcggatcaaacgcatccggaacaacataatcggcacgcagatctttctcgtcgatcagttcggaaattgcataaacagcagctactttcatttcttcagtgattgctttagcgcgtacatcaatagcgccacggaacacacccgggaatacagtgacgttgttgacctggttcggactgtcactgcggccggtacctgcaacagcagcaccagcttcgatagcgtcagcataagaagtttccggaaccggattggcaagtgcaaaaactatagctttatctgccatgctggcgatgatttctttcgtaaagacgttaggagcggaaacaccgatcaaaacgtcaacgcctttggcgatatccgccaaagtgccttttttatgttctttattagtgactgtcgccagataagactggatgcggtcaagattagcgtcaatgccttcatacaaagcgccgaaacgatcaaccatggttacattttcagcacccatgctgataagcagacggccgatagcagagcctgctgcgccgcagccgttaacaacaaatttagctgttttcatatcttttttcacgaagcgcaaagcaccgataactgctgccagacaggcaattgcagtaccgtgctgatcatcatggaaaacagggatatcgcagattttcttcaattcacattcgatatcatagcatttaggagaggaaatatcttccaaattgataccggcaaagctgggctgcaggaaacgtacagtttcaataattttagcaggatctttagtatcgatacagataggtacagcatctacatcgccaaaggttttaaatagtgctgccttcccttccattaccggcattgctgcttccggtccgatatctcccagcccaagcacacgggtaccgtcgctgactatagcgaccatattgccgcggcatgtatattcaaaggacaagtctttattttctttgatttctttacatggttcagcaacaccaggggtgtatgccaaggccaaatcttcgcgggttttaatgggaaccttgctcacaacagcaagcttgccatggttttctaagtggagtttcaaagcatcgtcacgtaatgtcatacattattacccccataatttcaatttagtatatactaaatattgtaaatgaattatactgctttttcaagtagcaagcgtcagaattttaagtttttttacaaattaaaagcttgcctgacacggcagcactataatttgtaaagctcagcttccgggcgttctccttctttaacagttaatacagcaaacgtagctcccatttcgctgcgaggtaaaacagggctgccgggattaaccagcagtacatcaccgaaccattttaccaaaggtacgtgcgtatgtccgaaaaccacaatatcagcttccagcttacgtgcccaccaggccagttcggatacctgatacccatgcagataacgatggccatgcgtcagccagatgcgctgcccctccaacgtaataaattcgtctacatttgctttcccttcgccgggatctgtattgccgcatactgccagtaacggcagcttggtttcggcaactaaaaaacgtccatcctgactgtaatctccggtatgaaaccaatattcaacaggcggcacagcatgcagaacctgcctgatggcttgtttgctgccgtgagtatcgccggtaataccgattttcacttcattttcccccaattcgcaacaagttttttaatagctttgccgcgatggctgattttatttttctcctgcatcgtagcttcgcccatccccttatgcagttctgttgaccagaacagaggatcataaccaaagccttccgtccctaacggctcatgcagcagcataccgtcacagatgccgtcgctttccaataaaatttttccgttaggagctgccacggctaatgcacaacggaaacggcaggtacgttttacctgaaatttcatcgtctgcagcagcaatttgttgttttcttcgtccgtagcttcctcgctggcataacgcgcgctgcgcactcctggagccccctccagtgccagtacttctaaccctgaatcatctgcgatacatggcagccctgtttctttggcataataaacagccttcagtcgggcattggccataaaagttttacctgtttcttccggttcaggcacattcggccattcttccaatgaacgtaattccacctccaaatctttcatcaatactttaaattcttcaagtttaccgggattacgtgttgcaataacaatttctttcattatctttctttgctccgtttcctaatctttgaaggcctttgcctgttttaattacaaactttctatttcaccatcagctatgtgctgcactaaaacatactgccatttgccattacgtttttccagctgtgcttcgtcataagcagtttgccggcattcactgcaggtatcgcgtttcaacgaaacgataaacgcgctctgatcgccgaagcgtgttcctgcagccgcagtcctgatcgtaagataaccgctgcattgcctgcaataatgagctgtctcgatctgttcttctctgataccttcttcatcataataaatgcttttcttcctgctccagctgtcaccgcattttgccagcagctcttttctggtattaagccgactgcgccacaattcaccggtttcagcaatcagctgatcgacacgtttattgcagcgctcatcctgctgccgtaaatcgctttggtccggctctaccaccttgccatagtccatatccgccattgccaaaatgatacctgtattaacatagggcagcgcagcctctacagaatagccgccctccagtactgcaatatcagcctgcaatttatcggctaatttggcatatccctgcgctgttacagccattgaagccagaggatcactgaaatgattatcctgacctgctgaattaatgatcagctccggctcaaaatcatcaagaatatgctggatcagaccatcatataatctgtgcagtccctcatcacctgtgccaggcagcagcggcaggttgatatttgtgccccaggctgccggactgccgacttcatcaggaaaacccgtaccgggatacaaggtcctgccgtcctgatgaaaagaaatatataaagtatcaggatcatgataaaaaatatcctgcgaaccatcgccatgatgtacgtcagtatcgacaacagcgatttttttgattccataaacactgcgcagatattccaccatcaccgcttcgatattaacagtgcaaaaaccgcggattccgtgaactacgcgcattgcatgatgcccaggcggcctgactaaagcaaaagcccgctttacttcacctgacattactgcatcagctgcggctaaacaaccgccggcagaagtacgatgcgccggtgtgataaggcgtgcaatggacggcacgccgatatgagcacgctgcaaatcattgatttctgccaaacgggggcggtattctctgatctgcggcaaatcaaaaagcccttcttccagcagttgatcacgcgtatataacaaacgctcctgccgctccgggtgtgtaggcgatatcatccagtcaaaagccggaaaaaatatcaaaccaagcttcggtttcaaaatgccacctccctgccaatgacagtttgcaggataccaggcttcaactgcatcctcagtgaaataatttcaccactgtcgtaatagccgtggatagttctgaaaaactctttgctgatcacttcagcttcctgccccggcagctgccaggctttagcctgctcatgcagccacgctgccaaaagctcttccgccattttcatactgaagctactgggcagccgttcacgctgtccgctctccgggatcagataatacccttccgtagtatcggcccgcagactggcagctaaagtcggccgggccagtgccgctccgactgcattagcaacagttgcgccagccggtatttccacaggcagtcccatccgttctcccacagccataatcaaacctgctgcgccaccgccgacgcctacaagcagctccggctcaaattcagtccctttaataacatcgttgacagtgtaaacaggctgaatactccattcatgcagcatttcgttaatcgtcgcttcaataacagacactgccgcttcgacaacctgcctggcgacctcaaccgctgtctcacccatcaggcacaactgctgcatacccttatgagccgccgccttatcaccaaagccaacgcgcccagctactatcaaagcatctgacaaagtcggttcacagcctcccactgccatcgccggaccaatacgttcaggcccaaccgcaaaaccggtttctgttcgccggatacggctgtcaccgccaatgccaacactgcgcatatggaacgaacgtacagctgtaggatagccggcaactttagctccatgtctggctagcaaaggcagtccattttcccaaaaagcaatatccgtagtcgtcccacctacatccagcgaaatacttttcacctgtggtgcgcccagagcctctatacccaaaacgctggctgccggtcctgtaaaaatagtttccacaggctgtttcagcgctatctctaacggcaaagttcccccgtcagcctttaacacatgtaccggtgcagtaatattgcgttccttcaggctgtcttggacctgacggccaaaatttttaaagattttataaacagcagctgcaaaataagcagaattagtacgccgcacaaaattcaattcgcctgataactccgaaccgagaaaaattttctcataaccgcaatctttcagctctcctgcaagtgcatattcattttcaggattacgtaccgaaaattttccggacacagccgccattttattttttgccttagaccgtaatccctgatgcttctgccagtcaatacgagctgttattttaccgcgatgatcgacatagccgctcacataataaggctctacaggaaaactcttactaacattcattcccggtcctgtcatcacagccaaaaataccggatccgttcggccttctgttaaagcgttagttacgattgtgctggaaatcactacccgttcaatattataaacttcctgctcctgcaaaacctcatccagagcctctaaaataccttgcaatactgcttcatgtgttgttctgcgtttagcctgcgctattattgtacctctccctatcagcacggcatcagtaaacgtcccgccgacgtcaattcccagtagcatctcctcaccccgcttttccgtacactcattaacattttataattccatatccatactgaaaaaacctgccaaaaagaaaaattattccaaaaagaaaaaccgccttccggcggttttagttgaaattttatattatgccagcaaagcctgcagctcatctttatgcaaagtaataatttttttgacagtatagagcgcagttcgtccacggcaatccagaaacagcgcgatatccacatccggcatgccttcgacagcctgcttcaacgtaacgccatgttccggcaccagctcaaattttacgaccatcgtcttttttacaccaggtccaagcagcattgcttcaaaatagtcatcttcacgcggcgcttcttttaaattgacgcgcccgcgcagctgggcatcagcatattgttcctgcggcagatacacacggataaacgcatccaagataatgccttcttctttaccatcgttatgcatcggcagctcaacttcaaactccagcttgtcttcactgcgtttaacaagtctggctttagtacgctgagtaacttcaaaaaacatttcttccttgccctgaagcaaaatatatattccgattacaacaactgccaataaaatcagtgctgcaataacttttaaaatgaaaagcattttttagcctccttagcgtgccctgcgatagttttttataacaacgaccggtgttttctggctgccattaccaaaaggattatcaatcaaaatctgtgccacttcatcagcattaacacccttggaaacccccagaacacaggaacgcttcaaatcattaacatccgctactgccgctccaaaagcacctgtgccgctggtaatatcctcggcaacccgatcgggattatgcgggccgtaaacaatatgcttgtcatatggaggcatcgtgcccgtaacgtcatcgatcaaacgtgcctgttctcctgccatacgataaaatacaccggaaacgcccacgcattttgtcgcaaagccacagataacagcaatcaaaacccgcattccgccttcagcatcgatcaaagcctgcatactatgccagccagagatactgcccttggacggaaataaacggcacaaaacctttgccagcaaacctggcttaaaatcctcactgcgtttagccccgccctgtgtaatagccacaacgctttcagcaacacaaactacatcatcaggtcctatcttatctccgccatattcaacaatggcttctacgatatcgtcgtgatgggtcaggatacgtgtcggaaccggcacgatttcaaattttgtttccatcttctcactccttggctgtttcctgctgaaacagcgcattgattttatcaaaataacaggcatctaaacgaataatctttccctgttggttggtaaataaattacgggtcctgccttcaaccagcaccacgccatcagcaagccgtatcaccttgtaagcaaaatccattttagcccggctgaattcagtcattatcgtctgtacttcaaactcatcatcaaaagtacaggaatttttatatttcacatgcacttctgtaatcggaaaaataacaccgtgtgccattaaatccagtaattcaacacctgcggcacgcagataagccacacgacccatttcaaaccagcgcagataattggcatgatgcaccacgcccatcatatctgtttctacaaaacgcacccggtcacggatagcaatcatttcggctttctcctttacttactttcttcaaacaaaactaatttatattataccactttttaccctcaggcttcaaccaaagtcaaaattctgcttacagcctctttcactaacgatgccagtgacttaggctccacgccaactatttcaaaatgattttggctcacgggcaaaagaacttttttagcagcagcgctgccgaccgcttccgcaatacgtggagtgatctcacccatcatagcattgggtatgatgatgccgatagggccgacgatcaaatctgctgtagacgccgaaatacagatcgcattttctcctgtggctccgcgtctgactcctgctttgagcattgctgccgttgccaaagcattagttcccaacccgataagctcaacctgttccggcagcttgccggtcagttggcttacgacctgtgcggcaagtccgccgcccattccatctatcacagcgatacgcataatcttctcctcacttacgtcttatatttgcttaatattataacaaaatatctctttaatgaaaaattttcataaattttactttgaaacacgaatttcatcagctgaaaacattgaaattattgctttaatagtcgataattataatataagattaaatttttcattattaaggaagtgaacatcatagatactttacaggaactttatgctaaaaagggctttatctgcgatatggacggcgtcatctatcacggaaaccgtttactgcccggagtaaaagaatttgtcgactggctttataaagaagaaaaagaattcctattcctgacgaactccagtgagcgttctcccaaagaattgcagcaaaaattagcgcgaatgggacttgacgttgatgaaagccatttttataccagcgctttggctactgctaaatttctggcaagccagtctccaaaatgcagtgtttatgttattggcgcaccaggacttgtcaatgctctttatgatgccggtatcacgatgaacgatactaatcctgactacgtagttgtcggcgaaacccgcgcttataattatgatatgattttaaaagctgtaagcctcctacaaaaaggtgcacgtttagtagctacaaactctgatctgacgggtcccactgagaccggtatcattcccgcctgccgtgctttggttgctcctatcgaacttgctacaggaaaacaggcgtactttgtaggcaagcccaatcctctgatgatgcgtaccggtctgagaatgcttggcgtccattcagatgaagctgccatgataggcgatcgtatggacacagatatagttgcaggaatggaaagcggcctgactacggtcctggtactttcaggtgttactgaccttgaaaatatgcaggtttttgcttatcgtccccgttatattttaaatggtgttggtgatatcgtccccaaataatatagtaaaagaaaaagctcctgcaaagcaggagctttttttattgattgacacgcttttgaaaattaccaacaacaaaaacattttcttctataattataaaaacttcaggatcggcagccaaaagcagacgccgcagctgcagaaattcacttttggaaactacggtcatcagaatttctctttcttcatttctatatgcaccataagcattccattttgtaacgccacgattgactttttcgaagattatcttttccaatccttgctttttcgtaatgatcagcatcgtcagcattatattctggaaatgtaccttatccagcacataataaacgatacccgtaaacaaaactgaataaattgcctgggaaatactgaaaattaccgcacatgtcccaaaaataaaaatattcagtatcgctgaaaccttaccgacactcaaatttgaatgcttctgcatcagtaaaagtcccaaaatttcttcaccgccgccgctgccgccagaaagcaaagtcatcccggcaccaataccgcagatcacaccgcctgctacacaggccgtcaaatgttcgtcgaccagtaaatgatctgcaatcggcactacagtcaaaaacaagctgtaccagcaaacacagtaaatggttttagcaagaaattccttcccaaaacgtttcacggaaaccgccagcaacggtatattcaaaataaaatataaaataccggcgatattggtattgccaaaactgataccgaaccagctttccatgaaatgtcgtatgagctgggcaatacctaaaaatcccccattatacagaccaacaggcactataaactgattcaaacctacagaataaatcaaagaaccgataacaatcaataacgtcattcgcggcgtcaataacaatctgcagtagctcataaagctttcctccgccaatattatctaatgatttgattatatataaaacgcagaactaagtaaatcccttagaaaaaatttaatatttattttactgcacttcctgcttctttattatattttttatttcatcaacccagtataaaacttgcaagaagcttgccgttatgctataattcgctatggtgcattgtgcaccaaacactatgcgcccgtagctcagtggatagagcatcggcctccggagccgtgtgcggtggttcgattccactcgggcgtaccaatggaaaagacagacgcagacttgttctgcgtcttttttattttgcataaatcataaagaacgaaatataatacttcgtttattctggtcatataaaaccctgctgcaaattacagcagggtttattttcaaacgttatattcatatttttgaatcgaaccgacagaaaaatgcaccaaataatcaggataaccatcgacagggatccaaaaagaaactacgtcacctaatttaccgacttttttacgataactggcttcaccattcttccacgcttcttctgccctgcagcccttgtgctgttctaacggctcaactaaagcacacttgttgccctctatgcgtcctgtactgggtgcgactttattggcagcaataatattacgctttttatcaataagcattgccgactccggataattatcccacatcaaatgaaacgctttaattacctctgccttttccatacctccagctcctttaccttgtctttctctgctttcatattaccacaaaaaaatgacttctgccagaagtcaaaaaatatcccacagtttaagctgcgggatattttttattcactatattcaggttcaccaataatatcaattctttttttccgggaacgcactttttcccaatatgtaaaataagcttttgtttctgccacaactactccactcaatcccagcaaagcaatcagattaggaatcgccattaaaccgttaacgatatcagccaaaacccaaatcgtttccagctttaaaaaagcaccggacgccacaagaccaatgaagactaaacgataaggcatgatacttttcgtgccaaaaaggtattcaatgcagcgttcaccgtaataattccaacccaaaatagtagtaaaagcaaataacactaaacctatcatcaataaatattttgccattgcaggaaaagccattgcaaaagcagattgagtcatagccgcaccattcaaatcgcctgtccaaactccggaaaccaccagaaccaaacctgtcattgtgcaaataatgatcgtatcgataaaagttcccgtcattgataccagcccctgctcagcaggccattttgttttcgccgccgctgctacgatcggagcactgcctaaaccggcttcgttagaaaaaataccgcgcgcaataccactgcgcatcgccagcataacagtagcacccaaaaatccaccagctgccgccgtaggattaaaagcactttcaatgataagagcaaatgctgcaggtacctgatctgcaaatacgatcagtactgccgctgtagtaagcatataaactaaagccataaatggcactatttttcctgctaccatcgcgatagatttcaagccgccgatggttacgattgccaccaaaacagtcagaatagctgccgtatacatgaccgggatccctatggaaagattagtgatctcaacgatagcattgacctgtgtaaaagtaccgctgcctaaacaggcaaccatcactccgaataccgaaaacataactgccagaggtttatattttttaccaagtccctgttcaatataatgcatcggtccgccggaaatattgccgttggcatcaaccgttctgtatttcactgctaaaacaccttcggcatatttagttgccataccgaaaaaagccgccatccacatccagaacaacgctccgggaccacctgccttgattgctgtagcaacacctacgatattacctgtgccaacagtagctgccaacgccgtacacaaggctttaaagctattgatatcgccgttgcctgtatttcttgcagtaaaaatcaatttcaatgcggttggcagctttatgacctgtaataaacctaatcttacagtcagtaaaatacctgtgccaataagcaaaaccattaacggcggtccccacacaaaactattgatagtgtttaaaatatccatcattatcctagctcaacccctcaaataaattaattttatttcgttggtattccacgaaaatattaactaataatatccaacaacgttttctattgtaacacaatcgaaacttttttcaagtattcagacaattgtatacaagtattcttcttatttcacccgcatttgtgtatacagtatgcaattagtattaaaaataaagaacaaaaaagcgc

SEQ ID NO: 9991 - DNA, 34998 bp, Unknown
  gut microbiota DNA sequence
accaatatacaaagcatctgagttacatcttaaaagcttcacttcaatctaaattttaaataacctgttttttcagtactttcagaatatccaataattcttctgcggtatatttgtcttctacctcttgaggtttaacctcagtattcaaagttaagcctaaaagtgcatcaacgccacagctgaaataatgtgaaagtcttaacaaaactttcaaattaacactcacacgcccatgttccagattactcatatgtgtttgagaaataccaagttttttcgcaagctctgattgggtaacacctttacggatacgcatgatcttgatgttttgtccgatttttacaaaattgggttctacgctcataactgccatctcctccctgaactgtataaaatataatcccagaaaattttagaactatatttttataaaagctaaacatcaggataaaaccatttgtttgctagcttttcaaaattaaaccggtatgcagataaacataccagaaaattattctgatcttacttaaatatccttatctgtcagcaagatacctgcatcaatattcaggacttgcgcaatctgcagcaaaactggtacgctgcactgcgctttccctgtttctattttcgacagatacgagcgtgagattcctgcctcatcagctaattctacctgacttatatttttcatttgtctgtaatattgaatttttaatcctaattgtttaaattttgtcgaaaacatttaaatctccatttccatactaatccaagatgttaattatttatcccttctttgctattctttatactttattaatattattatcacattttattaatatttaggtgttcagaaatagttaacatatgtgttctttagtgcacagaaataaataaattatatcttttttattttatgtgttaattttttcaacttccattaatttatatcaataaacattttacattatttaaatgctattcaaaaaattacttcatattatgtcttcaatattgcatttataattatcagaataatctgcaataatttttttgatattttacatacactatacaattcattatatttaaatttatttctaacaaaagtattcttgttgcattggttatatattatcataatggatatgtttttgtcttaagtttaagtttcaaaattactttttatattatttttatttctttttattatttattttatttttacattcaatactatcttttgaaatattatatctttatttacataaaaaagaaaaacctccattttttatggaggttcagtaatatatacatattatatagacaataagtcaaaagtttttattctactgcttttactgagcatttaacttttaccactgtttttaagtatcttaaacggttagcaaatcatctaaactacacttaaaaaaaccggtaagcttatacaacattttcaggcttattttaactttaccattttctatattacacaaatgagctgcggatactcctaaaagcttagccaatttagcctgactgataccttgacgtatccttttaatttttatattaatacctatcgttttataatcaggttcttccactttcttacacctctttactttttcttaacttaataactgctcccatctgtcaacagttcccctggatcaatatcgagtacttttgcgatctgtatcaaaacagccagactgtaacgcactttccctgtttcaattttagaaagatatgaacaggagataccagccttttccgctacttccatctgtttcaatgcctttctttttctgtaataggctattttcaatcctatttttttgaatttcttgctaaacataatttcaccaaccacacttttattcttctgtaatattaattacatcaattttattatatccagctattcatttttatgttttcaataatagttcaaatatgtgcactataatacataatcgcgttaacattatttgaaaaatccctgtcatttatgtcataaaagtatttcgcttgatcagacaataaaaaaagccctgcttcagcagggctaaaatatcagtcttttattctaatttaaaattaaaaatatctgcaacctggctaacaggaatgataaactcgatcgttccggcagcatacggagcaacagcataaggcggatatactataacaagatcagcattatccgtaatataaaaattttctgttccgttcacttctacttttttatcaaaaaatccctttaactgctgttcgtctgccacctgttttgcaacaatggcattcaaacgcggcagataattgctgccagctttaaacatatcgcctaaactcagtaatttaccgttttttaaatttacgttgatcgtatccaaatatgtattcggatgggcaccacccaaataatccatataagtttgttctaaagaaagtaactcttcactgttaaaacgcacttgatatctgccgtcaaacgtatactgtttgacatgagaaccggctttatgagctgcctgcgcctgattttgcagttgacgattgataaagcctgctatatcagtcacaaactcacggctcgccttcgcaccaccgtaaccgtcaaactcaggatagtaattttcctgtaaactcagtccattacttcctccgggcaaataagcatacaactttttcacaatattaaaatcaattgccatattcactttgtcatcaacttctgcaccgcctacggcgcctttcacaacagggatattaactgttactccgccagaacgtattttttgatcagtaatctgaggttctgcagcccatgctgaaacagctatccccaaagccatgactcctgccacaccagcagttataaatttccgcgacatcttcatctgttgcacctccaagaatagttatattattagtataacattattaaatgtcaaaagaatgtcttttcaaaaaaaatcccccgtttaatcgggggattttcatcttttattctaagatacgcattctatccgaaccggatataacttctttttcatcaggctcagctgttttagcgccaaacggcatttgcgcaatcaaacgatactgatctgggatattgaatacttcttttacttccgcatcaataattgggttataatgctgcagattggcacctaacccctcctcttctaaagctgtccagatagcaaactgcagcatgccgttagcctgatctgcccaagttttaaaatttgccgcataagtagggaaattactggcaaaagtttctgtaatgccttcatcatcaaaatacaaaatagtaccataccctgctgcaaaactattgattttagcttcagtaggcgcaaatttttcagccggtacacgttcacgcaaagttctcataacaatatcccaaaaaattttatgagcctgctcaaacaatactacaacacgggcgctctgacaattaaaggccgaaggaacatcctccaacagcatttctatcagtgctacaattttatttttgggaatcggagaagtgttggtaatactgtaaacgctgcggcgttcatgaatactggaaagaaaagtttttttcataattatgcctccttactataaatactcttttattgctaatttgactttactacaaagccaggagaaatgcaaattatcaaaaaaacctctttaagggcttccctgctggtttgttacttttgtaaaacattatgaaagcaattattcctaaaaatcaaataaaaaaagcatatccaagtttcttggatatgcctgatttctggtgggcgctgacgggatcgaaccgccgacattctgcttgtaaggcagacgctctcccagctgagctaagcgcccgaatggtgaccggtgggggaatcgaacccccgataccgccgtgaaagggcggtgtcttaaccgcttgaccaaccggccagttggctccccgagtaggactcgaacctacaacaactcggttaacagccgagtgctctaccgattgagctatcggggaaggtcactgacgtttctcaacgtcacaagtggtattatatggcaattttgtaatcttgtcaacactttttttgaaatttttactgatttttatgtttaatcttaacaactattttttgcacttcttgcattccattcttggtactgcagccaggccgatgtaattcccacggaaaaaatacagcaaaatcaccagtctgcaaaactacgtgatccttctcctctatttcttcgtaaaaaagcagatcactttcatctgcatgatcttccacaacaatatgttcagctcttctgggtgtaaaataaattatttcctcccctgcacctaaatactggacatcaatatactgattatgagcttcgggctttttatttattttatcttctgtcgcataggtattaattcttacaaatacatccctgccatctatttcatattcaccgttctttacttcggcaaagtttgtttcttttatatattgtaaagctttctgtaaaccctctgatacatatggcagtattttttctatatcttgcttatttccgcagatcattataaaagcctccttattaaattcagtatttctttattctacatttccatgtaaaatcctgttttctgctttgacaaactactattagttacgttaaaattgtaacatatattttcatgaaagaggtttagtatgagctatttgaatgttactaatgtttcccatacttttggcggccgccagatcttggaaaatgtttcttttaaattactgcgcggcgagcatgtcggtctcgtcggtgccaacggcgaaggtaaatcgaccttccttaatatcgttaccggccatttactgccggatgaaggcaaggtagaatggcccggacgcgttactgttggttacttagaccagcaaagtacactagaggctggtaaaactatccgcgaggtcctgcgcactgctttcaatgatatgtacgaagcagaaaaacagatgctagaactttacgacaagatggctgaagctgcacctgaagaaatagataaaatgatgaatactgtaggcgagatacagacagaactcgaacacagtggtttctattcattagatactaaaatcgaagaagtggctaacggtctcggcttaggcagtatcgggcttgacagagatgtcagcgaactttccggcggtcagcgcagtaaggttttgcttaccaagctgcttttgcagaactcttccattttgttattagatgaacctaccaactatttagacgttgagcatatcgaatggctgacaaggtttttacaaaactatgagcatgccttcattcttatttctcacgacatagccttcctcaatcaggtagtcaacgttatctaccatttggaaaactgtgaactgacccgctataccggcaactatgacaaattccaggaaatgtacgctatttataaagcccagcgtgaaagcgcttatgaacgtcagcagcaggaaattgccaaactggaagattttgtcgcccgcaataaagcacgcgtcgctactactaatatggctaaaagccggcagcgcaagcttgataaaatggaaatcattgaaaaaccacgtgaaaaacttaaaccaacctttaaatttacagaagcaaggactccaagccgtttcatagttgaagctaaaaacttagttttaggctatgatacaccgcttactcgtcctgtaagcttcaatcttgaacgcggtcagaaaatagctctccgcggtgtaaacggactaggcaaaacgacccttttaaaaactattttaggactgataccgccagtgtcaggctctgtagaactgggtgaatttttagaacctggttattttgagcaggaagaacgcactaaaaacgaaaatacagctttagaagacgtatggaacgaatatcccggtcttaccaattatgaagtccgagccgctttagcgggctgtggtttaactaacgaacatattaccagcaaagtttttgttttgagcggcggcgaagcagctaaggtccgtttatgcaagctgatgcttcgtgatatcaattggcttgttttagacgaaccaacaaaccatctggacgttgacgcaaaggaagaacttaaacgcgcgctgatctcgtttaaaggaagtatccttctggtttcgcatgaacctgaattttatgaaaattgggtaacttcagtttggaacatcgaagattggactacaaaaataatttaaaaacaaaaaatcctcaaccaaaattggttgaggatttttatttttgattaaccaagcagtgacgccacatctttttcaagctgcatcgacgccgctactaacggcatattttcattatgccacttcaagcttgccatcgcagagacatttttgccgcgtttacataaaatacgtttaccacgttttttaccctcatgataaagaaaccgcacttcaggcgaatccttaaaaagattttcttttatccagcgttcaccttcataagctccaccgaacggtgcagcaaaaaacagtatccagggacgatcgccgccgttccagttatgaggtgttaacgccaggttatagtttgttaaatacttcgcttcagcagcatcatcaaaattggcccaggccatataaaacaacgggctgcctttttctgacattcccagtacatactgcttattggcgatcgccggaaagatttgcgaagccatcatatgcagcggcatcgtctcatgttgtttagaatgcatcatcagccaggtaatattacctaaaatatatgctgtgctataatgttcatcctgtaaagacggtgctataaatttaatttttccttgaattttatccatgatccgagttctcctttggtcgtctttcctccaccaaatcccctatgcaatattctgcatcatttaaacagttttagaattcccatctaatacctgtatttacctgccattcctttttcgtgtcgccgccaaagctgcgttcaatatcaccatagaaatgggtattacgacttaactgaacctgtgcgcccataccgaattcataccaggtatcgccattgtcatagcgtttacgcagattttcgccgttagcagcaaccatcgatacatcacggtcaccgtcaaattcatggaacgctcccagtttaaaataatagctgctttccgggctaatcttccgtccaacttcaaaaccgatacggccaatagcacttgttaaaccatctacatcgatcttggttccgcgttcggtcgtaaaatcaacactgttcattctgcctaaagtaatttgtgcctgcggtgtaaagaaccagcctttttcgtaattcttctgcctgccatactcaaagctgatactgtaagcagcattatcataatcactgcgttcagcatattcgccataagtattcatcttgtgatccaagtgtccagcacgcagcactatatctgtataatggcctttattgccaaaccatgtcgtatataaaccgagagcagtcaggcctgtttcacccttgcctgccgtatagcttaatttaccttcgctgcgttccaatacgataccattagtacgctgaccatttttctcgtcatatctggtcttatcataacccaactgataggtatggtatttatcggtgtagctctgacctttcaatttaccatgatacatacgagcccaaacaccgtctgttccatgttcaccactgcgaatatcgcctaaacgtttacgtaaagtgtcattagtagctctccacaagctgtaatcactggcaaaaccatcgtttatggtttcagtattgccattttccttcttttcaatttttgtcagataccactcattcgcactttcacctaaagtatccccgcgctcaacagtcggcagtacatcccataatccaccggtatccatatattctccaacgaaagaagcattactgctgttatctgtgatcaaatgcagtttcttttcacctgaaacctcgccattgatcaaactcaggtcattaacatgcacataatgtgtgctaccggtttccgaagaattgattaccagtttatcgccattggcttcactgtccagttcagtattgaatttgaacacaccgccgctgccgctcagatcatcaacagtcacaacggtattcataccagcttcatgactgagattaaccatactgccgccgctgacatgtaaactgctcacttcagaactgctggtaacatgccagtaactgttatttttcaaattcaaattaatcgttccgctgtttgcaagtgcggtactgccagtaaacacagaattattatccatgtccaaatcaatggaaccgctgttatcagcatacatattgccggtaatattaaaagtagaattaccagccgtacctgttatagttcccttatcggcataaatagcgtagccatcattgtcattattatctatagtagcgccgcctaaaaattctatgctgccggttgcagcatttacatatgcaccatgagatccgctgccttcaacagaaatattcaaaccgtcgcctgcttcaacaacacctctttgtgccagcaagccatgtgaagcatcgccttcagttgtaataccaacattatcatctaaagataaaaccgaacctgtcatgtttgcaaatacaccatgggagccatcaccagctgtagcaatagtagaaccggcgccaatttcaacagcaccgtttgcgacacttccttttgccgaagtatcagcataagcagcaacaccatgagaaccatcacccagcgtagtcatctccgcgccttcttcaataacgatcttgccattattggaagccatcattacggtatgagaaccatcacctgccgtagacaaaaccgcgcctttaccaatattgattttagacccgcctgtcggattagttgtagacctgccctgtgccgcataaaccgcatgcgaactttcacccagtgttccggccgttaacccatcaccaatatttattgtagcatggaaatttgcacgcacagcatgggctccgtcagaagtatcaccattggaatacttcaattccccattatacaaagtattgatcgtagcattatccccaatgttgaggactgtagaaccgttgatgttcaaaccatcggcactgttaccgctgacagttattgtcaaatcgttaccaatattaatcgtaccagtagcattctgccagtcagaattaccgctcggatttgaacggattccgtcaccagcttcacctgtagtagtaattgtcaaacgatttcccgccgaagtaactgttgctgaattggtaacattcgtataaataccaaaagcatgtcctactaaactcggatacgcattagcagaagcttcaatcgtaacatcatcaccgacagattctccaccatacatcgaacctctagctgcctctgcaacaccgaataaaggcattgaacttatagctaaagctatagccaaatgcaaagtcttcttatttttcattgcaaccctctcctttattgagttttaaaatttataatttttatatattaaaatcgctccccaacgactttaaatatattaaaaatcactttactaaaatttatttatttctttttaaagcatctaccttctttaagtttataaaattatattctagcaatgtaatattaattgttaaaaactgatttgtcaatatttttaggaatatttttgcatttcagttacattttattcacattataatgattttctcttattattattttttaacttttagttatttcatctggtatttatttaataataatcaatcttttacagataatgcaactatcgttaactacccgcttaacaagccgcatttccttaaacagccaatttaattcaccatttaaatcttattttaaataaaaaaagcagcctattttacagaacaaaatatttgtcttgtaaaataagctgccgaagtatattaatctttaaaattattaatttttattcactattgtccgtttttatatttttgtataattttacatttttctttctttaataggctctattctttatcgaatgattatttagtattattttttatccagttaataactatgtatttttattataacaaagcatcttcccataaaatgcttaatcattataatttcccagatatctatcaacagaaaaataactgctgttactacaaatgctctcccgtgtattcatacaaacatctactatccaaatatatatatttggatttctaaaacaccaaataaaaaccgcagttcataaaaatggactgcggttttatttagtatctttttattcccactcaatcgttgcaggcggtttagatgtaatatcgtaaacaatgcggttaacgccttgcacttcattgacaatacgtctggaaataatatccagaacactgaaaggaatatgcgcccaatcagaggtcataccatcactgctggttacagcacgcagtgcaacggtatgcgaatatgtccgtccatcccccataacgcctacagaacggatattgggcagacacgcaaaatactgccatattttgcgctctaaaccagctttagcaatttcttctcgaaagatagcatcagcttcacgagttatttctaatttctcctgagtaacttcccctagcacacggatagctaaaccaggtccaggaaatggctgacgccagactaaggcagaaggtattcccaattcttctccgacagcacgaacttcgtctttaaacagttcgcgcagcggttcaatcaaagccaaccgcatatcctccggcaagccgccaacattatggtggcttttgattgtcgctgaagtactggtaccgctttcgacaacatcaggataaatagttccctgcaccagaaaatctaccttgcccagtttattagattcttcttcaaaaacacgaataaattcttcaccgatgatcttacgcttcgtttcaggatcagacacacctgccaaccggccaagaaagcgctccgctgcattgacgcggatcagattcatatcaaattgttctttaaaaaccgtttcgacctgatcgccttcatctttacgcagcaggccgtgatctacaaaaacacaggtcagctgcttacccactgctttatgtactaatactgccgcaacggaagaatcaacaccgccggacaatgcacagagaacttttttatcgccaacggcctctttaatctcggcaattttacgctgtgcaaaactgctcatagtccagtcgcctttaactccgcagacgtcaaacaggaaattagaaatcatcttacgtccaaatggtgtatgctccacttcaggatggaactgcactccatataatttacgcaaatcattagccattccggctacagggcattcacttgtatcagcagttactacaaatccctccgggacctctgacacataatcagtgtggctcatccaggaaatattgtgctcttcgatatccttaaaaagaatattatttttattgagttttacagccgttttcccgtactcacgcacatcagcgctttcaactctgcctcccagcgtctgagtcatcagctgatgtccatagcaaataccaagtacaggtacgcctagttcaaatacgccaggatcgatcttaggagtatcatcaccataaacactattaggcccgcctgtaaagatgatccctttagggtttttagctttgatttgttctaaagtgtaggtatagggaactatttcacagtaaacgccgcattcccttacacgcctggcgatcaattggttatactgaccgccgaaatcgataactaagatcatttcatggttacctgtttgcatattgctgtaagcctcctcaaaataatttaactaataatgtataatataatatcatacaataatcacgctgaaattgcaatgcaaaaggccccgtacaataagtacggggccttggactttcaatgtacagatgtaaatttattacatcatacccggcattccgccacccatcggcataccacccataggagcagcgccttcttttgcaggcttatcagcaacaacagattcagtagtcaaaaccatagctgcgatgctggctgcattttgcagagcactgcgggtaaccttagtaggatcaacgataccagcttcgatcatatcaacgtattcctcggtcaaagcgttaaaaccaaaacctctgcgggaacgtttaatcgtatcaacgataactgcgccttccaatccggcattataagctatttgacgtaccggttcttcaatagcgcgtttaacgatttctacgccggttttttcgtcgcctgttactttgattttgcttaaagcagtttgcacctgcagcagagcagtaccgccgcctgcaacaataccctcagcaactgctgcacgagtagcgttcaaagcatcttcaatacgcagttttttatctttaagctcaacttcagtagcagcaccaactttaataacagctacgccgcctgcaagtttagccaaacgctcttgtaatttttctttgtcaaattcagaagtagtttcagggatctgagcacggatttgagcaacgcgtgctgcaatttcttctttgttaccgccgccatcaacgatagtagtcaattccttggttacgcggacctggctggcgctacccaaatcttccatgctggcgctgtcaagcttacgtccaacttcttcgctgataactgttgctccggtaagaatagcaatatcctgcagcatagctttacggcgatcaccgaaaccaggagctttaacagctacagccttgaaggtaccgcgaagtttattcacaaccaaagttgccaaagcttcgccttcaatatcttcagcgataataagtaattcccggccgccttggacgactttttcaagtacaggcataatatcctgaatcatagtaattttacggtctgtgatgagtacgagcgggttgttaagaactgcttccattttatcaggatctgttgccatataaggagaaatataaccgcggtcaaattgcataccttcaacagtctccagacaggtttccatagttttggattcttcaacagtaataacaccgtcgtcgccgaccttttccatagcgtcagcaatcagaccgccgatttcttcatcagctgcggaaatagatgcaacctgagctttagcttctttagtctcaacctttttagacacagcctgcagttcttctaccaaaacgtcaacagctttttgaataccttttttcagcaccattggattagcgccggcagcaacattgcgcatgccctcacgaaccatagcctgtgccaaaacagtagcagtggtagtaccgtcaccggcaacatcgttagtttttgtagcaacttcttttacaagctgcgcacccatattttcaaacggatcttcaagttcaatatcacgggcaatagttacgccatcgttagtaatagttggcgcgccaaatttcttttcgagcactacattacgtcctttaggaccaagggttacctttactgcatctgctaatgcattgacaccgcgttctaaactacggcgagcttcttcgttaaattttatttcctttgccatttcaaatacactcctttatatttcacttttttagtaaaaatcattacttagagaacagcaagcacatcgcgttcgctgaggatcaaataatctttaccgtcatatttaaattcagttccggaatattttgcaaatacaacctcatcgccagctttaacttcaggagcgacacgagtaccgttatccagcactttacctgcgcctacggcaacgaccttaccagtttgcggtttctctttagacgccgtatccggcaaataaataccgctggaagttttttcctcttttactgtaagttctacaacgatgtgatctgctaatggtttcaacattttcaagtcccctttcagatgcctatataaattttttatttttcttttgttagcactcattattgtcgagtgctaattacatttattattatatccgtttcctaaaaaaatgcaagacaattcctgtaaaaatttttgacaaaaaagtgaaaaattcacgcagcctttaaattcctcctgcgtgaattttttatatttatttattttttaatgctgatgcaattaccgcttcagccaactccttaatggaaatacgcctgttcatactgtactgctgcatttttcgatatgcttcctgttccgtaaatccatgtgctgacattaaaattcctttagcccgatcaagcagttttcttgtttccaaactttcttttaataatcccagctcagcccccagggctttgatttcttcaaaacgagaaattgctatctccattgccggaaacaactgttcttcacgaaccggcttcactaaatatcccaatacacccgaactttttgcctgcgatacaatctcctgttgactgtaggctgtcagcaaaagtactggagccagatgctcgtcggtaatgattttagaagctgtaagtccatccatttgcggcattttcacatccatgatcacaaggtcaggctgcagagctctcgtcatggcaactgcatcttcaccgttattggcttcacctgcaacttcatgtcctgcctctgtcagcatttctctgatatcaagacgaataagcgcctcatcatcagctaaaacaactttcaaagtatttttcattctgacccctccaactctgacggtatagtaactacagcacaagtcccctgtttcagggcttctattgtaaaagtaccgcgaagatctgcttccaccatagtttttattattttcaggcctaaactggtttgctcatctaaaacaaaacccggcggcaaaccattaccgtcatcacagatttttaagcaataacttccggggattttataaaactcaacatcaagccggccgctgctgcggcctgcaaaagcatggtccagtgaattttgcagaagctcgttcagaaccaaagcaatgcttgttgctttatcggaaggcagcaaaacattatccgctttaaagcttgtctgcaatttaagattagggtctgccatactggcaataatggcttcataaattccctgcgctgccacagctacatcaattttaccgctatcctgctgtgaaagaaattcatgtacaacagcgatactggtaaccctgttaatacagtcacgcaataccagttttgtttcgtctgtatgagccctgcgtgcctgcagcctcagcaggctggcgatagtctgcaaattgtttttaacgcgatgatgtatttcccgaataactacagatttgataagcagctctgtatctttctttttcagctctgttatatcctgtagaataacaatagcggccgctgtatcaggcctgttcgtaacagggatcaccctcattgcaagcagcagtccctgcatgtctatttcctttccttcagcgacacccgtcttcagcaccataccaaccaaaggccagttgatctgcaaactgtttgtccttcgtccaactaaattagataagccctgcactttaaaaagatgtctggccgtcctgttcgcggctataatgaccttgtccttatcaacaatcatcaacccgtcgccaggcagcaatctgccgtaataattactgctcaaaatctgtcggccggtattttttaaaaactccactgccgtcataatgaaaagttcttccggttcattggtatcaaaagcaactacggcaaaacattttcctttactatcttgaataggataaacacgcaaatcgacgaaaagccccagcgacagctcacgtttccctgacaaaggcacacctcgctgcagtgcccgctgcactaaaggctcctcattaccgcgcagttcgcgacctgttttatcaggcagttcacccaaaaattgcgttcttggcagttcctgatgataaatatacagaaatttggggttatcatcccaaacatacatcgttatgcatgcatgagcaacatcggcagcaaaagctgcgccgactttcatagaggataaaatatttttttgttctacagtcaaattcttgggcatatcattcattcccctgtttcttattaccttgtttatccccatcaatccacagttttttccacattatccacagacttatgcacaacaagaactgttttttagctatatttcagcattttatccacaaaatccacaagttcttttacttcagtggacactgttcaacctaattttaacgatggaacagcgttcaaatccagaggactatattcaccgttctgatacataaaataaccacggcaagctatcattacagcattatcagtgcataaaatcggagttggatgtaccaaacttgctccaatcccgcctacagcatcagctaacgctgtttgtaaatgtttattagccgaaacaccaccggccagaactatttttttcaaaccggtttcctgcagcgcatgcacacttttctgcaccagcacatctacaatcgcttcctgaaatgaagcggccacatcggctttatttacttcacggcctgcctgctgttcgttatgcagataattgattacagctgactttaagccgctgaaactaaactgataatcttccttcaaaagtgcccgcggaaaatcgatcgcctgcggatcccccgctgccgccaatttttctatttccggtcctcctggatattgcagacccatcacacgtgcaattttatcaaaagcttcacctgcagcatcgtcacgagtttgtcccagtaattcaaagctgttataatcagttacctttagcagcgccgtatgcccgccgcttactactaaagccataaaaggaggttccagatctttatcattcaaaaaattggcaaaaacatgtccctccaaatgattgacaccaatcagcggcttgtcattagcccaagccagcgctttggcagccgatacaccaactagaagcgcccctacaagccctggtccataagttactgcgacagcgtctatttcttccagcttcacattagcctgacgcagtgcttcgtcaataaccggcaaaatattttcaatatgtttacgcgaagctatctccggtacaacaccgccaaattttcgatggataacaatctgtgaggaaataatattcgaaagcacttcacgtccatttttgactacggcagccgcagtttcatcacaactgctttcaatgcccaaaatatacacgtctttagacatcaggcttaccctccttatataaccacatgattattgcattttcatgattatcttcataataatttggtcttatcccctcgctggcaaaaccgcaggtcaaataaaccttttgcgctgcaatattgctctcacgcacttccaaagtcaccgccacagcgccaagttcccatgccttattgatcagggctgctgtcaagcgtgttcccaagccgtgttcacgttcttcagcagcaaccgcgactctggttatctgcgcttcccctgccaccagccaaaacccggcataaccaagaatacgcccagcatcttctaaaacaagatatgttgttaagctgttattcaactcatccagccacatacttgggctccaaacatcaaaaaaagacttttcatctatgctgctgacagcagtcaaatctgccgctgtcaaagtccttatcattattcctgctggcgtttttcccataattcttcagcctctgatcttctaatgtaataaggttctaaaccaaaaatatcaccggtattatcaggatcatactcggcttccgccaaaagcgctaccgaggcagcctgcggccaacataaatgtgctggagcctttcggcaccacgaaggcaaatcggcaaggtcaattttctggcattctcccaataataaagcaggcatacccaaaacagctatattttccaaaagcttcttgcgatctacaactttgatctcctgatgctctatgagtgtcccctgctgccattcataaatcgcctgataaaaattgcctttttgtgcgtctaaaacaggtgataatacataaccgtctatcggcagattataggcaagcgctttcagcgtattgaccccgcagataggtttatgccagctataagccattgcttctgccgatgccaggccaatcctcaaaccggtaaaagaccccggccccatactgactgctaaaagatcgatctcatttttagtgatcttagtccgtgttaaaagctgctcaagctgcggcataagcccctcagaatgagtcatgcccatattgatcctatattctgccaaaatttgtccatcacgacacaaacccacggcacagactttagttgccgtatcaatggctaaagtcagcatttttttccacttcctcacataattccagatacctttcaccattagggagcaattgtatcaaacggccttccggaacaatttttatgtagatatcaagactttcttcaggcatttcctctaaaaaattatccgcccattcgataagagtcagcccttcaccgccaacatattccccatagccgatattttccaattcttcaacagtattcagcctgtataaatcaaaatgcctgatctccattttaccatgatacacattcataatcgaaaacgttggactgtttatttcactggcatcaaccccctgtgccatagctatttcacgacacaacaaagttttaccggcacctaactccccacaaagacaaaaaacatccccgtttttagcaagccttcccaaaagttttcctaacgcttccatcgtttcaatattaccacaaaaatactccatcaacagcactcccatttcaaaaaagcagtaccgacttttgccgatactgctcccgtttattttttcaataaagtagtattacgttccaaaggatctaaaatatcagtatgtcctttcaaggacgcaatttttttaccatcaactaaaatctgtactttttttatctccggaaactctgtcagagtgttgacaatagcagttgtcagcatcagttcagtataggatccctgcggtacattggttatttccttggaaaaatcaacataagcagtcccatcttctatcttcattgttctgatttttgtccctttaggaaacagactgaccattttcgcagtatcctgcggactgctgtttaccaaaatatccaacgcaatctccggagcagtcatcgcgccggctttgcgggttaccttttccggcaacagatattcctctccgttgacaggtgcacgatacaccgttaccgtaatttcttgattcttattattctgcgtttgtttagtttcaggctgcgggataaccgtagcagtttgatcatcactgcagcctgcaactaacacgcagagcatcaaagtgcagattactgcaaatttctttaacatattggcctcccacatcatttaaaatagtcctcgataccatcagcaatcgccttagccagcttactttgaaaccagttgctgttcagcagtttttcttctttggcattagttataaatgccatttcgattaatgccgacggcatactgctgcgtttattgacgtagaagtttgcctgacgtatacctaaatcatccaaaccaaaattattagtcatccgtttttgaatggccgtagctacacgtgcatcatggcttgttttaggataataataggacgagaagccgcctacgtttttattgacagaagcattgatatgcagactgataaagagatcagcagcactgttttcagctacatcgacacgcgcctggagctcctgcgcgtccgtagcatttacgccataaacgtcaacatctttaacacgtgtcattgtaactttagcgccttttttcttcagcagttcttcaactttctgcgttatttttaaagtaatatctttttctttagtgccttttgccccaactgctcccggatcactgcctccatgtcctgcgtccagcgtaattcgtttatccttcagcccgccactggtacgataggcagttttactaacagcaggtgtcggtgttttatctgtagtagttttaccgcctgcaggtgttgttttggcaggttcagatgcctgacgtttattagccataacatcaataacgattctgtccggtcttttggtaacaggatctttttttaaggtaaaccccttataatctttactgccaatggccttttgcagaggcaccttcagcacggttttaccttccgacgtatctaaacgcatttcattggcaatatcgctctttatcttatgagcacggccaactttgctatttaaatctgcatccatagttatcagcatcgtattgccgtcaaaagttattttataacctgtcggtttatcacagtccaccacaaaacgcagcacattggttttatctactccccaacgaacatctgttatttctgaggcaaaagccgttaaactaaacatcaaacagcttacaagtgcaaaaacaaaaactaatttcttctgcaaacggcatctccctttctttcatctctaatacttaattttatcatttaagcgtaagtattgtaaacataccctaacttttatctgcaaaatttaagtgaaatcttttattctccctgctcaataattctgcgggcctgtggcaagtactggctgatttctcctgctgccataccaataatccctttactggccaaatcgccagccagcccgtgcatatatacaccagctaacgccgcttcctgtacagaaatcccctgcgcagccaacccggcaataattcctgtgagcacatcaccgctgccgcctgtagccatagcactgttgccggtagtattgatataaacattgccgtcaggacagcctataacagtaggagcgcctttcaaaacgaggacagcatcccactcagcagcatatttgcctgccaattccaggcgtcttgcgtcaacttcagccgcttccaaatccaacagccttcccaactctcccggatgcggcgttaaaactttcggagccctcatggtatttaaaataccaacatgtccctgcaatgcagtcaacgcatcggcatcgataatcaccggcacttccaccgactgcagaatttcccgaataacttccaccgtacttccagacgtaccaagaccaggacctatagccaaaacatcagctctgccggctttgtccagcactgcaccagtggctcctccacctaaagctcccggcatccgctcgatcaaaccttcgaccataatttctgtcagtttcaccgctaatacttcacgactgcaaagcggcgtcagcaaacttaccagaccagcacctgccttaacagccgcttccgagcataacgcagccgcacctgtaaaacccggtgatccagcggtgataactacccttcccgcttcacccttatggcagtttccatttctctgcggcagtaaatcacaagcaatattctcagttaacaaaaactttttactatccatacgttctaaaagtattttaggcataccaatatcggcaactataatttctccgcttaattcagctgccggatacaaaaacaaacctggtttggcaagtgccatagtaactgtaatatctgcctgcacagcatttttatctgcactgcctgtatcagcactgacaccgcttggtacatcaatggacacaaccggcacagcaatactgttcatcaaaccacagacacgttgctgtaccccctgtaaaacgccattaaaccctgttcctaaaacagcatctatcaccaaatcagcctggcggcaactaacttccgctacatcccagctgcctctgtcttccttaagtgcaaatagttcaataccacacttccggcaaatacgcagctgcgccgcagcatctcctgtaagttcctgccacggtgatacaagaaaaacctttacccgcgctccctgattggacagccaccgtgcagcagcaaaaccatcaccgccattattgcccttacctgtaaaaacaacaatatttttcccaaaacaatcttctaaaaaatccgcagctgtttccgctacagctttaccagcattttccatcagcaccattgtcggcaagccgatctgttctgcagactgctgatctaaactctgcatttccttagcaaaaaccagtttcatccttatccctccaatacaacctgggccatagcaagttctttagtatggctcaacgaaagatatatttctttgacaccgcgttcttcagccagagtagcaaaataaccgctcaaacgcaaactcggctttcccatacagtcattataaacttcaatatctataagcttgccgcccctcaagcctgttcccaaagctttcagcaaagcttctttagccgcaaaccttgccgcgtaacttgcaaatttctgcatgccacgggcttcacaatattcttgttcagcaggagaaaaaactcttgccgcaaacttttctattgtcagagcttttttcactctataaatttctgttagatcacaaccgattccaacaatcaccagctacgccccctcataaccttttccaataaatactgcttggcaaacagcataatatgtttatattatacatccaggttacgttttcctgctattttatttaataaaatagctcagcacccctaaccggtactgagctaaatcctttattatactgtaagcaaacctttttcttctaaaaactctgctaaaaatttaccaatacgatttgtaagtttcaaacagtttttcagatggtcacgagtattgaattcgtacggcatcagatctttacacattgttgatccaaattctttttcaaaacgatcgtgaaattctttggtaacagaataaatttctttcaatggtttttcttcaggagtattccgtccgatcaatgtactgataaccattgtgcaaccgactaaagcgccgcaaatattacgggcatggccaataccgccgccaaatcctgaggccaggcgaaaagcgttatcatcaatatttacgccagcatatttgcgaaaagcttcaactatcgcttcgctgcaattataaccactcttaaaagcattaccgacttctatgcccattttttcactgaattcactcatttctcgtccctcctttaatatcacttatatgacttaattctatcagttctataaaaagtcctgctatataaagctccgtctactatattatttaaaaataaaaacaggacggcaaaatccgtcctgtttttattacaaacttctattcaacttttgtaagccataagccgtgtagattgcagtattcataaacacctactaccttgtcgccgccagccaatgcaaactcagcttccggtttagaaccaacagccagtttcttccgttggccgccctgttctgtctccagatagatccaggcaatatgatgttcctctgtcataggatgctcaacactgccaacttttacttttacaatattaccttcaatagtaactaccggcagatgtttttcctgcgaagcctccactgtattaggtttcagttctgtcataggatcgccgcagcaaacgacatttacgccgctacttttgatcataccaatcatattaccacaatgtttacagatgtagaacttcttttcgcccatttgtactcactccttaataaaattttatcacttaattataaatgcggcttcagccgcgcttaacctaaagctacgtctaaaatcatcattatcgcaaaaccaataataaacccaatcgtcgaaaggtccgcactttcatgttctccaccactttgagactccggtatcagctcttcgacaacgacatacagcatagcgccggcagcaaaagctaaggcatacggtaaaatagcctccatggaagtaaccatcgccgcaccaataacaccagctatcggttctaccagcccggaagcctgtccatacataaaacttttcatccgcgaaacaccttcgcgccgaagcggaatagaaactgcagcaccttcagggaaattttgaataccaattcccaaagcaacagctacagctgccagcaatcctgtttcgctcatactattcgccgctgctccaaaagcaacaccaaccgccaaaccttcaggtatattatgcagcgtaattgagaatacaagtaaaatgctacgacgccaattagttggaatcccctctacttccccttcttttgcaaagaaatgcgcatgcggcagtattctatccgccagccacaaaaaagcagcaccactcaaaaaaccaatagcagcaacaagccaggcaggcaaactgcttttttccgccatttctatggcaggagccaaaagcgaccaaaaagaagcggcaaccataatacctgcagcaaagcccagcatcatatttaaaacccttttgttaatctctttaaagaaaaataccatcgccgcaccaagtgcagtcatgaaccaggtaaaacctgttgctatcagagctaacaaaatcggatcgttgatcttcatcaatgattccatttaaacaactccttacctttatccttattataagctacttgtgatacgctttcaagtaagctctttattatataaattttgtattcgtttatgacgtttattaaacatccacttaaaataaaatgcagataaccggaatccccgaaaggacccggttatctgcatttggagaaatggaatattaaaggacataaccacagtctgctcttaccgtagttatgacggagaagtaaagttatgctttagctaaagccgcacctaactcgcggcagctttcagccatcgcttcatctggggcacccaataccaaaagccccggggcaatcaattcggcaccagctgcttttatacgctgttcccaatcactcatataacttccgccccagccataagaaccaaaaatcacaacctttttcccctgcaaaaacggttctaatgcagtaaagaacggttcaaactcatattcttccagaacttcagcacccatagcactgcatcccagtgccaatgctgaatattcagccgcctgttcaggagtgatatcgctaacgcttttgaggtctgcagcagttccaataccttcggccacagcctcagccatcagtttcgtattaccggtaccagaccaataaataacaggaatcttttccataataaaacctccttaaaaagaagccgctgccagatgtaaaggtacgccttcagctacagccttcaacaacctgtcccggcatttattatatgcgtcaaacaaacgcttggcatgctcgacatcatcatatactttccaataaccgctgcatttgcaattcttgcctttatttttaataaagccttggatatccgctaacggataacctaaaaatataccaatttcatgcggaaaatcctggctgcaggatatctttgcccctaactgtcggagcaatgaatgcaccgaaccagacttataaccaagttcttgtaaataacagcttatcgcttgcttctgcagcaaatcttcaagctgctgcggctggtaaaccaaaaccaaagttcgtgccgcacaatgacataaaacttcaaaagcaatccccttatcggcaaactgttccgtataatcagccaaaagcggcgcgactacaggcatagatgcagtagggcagctgacaagattggccggtttgattccagtcaacgccggtgcgcaatggaaagccagcaattcatcaaaacttttaaagccatgtaattcaaactgcatgataactcctttggaaaaagttagtttagctaaccaaacgtagctaccggcaaggctccggttattattcataagtgataaaagaaagaagggttgaaatcacaccgtctggttagccctgtctaacttggttttgagtataacataaaaattccaagttagcaatacctaacttggaatttttatataattttttctttttattccgcagcttctgaaaatttatttacgtcgttgaaacaatttaaaaaggtcggttttctcttcagacatcaaattataatcaggtactgccgccaacgctttatcccttgctgcctccaaatcatgaaaaacgtcccatttggctgcattaagcgctttaatattactgatgcgcagtaaatacgcaggatgaaaagtcgctatacaatcaaaaccatgttttgttttaaaccatttaccacggtctctggtgatgcgcatatcctgattgccaagataatgtaaagcaacactgcccaaagcaaccacaactttaggctgtaatatcgccaactccttgtcaagccaacgctgtgcacagaaatctgcttctgcaatattcggcgtgcggttacccttaggacggcatttgataacattggtcgttaaaatacggtcacgcgtcatcttggcagcccacaaagccttatccaacaactgtccagacggaccaatcaaggggcagccgtagtcatcctccacgccgccaggtccttcgcccacaaaaacaatcggactgtcataattaccaaaccagcctacaggagcctgtgctgcttcccgcagagggcattctctgcaagccgctaattcctgggctaaactttccagcttttcttgtttcatacttttctcacacctatttataaaattttgatcatagccggcgaggcgaagcgtgctgatctaacctgacaaatgtcagatgcttttttagctcctcacggctttgctctaaaacaaaagttgttgcctgaatattccctgaaaccggtgaaacaaaacgtgcaaaactattcatcgttatcagtctgccatcaactgtgaatacgctttgattcatattgatataccatttttccctgtcattgagcacccgtccatcaatctcagcgatcaaaatataatctgcgcccagctcccgcgctttctgataaaatttttccattgcatagacgctgtcgtcataaagttttgtttctgtatctacgatcacataccgcggcagcatcatttgatactcgttcataataaaccttttaatatcaggcacatagtcccttttatctacctcaagactgctgccgatccaaacagctactaacggttccgttccttcaagtttttgcatgggtagtttttcacgtacaccggcagcctctgctttgtccaaagctgcataatattctcgcatgctgtaatcaaaatacattcccatatcatgctgaaaatcactcagcttacgggaaagattgtatttatgatgctttccaaactgcttgtagcctccaaaaaatgtctgcaggctacccggcacaggatcagcattattagttattctgcgcagatctatcttatcaccgtagacttcggcaaaagcagcgttgcctatggcaggcgcgccaaaagttataaccggcacacgatctttatctatccccatacttacaaggcgttctgccagcaatgtagcgacagctccccccaggctatgcccggtaagcaatacacgtgtatctgtattagccaaaatctcattaaacaaaacctcatcaataccgtcatcattagtatcgaccattgtttctaaaacagtattgacgtaatcattaaagcctttatgtaccattggtacagttttatccttttcagaatgtcctgcatattcaataaattcctcaaggctgcggccgccgtacggcaccttatcggtgttcaggttgacagtccagtcactcttgctggcactgccgcgaaaagcaactatataaacatccctgccgcgtcgggttttattttttgccacaataaaattggcttccaattttcctttttttacttcatgcggtactatcttccagccataatcgcgcaaataaccaaattccggagcattttccggggaatatgctcctatacaggctgctgctgcaactgtagtccaatgtgcatcacgatacgccgcatcaatcattttcttttccgcaggcgtatactcatgcgcccagcttgttctaaccggcacaaacacaaccagcgccagcagaacgcaagttaaaacctttattattgagcgcatactgcacctccgctcctaaaattaattaacatcatttacaataattataaatgaatgctgcgaaaaacacaaaaagaaaaacgcatttctcaattgaaatgcgtttaatacgacttcttttgattatcttacctaaagtatctagtccttttctaatttcgccctgaaagaaatactgcgcggcgtatcaatattatcaaatttcacaagatgcgcagccttgatcaaatctacatcaacaacagtaccagaaccgaaaatattatgctttacacgctgcccaacagccagtgacaactgattttcttcatcagcaagataacgctcgttgataacaagataatcttttgtttctattatcaaaccttcctgcggcttttgtgtataatcaagcaatgccggctctatatccagcagaaaacgcgacggatagcgcggagagccatcaaaatttctaccttcagcttcagaaagatacagccctttctgtgcccgggtcattgcaacaaaagcgagtctgcgctcttcctccatcttttgtatagtatctgttttcttagacgggaaaacaccctcattcatcgcacataaaaatacatagggaaattccagacctttggccgaatgtaccgtcattaattttactttatcactattatcagccgcatcgttgttagtaaacaaagcaacatgtgacaagtaatgttccaatgtactttcttccccgcaggaagtttcatattcataaaccgactgtttaagttccgccagattatccagacgttcctgacttccttctgtccgcagcattttttcataaccactctcatttaaaattgcagccagcaattccgaaatttgtctttctgcataattagcggcaaaattttcgatcaatgctacaaactgtgcggcttttgtccctttaaaaatttcattatccaaatttgtctctaaagcaatatacagagagcattggtgcttgactgcatattcctgcaaaaattttatgcgccgctccccaaaatttcttttaggaacattaactactcttaaaaacgccagatcatctttatatgcaatcaaccgtaaatatgccaaagcgtcctttatttccattctgttgaaaaactgcaccccgctgtaaatagcgtaaggtattttttcacgtaaaaaaacttcctctacgattctggtaatataatgcgcacgatataaaacagtgatttccctgtaagaagtaccctcgccatgcaatgcctggatctgctctgctatccacatcgcttcacgctcagaagtatctgcatgatggcatataaccttccttccgtctgcaatagttggcataagatttttcttaatcctaaacttatttttatcaatcaaatcattaacgaccgaaactatctgcggtgtagagcgataattctgcatcatcattatagtttttacacttggaaaaatcttatcaaaatccagtaaatagcgcacattagcaccgcgccaggtataaatcgtctggtctggatccccgacgataaacagatttttatggtaaccacacaatactgacatcaatttgtactgcagttcatcaatatcctgaaattcatcaatcatgatatattccaaacgttgctgccattttattttaacagcttcattttgttcgaaaatatataaggtaaatttaattaaatcattataatctagtccgaagcattttttctcctgatataaataaccataaaaaattatatcagacggctctgttgcagtaagatatttctgtctcaatgtatctaatgacatattgagcatatccagataatattccggttctttaattagttttctgatttcaatcatatcccgtgctttactgaaagtcatatttctaagcgtcaatccacgttcctcgtaaataattttcagcatagaatcgatatcagaattgtctaaaacaagaaagctttttggatattgcagagcatggctgtcctcctgtaaaacagatacgcagaaactatggaaagtactgatataaccagtatcattatcaccagtcaggttatggattcgctgccgcatttcattcgccgatttattagtaaaagttacacatagaatattccccggcaaaattccgatttcattgaccagataggcaaaacgccgagccagagcccttgttttacctgaccctgctccggctataacacgtataaatccttccgtagaagtaacagcttcaagctgagacgcattaagtccctgcagtatattttccaatgctttacacttccttacctaaaaataatttcacgtttcttgttagctctcattatagcaataaagttcataacactacaacacaactgctgcgtaattaaaattttacgcctgtcattaacctcaaaattttataaaaaggaaaaaaggcgctaccttaaaggtagcgccttacttttctgttcatatgctgctatatattaaaaaaaattttaatctatatcaattacagacgaacaacttcaatgattgcatttcttccattattactaagtgtttttttataccattcagtccatattttattatttattttatacatttttcatatttccgaaaaatatgaaactcattttaaactcattctaaattatgatagaatatatacgcaaactcctccatgccactgccaggcattgtttgcaaacgtcgtagatacctcgacgaaaaaagagcaatctgaaaagattgctctttttgttttcttaactttctctaaatggactatctttactttgcatttctatcggaaacagttcgggatcagactttactacagacaaaaaagcctctccgtcactaccacactccgctgatttttgcttaactcgtttctgtaattcggtaaaccaaggaaccaacggcggcatccacctaaacaaacaagctgccatttcttctaaattctcgccttcaatacagtgccctctaattattacatacatatacaacaacctccttaacacacaagctttattataggcaaaatagcaaaaaaaataaagcctgactactacattaagtaatagtcaggctttttttagtacgcatatgttacccacacgccagtttttttatcttgccaatcatactcgcctcgaaatcctatatatttgctacctatccggcggctcactccgtagctgatacctgtaacatagtgatcaatatcaatcttggctccgatctcccgcagaacccctggcgcggacggtggcaaggatttcaagattttctgctgcaattcttcctgcttcttcgaccaggcttccagctctgtcaactgcttctgcagctgatttatttgcagtttggcttcgctcgatgcttgatccgatagtgtctgctgttcccttgctatctgtaattccagtgctaatttcctgctgatttctaattgcctggttgagttttgttccaacgtcaccaactcgctttccgttatcatgtatgccggctcggctgaacaggcaggcaagaaaaagaactgcaccaacgcccataccaacaagaaagcgattattagatatccaacttttgattttttcatacacattcgtcaccacctgctactgtagcccctggtatctacatgaatccaattgccataataaccaatcccaagctgatcttcaatgccccaggctttagctgcaacaatgaccgtatctgccaatgcggtatcagtatcgtcctgtcccgaaatatggatgtcggctgcacagccacgagtatgatagctgttaggttctccaccaacagctaagttcacttctatagttcgaaagccacttttataaccagcattagtagtattaataacccaattagaattccaatccctcagcatatcaagcaaccgaaataagttagcagtcttttcatcatttgtacatagtcgaccattttcgtcccatgcatactcattcctgctacgttgcaaacaatcccactccgttacgctccaatgtttacttacatacaaagccatattaatcacactccataaaaaatttagaaatcatagtttctttttaacaaaagagactaatccactcatagcttccacgccagcatcatttaagttttcaataatactaagcagctcagttacaacaagatatccaataaccgtcataactgcccaagtaggtttatctaaaactctcataactacatcaacgacagctgcagataatgcacaaattaaataaacaccgattttcccaagaaaacggtgtttcataacttcactttttatctttttggcagctctggctttttttattcctttaatagattctagaatagtcggattttcaataccactatcttttagatgcagataggatatcgatacccatttggtaaaacaatcaataaatactaaaaaagcaaagctataaaacaatatagcgtgcttatgcaaaatcatagccaacattgccgctattaaggctttatatgaccaaccttgtgctaaagtttgagcagctccgatagccgcaaatttaaaagattcccagttcatttttgcctcctgtataatgctcctaaaggagctgatattttgaatactaaaaaaagaaaacgtatgaagctaccaaatggctttggcagtgttgtgctacgcactgacggcaaccgccgccgtccctggtctgtaaaagttacaatcaatggccgccaaaaatctattggtgacacagccacagaaatagaaggtttggcacttttggccgagtatcataaaaacccttctttatttgccccaacgctcataacattttcggaagtttttgaattaatgaaagctgaaaagtttccgaaattggccccaacaacacaaattaattatttatctgcatacaagcattgccgtagactttacaacaaaaagtttacagaattaaaaataggtgatttgcaatctgttatccgtgacaccagcgaattaggtgctggatatgctatgcaaaagaaagttagacagatattacaccatatgtacacatatgccgtaaaatatgaaatcattgaccccaccgccaatattagccaatacatagaaatagatcagcacgtgattaaatatcctaaaacaccctttaataccagacagttaaaccgtgtgaaaaaacttggcgacaaatgggctatgacagtgttaattatggtatatgctggtgttcgtacctctgaactgctttctatcctcaaaagcgacgtcaagctacgacaacggtattttatcgttcgagagtcaaaaactgctgccggtcgaaatcgtgctgtgccaatatcaaaaaaaactataccctattttgaattttggatgcagcagccaggtaaatatctcattactacagacgaaggcagtcaacttacttaccatcaataccgaacacgcttcgattctgtcatggccgctagtagatgtaagcatacgccgcacgaatgccgccacacctgtgctaccatgctagataatgctggcgctaacgatacggcgatcaaacgtattctcggacatgccagtcaaggagttactaagagagtttatacccataaatccctccatgagctaaaaaaggctatagacctcatttgacagccttgagtggtattaacccggcacgaatttacgcaacaaaaaagcctgtatcccttggtttatcaggatcgcaggcggtttgaattcggtatgatatttttgcattttattattacctcataaaactagtatccatgcgctttcaatcattttaccaagatattttgacaagatcttcttctgtttttgcattttccacacgatcctccaactcatacaattttgcatagacactttcttgatatataccagcttcagataatgcagcttcaaacatttccggattatgtactgtaaacactttttcgctaagatcatctttattcacatagacattataacgagtagtgcctgtaattttagctctgttatatgatgccatgaagtctacctggctatctttatctgtatcatacccataaaccttaccatccgtctgttccacccatacaggtaaatataagtctttaatatatccaagttttatttcatgtagtttctgttccttcaattcttctaatgatggtacataaacatattcttttggctctcccgcattattatcccatcgatattctttgccgtccgaagcattaccagacatttttagatattggtcataattgacttcagtaaatccttctactgaaggctcaaatatttcatctgtataacctacaactttttctacttgtttatactgtcctgtaggtatttttgtttcaggcacacttacggcttccgcattatcattcacatctccatgagcaggaatagttaaaaagatttcttccccctgctcatactcaattataggttttttaggtgtgattttaagattatgatcttctatcagggtatcaattctattccctgcttcgtcaaatttcaaaaaaattctacagtctgctatattagctggcatttttattacttcctttcaattcaatttttattttggttaaacagtggggatattatgttgagtcacaaaatccaacagattatcgttactggtctattccttttacat

SEQ ID NO: 9992 - DNA, 5128 bp, Unknown
  gut microbiota DNA sequence
ttcccatagtgtttcttttcaaatagctatctgaattttaccagatacgccatatagcaaaaccataatataaaaacataaatgatcagtcttgaaagagaaatcataaaataaacccttctttatttcaaaagttaagctatattgttgtagctattaatggtgacttcttgtttatcaattatgatatcatgctcttgtcaaagaaaaaagccgacattctgcttttatttatttactaaatgttggcaagctgtttcactgcctgtggttttccccaaagctgcagtttgtatcaagattgatttcgaaaatacgtgtccagggcaggtttacattgatgtcgatacccgttaaataataattgctgtcgttattgcgataaaaaggtgtacggccaaggtctccatatagaagctgaatcttttgccgctgtaaaaagccacgaataagcgtttctgcaaaaaacttgttttctcccaaatcagttggcttatagcctttcagtttcagtaatgtagttaactgtgcatgcattaatttctgataggcataatcatcaagtaaacgttcaactgtgaagttcagattttgggcatacagtgacggatgttctgattgcggtaatcggtgcagctggccggtaaataatgttgcttgactaagcgcggttcccagtgaattacttaaagtattccagcctgaaaaagctgccagcctgctgagcggtactttagcctccaaaagcttaggtattaaaagttcgttttcagtatagttggccgtaagatcaaccagcgcaatgtggcggtctgatataagcagggttttaagtttttgcagcatagctttattaggctgattgtcatcgtcgccgcagtgtacgaataaaataaagtcggcgacagcagcatcatctgtaagctgaccgccgataaaatttattttgtcccggatgcttgcgtcaacagaacagggcatatagggcatgattttagctgcgactttaggcgaggaatactctacaaaaatgcgtggcttgtaattatacagtttattataatatctggtcagcagtaaaactgatatttcatcagctccacttgtaataagcccgctggaacctaaatctgcatgtttcatatatgccagcgcatgattagcattacgattaggaagcccgaatggctgggcgtcgtcctgccctatagccaaagtcagaccgtctgcgcgtgccagctggaccagttttttgttaaaactgtcgttatcggcatacagactgctgtacttcgttttaacatcatccggtatgcgtgcatcgatcgccagcagctgcctggtaaagtaaggatcgccgaatgtttctgccatatcctttaatgttgcataacgcatcagatgccattgataccagctgtccggtataagctgatcgctgaccagcaatcttggaatgacggaaaaaaacgccatatcgatttgtgggttgagagcatgctgtttgtttacgaaagtcaaaaacttttcttcatcgttaattgttcctaaaggtacgcgtgagcccagcagactgccgtgtactaaaagatcagctgataaaattgcggctggatgctgcggcatttcatttttcagccaggcaaacagtttttctttatcagcaggtgtgttataattgtcaagaagttcttgcggcggtgtaattacgttgatagaagccagtgctcccagttttctgaccatagcgctgcagggagggcggctgtctaacggagccagcagcagcgaagtatcggcttttacaggctgaggcgcaaatgggacagttgcaggcataccgccgaataattcataaaaataggcgcagagcagcagtaatgcgagcagaataaattttttcttgttcataggctgtctcctttgccgttcttgttatatttattatattacagatacggagttttttgaatgcggataattacgggaaaggcacgggggctgaaattgactgtgccaaagaatatggacgtacgtcccacggctgacagggtcaaagaatctctgtttaatattattggcactaaaattattggcgcacgtgtgttggatatgtttgccggaacaggtaatctggggttggagtcgtggagccgcggcgctgctgcggttacttttgtcgatgaaagccgggaatcgctgcgtctggtacaaagcaacatcgttaaatgccgggcggaggctgatgttcaggttctcaaaggcagcgcggtaaatattatcgaacatctgcatcatcagggattaaaatttgattttgcattctgcgatcctccctataataaaggctgggttcagaaagttctgcagaaaatggaacactttcaagtacttgaagacggaggctatctgatcatcgaacattcgaagcacgatgaaataggcgtgctggcagcgtgctttgagcttgtgcgtcaggaaccctatggtgaaactttactttcgtttataagatttgccaaagtataataaaatgttgtaaaataataaaataaatttgtaaaaaaatagcaggaatacggaaacgtacgtcgaataaggaacaagataattgaatttatgaccagactgcgttgcagcttctaggaggttaaacagtgcgtagagcgatctgtccgggtagttttgacccggttactaatggccacctcgatatttttgaacgggcgagccaaatgtttgacgagatcattatcagcgtttttcataatccgggtaaagataaagcaatgttcaccatggaggaaagggtagaaatgctcagggatgcgacaaaacatatccctaatgccagagtaacctgtttttccggtcttttaaatgaattctgcaggcaggaaaaagctccttttattgtaaggggcttacgtgcgttttctgattttgaatatgaatttcagcgcgctctgctcataaaaaaaatagacaataacttagaaacagtctttattatgactaatgctaattactctttcctaagttcctctggaataagagaattggcaacctttggcggttgtatccatggtcttgttcctgaatgtgtggaagatcggatcaaaagccttgttataagcaaagaataatattagaaagaggttgagtttgatgatgattgatagaagtacaagtgcgactttggacagaatttttgatgaaatgtataaccttatttctgaggctaaccgtatacctcttactgataagatcattatcgaagagagcgatttggcgggtatcctggatgatttgaaggaagcgattcccaaagaagtcaaaagcgctaccagactgcttgaagaacaaaaagcaatcgtcaccaaagctcatgaagaagctgacaatattgttttgcaggctaaaaccgaagctgaccgtattttagaattggcaaaatccgaatctgaaagactaatgcgtcaggaagaaatttccaaacaggcagaagcctttgctgaagatgtaaagagtactgctttgcgtaatcagcaggaaatgaaagacgaagctgatgcttatgctgagcgtgtaaaacacgatgtgctgcaatatgccgatgatatgcttggctatttgagcggtagtctgcagtccgctttacaggctgtaaacgataaccgcgcttccgttaatgctgaacgtgaaagcgttatgtcttcacgccctcagcgtgatatggaacttctggcgatggaagaggaagaagacgaagaataagcttttgaaaaaaaagtaagccttccgctcaagcggaaggctttttgttttgttgctttattatttttgaatatagatcggagagacagtataatcgttgttatattgtggttggtggttcttttgcaaaagtgtcagcagattagttgccgcaatatcaacggaaagctgctgctcgactttctctccgtatttttccaagacgttgcggcccagtttgataattacaggcagctgagcagaatcctgcatttctttcaacagttcgcggccgcggtcgttaaaggccagaacacggatgtaagctgggtctttggcattatcgaacatagcgcgatactgctgcagtaaaagctgcatcagaagtcttctgacacgtgaagcgggataacgtttggtaactgtggcgctgactacgtcttggaatgtagtgcaggaagcagcttctgccagacggttttccaatccttcgctgcattggcaggctgcggctatttgggccggtgtcaaagaacgcagcttgtataaaagcagatggttcagaattttatcactgatatccattcggtgctgaagatctgcctcacgcagcagctgggctgtagttgccggaactgtgctgagcagcgcttcatcgatgccatagccgcgataatgctcacgaatggctgttgcgccggcaataggcccgttgatggttttatctttatagccgctgccgcggcgtttaacgacgacaggttcgatctcgtaaccgccgtgcagaagctggcggcaatattctaaagccaggatattgttaggatgttcagcaatcgtcagcatggaagggtcttccgccagcgtaagctctaaagacttggcataactgtgcccttcatccagataatgatgcagtgcgtcctgaaaaacaggctcgttcaaaaattctgcggtgagcatcagctgctgcgaattggctgcttccgcaccaaaagcaagatgcgataccatcccggtagcagccagtaattttacagctcctgcagcaaaaaattccgcactgcggcaggtgaaaactgtcggcagctctaaaacaaggtcaacgccgcctaaaacggccattctggcacgggtccatttgtcagtcagggcaggcaagccgcgctgtacaaggctgccgctcatagcggcaatgacaggcctgttgccggctatccgctttgcttcgcgcagatgatgggcgtggccgttgtggaaaggattatattctgctacgattcctattgctttgctcattcatattctccctcatttataatgtttatactagcgattatcatttaaatagtgtatactatatgatataata

SEQ ID NO: 9993 - DNA, 70597 bp, Unknown
  gut microbiota DNA sequence
ttcagttttcaaggttctgcctgccgccgcatttcggcgacttgtatataatagcattccccgttacttctgtcaacaccttttttgtaacattttttatatttttgcatgatacaccaggcagcgttggcaacgtctcccgcttgactacaagccattccccagttatttttttgaaaaaataactgtttattgcattgtccgccgtccaaaaacgcttctataatagtttaccttttactgaatttacaaatcctgccacactaaaaataaaaatccggttttgccttctacagcaaaaccggattcgaacaacttaatccaaactattattcccgatgtgcctccatcgaacggctggcaataatatctactcccaatcccagaatattttctacaataatctggccttcagtcaccggagcctttacggctatttggcgcaatgccgcagcacaatccaaaatacgttctttaggcagtgtagttttagatacgacgggcaataatggtaaaagtcctccttttacctgtacggtacttgtcagcatccgcctgggggcaactacttcatcatgggcatatttaggaccacgggggcaggtattaccggtaacacttgttaccgcaccgtcttctatagtaacagtcatctcacaacccaaagggcacatgatacagttcattatacgagtttctacagccatttttatgcctccttgttcaatgccacagtcaaagtttctccgataagcgctgtcttttctgctggaatatcgacagcaatcatttcacttggcttggcaacaggcagcatttttgtcaaaatgacattttcgccgctctttacttctaattttactttacgttccggattggcaacacgcataaataaacgtgctttttcaccattttctggcagagacagtctttgcggtacacatgtacgtactccgttcgaggcaatcacatttactgtacgcaagtcgccatccaatttttcctgcgcatctaacgctgcaaatttacctgctatttccgcttcttccgaaacaaaatctaccaggtcgtgtacatgtacaacattgccggcagcataaaaaccaggaagactggtacggcggcgttggtctacgatagggccgctggtcagaggatgcatctctaaatccaaactgcgcgatagttcattttccggaatcaagccgacagaaagcagtaaagtatcacattcaatatcaaattcagtcccggcaatcggctgcattttttcgttgacctttgctacagttacaccggtaacgcgatcacgtccgtggatctttgtgatagtatgggaaagatacaaaggaatatcataatcatcaagacactgcactatattacgggtcaaaccattggaaaacgggcagatttccaaaacggcctgcactttacagccttccaggctcattctcctcgccatgattaatccaatatcaccgctgcctaaaattactattttatgtccaggcagataaccttccatattgaccatccgctgcgccgctccggcagtaaaaacaccggccggccgttcacccggaattctgatcgcaccgcgtgtacgttcgcggcagcccatagtcagaataacggttctgcctgcaattttcagcagtccatgttcagggctgactgcaattaccgttttgtcctgcaaaacttccaaaaccatcgtatcaaccaaggtttctatttccggtttatctttgatcatttcaatgcaacgataagcatatccgggtccagtcagctcttctttaaaatgatgcaagccaaaaccattatgaatgcactgctgcagaatgccgcctaattcccggtcacgctcaataaccaaaatactttcagcaccattctgccaagcgctataagcagcagaaagtccagccggaccaccgccgacaataattacgtcatataaatttttcatttttatgcttccccctcatctgcagagtttttttcataaaacaaatgagaatcagcacgttctttcaaaacttccggtacgggtatacccagttcccgtgccaggatctgggtaacgcgcggaccgcagaaaccgccctgacagcgtcccataccggcacgcgtacggcgtttaacaccgtcaactgttttagctccgcagggcgctttgatagcagcgataatctccgcttccgtgaccgtttcacaacgacagataacacggccatacaatctatttttttcaataagctttgcctgctcctcatgtgacaatctatgaaaaagaggattttgcggtaaagcagctttaaaatcagcttttacagcggccggacaatatgccaacacagcttcaacaatcatttcggctactgccggagcagctgtcagtccaggcgattgcatccctgcagcattaaacaaacctgctacaggtgaagcgccgatgacaaaatctccgctgccggaaactgcacgcagccctgcaaattcagtaatcgaagcacccatcggcaaatttggaatcagttttctggcagaattcataatttcgtccatccctgtcagagtaacggcagtatcttccttattctccatatcctgtgcattaggaccgataaatgtattgccatgcgtagtcgtacagatcagtatacctttagactttttattaggtgttgggaaaacaacgcctttaaccaaactggctgcagcagttttatcaaaaagaatatattcgccgcggcgcggatgaatagtgaagctttcatcgccagccaaacgagcgataccatctgcataaacaccaccggcatttatgacacaagcagccttgatcaaaccttttgaagtttctacagccgtaattctgccagcttccttaataaatccagttacacggcagtccgtaactacttcagcgccattctgcactgcacattgcgcaaaagccacagccatggcaaaaggccagcaaacgcctgccgacggcgcccataaagcgccaacaactgttgtcagatttttttctttggctaaaacttcttctctatttaaaatacgcaggccttcaacgccgtttttctgaccgcgttccaataattcctgtaaagtctgcatttcttcttcactggtagcagcaacaagagaacctgtccattcaatatccagacctaattctttttgcagctcatgatataatttattgccgcgtacattagtaactgcttttaaactgcctgtcggcgcgtcaaaaccagcatgtaaaatagcactgttagctttcgtagtacctgcagcaaggtccggttctttttcaacaagcacgcattttaaatcatacttcgacaactcacgcagaattgcagtaccaacaataccgccgccgataacaacgacatccgctgttttgaaaaattccatcatttcacatcctaaacaaaaattctaagttatacttagtaattttatcacattctttacaaaaaaagaacttactttatagtttttacaagaaaaatttcattttttgtcacccacgggacttttaaagtccctattgcttaaaaaaatatcctgtcaaatttgacaggatattttaaaaattattttacagctttatccggaaaaattttatttaaaaaatctatacatttatcactcaccggcgtcagtaaaacccaactcaaaccaaccaaagaaatacttaaagaacctacaacaatatctgtaaaccagtgcgctccggccataatacgcggcagcataaaaattattaaaataatgcagctgacggcaaaagcttttttgccaaaatatctcagcatgaaaccggcataaatcatcagcatcagaccatgatcgcctggaaaactgtcgccagaataatccttagttttaaaaaccagcattttactgacacgatgaatattttcaaaaaatcctgtcggactgcatcgctgtacaggaatcaaatgccccagctgatttaatattaccgcaaaaaacagcatcgtgacaccgataaaccacatttttcgtttacctaaatgatcctgtttagaataataataaccatataatgccaacatagccattaaagaaattatatcgaaatgacgtacattagtcagaccgacaaaataagtaaaagagctttcaggttgaagctgttcattaaagtaatagaaaatgcttttatccaatgtaaaccaaaaaccatgttcagcaggtaaataccagctaaaaaatattgttaaacctacagcatttaaaaatataatttttcctaagttttttcccacttccgactccttttactgcgcctctttctgcaagtccttcaacaattcctgttgtttgcctgcatctaataacttaatcattttattttccactattcttacagctgctgcatcaatagcggctgttgtcaatttatttgtttttacagcttccagtacaccctgataaacctgctgctgatgttcataattatgacaaaccagcaaaacatcaactccggcctgaactgctgcaacccccatttcacgaaaaccatacatacttgttaaagctcccatttccatatcatctgtaatgacgataccctgaaaaccaagctcattacgcagaaaattattgattacctgaggtgaaacactggccggcaatgtatccagtcctgtataaatcaaatgccctaccataaccataaaatcctggttgtcaaaattttggataatatttttaaatggtattgtgtcttcctgcaataaaatctctttagaagctgtaatccgatattgttctgtatgcggatcgacctcactttttcccataccggggaaatgtttcaagctgtaaataattcctgcctgatcataaccacggcaggccgcttcggtaaacttgctcacggacgcagcatcgtgcccataagatcttccataaggaataccaatatccaaaacaggagcaaaatttacattgaaaccaatcgtctccaattccatagccgtctggtaagcccagcgacgtgcatcttcaggagtgccctgttcagctattctggctgctgcaggagcaacggtcaacccctgcttcattctggcaaccatcccgccttcctggtcaacacataaataaagcggtaatttattatattctttattcagtcgctgcaggttagcattcagtcctgtaacctgatatttattattcatattgcggtcaaataaaatcacgccgccaacatgataatctcgcagcatgctcaacgcaccctcgtctatttccgtaccatcaataccgatcagcagcatttgtccgattttttcttctaaactcatatcggcaaccatttttacagccgcatcatgcaatgtcggattttttacttccgatttaggttcagcactctgcccacagccagtaaacaaaaaaaccgtcataaaaactataaaagccagtcctctgccggcagaaaatattcttttcatagttacctcatttctaaaatttagctatatgtatattttaacatattttctttaatttttacaaatagttttcaatcgtctctcttgaaaaattgacagcttcattcgattaaattagaataaaattaaaaagaaaagcaggtgataactaatgaaacgtattctttatctgaccttaactatcatgctttgtctgacattttttactgctgtaacctgggctgaggaaaaagcttctgccgcctcagataaaattctgagccaacagcaagtcgatgagcttttgcaggctgatgataatccggctgcttatgttaagatagacgaagatgcttacaaggtctatcccgattttaaagataaaaaagcagtccgtaaagaactgttaaaaaatcttcctactaacaaagtgctttatttactgacagccagtgagcagactttcactctggcttttgatgtagtaaaggatctggaaaaatcaggccgtctttatgataacagccgttatatgggtggtaaagatgattctgatgccggcgctgaaaacataaaggcaaatattcataagttctggtttatgaaaatcccccgcggcagcactgtttatgatgacggtgtaaatgttggtatcggccggcgacatcgcggcggtatcggtatcggctggtaaaatttatacaaaaaagaaaaagccctgctcagcagggcttttttattttattcttctgtagcctgggatgtttctatgatctcatcagaaacatcgactgtttccgtctgcacatcatctgttattacttcttctgtaacgtcatcttcagcctgctgaacggcagccaaagaaactactttatcatcatcattcaatgtcatcagtttaacgccctgagcattacgtccaaattgggaaatgccttcgacgtcaatacggataatgatgccggcagcagttatcatcataatctcctgccccggagtaataaccttcattccaatcacaatgccggtcttttcatttactttgatatttattacgcccttaccaccacgagtctgtttgcgatactcgctgacagaggtgcgtttaccaagtccctgctcagtcgcagtcaatacttcactgttttcactggtcacgctgtccatagcaacaacttcatcaccataattcagctgaataccgcgtacaccgtgagcagtacgtcccataggacgcacatcctgttcatcaaaacggatcgcaataccgtttctggtagccagaatgatttctgaattgccatcagtcaattctacaccaataagctgttcattttcatccagagtaatagcaatcaatccaaccttacgtgcactgttaaaatcttccagattggtctttttgactgtccctttatctgtagccataaacatatactgctctgtcttaaactctttcaccgggataactgctgtaatcttttctccctgctcaataggcaacagattgataatcgccgttcccttagctgtacgtccagcttcgggaatttcatagcctttttgccgataaacacgacctttattggtaaagaaaagaatattatgatgagttgtcgacaggaacaaatgctctgcacaatcgtcatttttcttaccgctgccaccggttttgccgacaccgccgcgtttttgattacggaaattatcaagagtctgacgtttgatataaccctgatggctgatcgttatgacaatatcttcttcagcgatcagatcttccatatccatggaagaagtatcatgtgaaagaatcgtacgacgtgcgtcgccgaatttctttttcatttccaacagatcttctttaataatattgaggactttttgctcatctgccaaaacgctctccaaccaatcaatcgtttccataacgtcgatatattcatcgtcgatttttttacgttccaaacctgttaaacgctgcagacgcatatccaaaatagcctgagcctgacgcaggcttaaagtaaatttttctactaacgcagttttagcaatatctgcattagcactgctgcggatagtattgataactgcatccagattatccagggcaattttcaaaccttccaagatatgagcgcggtctttggctttacctaattcatatcttgtacgacgggtgataacttctttttgatggttaagatagtggacaaggatttctttcagatttaaaacccgaggatgcccgtcaaccaaagccagcatgataataccgaaagaatcctgtaatttggtatgtttatataattgatttaaaataacatcaggaacaacgtcatttcttaattcgacaacgatacgcataccacggcggtcagattcatcacgcaaatcagtaatgccttcgatcacaccgtctttaactaattgagcaatactttcgatcagacgggctttattgacctgataaggaatttccgtaacaacgatgcggtgcttgcccttctgcatgggttctatttctgcctgtgcgcggatttttactataccacggccggtagtataagcgctgcggatgccttcggttccaaggatcgtagctccggtaggaaaatcaggacccttgattgctgtcatcaattccggtatttctatatcagaattgtcgatcagcataatcaatccgtcaactacttcactcagattatgcggtgggatattggtggccatgcctacagcaatgccggcactgccattaatgagaagagcaggtaccttcgccggtaaaacgcttggttctttcagcgattcatcatagttaggcacaaaatcaacagtttctttttcaatatcttccagcataacttcagcaaccttggccatacgcacttccgtataacgcatagcagcagccgagtcaccgtcgacactgccgaagttgccatgaccgtctaccatcagatagcgtgtcgaaaaattctgtgccaaacgtactatggcatcataaacggaaatatcaccgtgaggatgatatttaccgagaacttcaccaacgatacgggcagattttttataaggcttgttggatgccataccggcttcctgcattgcatataaaattctgcggtgtaccggttttaaaccgtcacgtacatcaggcaaagcacgctgcacgataacgctcattgcgtaatcgatataggatttttgcatttcttcttcaatgtagaccggtaaaactttaccagtacctgtctctaaatccacaatatcacctcaacatctcataattacttaaacaacaattcataaacctgcttgcctattaaaagcgtggttacgatcaaataaagcggtttaacataagaagcaccatgcctgatagccatacgggaaccaaaataagcacctatcaccatggcaaagcccatcaaaagaccataagtccacaaaactgaaccacttaaagtaaaagacaacagcgctccgataccactggcaaaattcagggccttagcattaccggctgccgttacaaaatcataacccaaaaataaaaatccaaaaatcaggaacgaacctgttcccggaccaaaaaaaccatcataaaagccaataccaaaggccattactacagacccaagcaaggctgccaatcccaattgtttaactgccgatacatcgccccagtctttacgacggtaggtgtaaacagcaactgcgactaaaaggacaacgatcacatttttcatcagctgttccggcagaagataaactacataagcacctaaagccgatccgagaaaagaaagcggcatcagacttatggcaaccttttgattgatctttcctgcacgccaaaaagaaaaaacactcatcaaaccgcccatagaagcagccagcttattagttcccaaagcaaaatttacaggcaaccctagggccagtaatgccggcgtagaaattaaaccgcctccgccaacagttgaatcgataaatgcggctataaatcctgctaacaataaaaaagcaatcgtacttggatctaaaatttccaaaattttcccctcgcccatcaccaagcttaaagtttatatttaagataaaaacctacgcgaccctgattacaggtaaaaaccactttttcctgttcaaccatattactgatagcataaggatgagctgaaagcagtggcgcatactccaaattccattgaacgccctgcaaagtaacttcattgcaatctgttaatggcagcaacgacaaagcttctatattttcaggactgaaaggtttgaaaatcaaactttcatccttttggagcagtaataaaatttcctgttcatcagccataacaacctgcacatcacgttgaattttataattcagcaaagaaaaaacattactgtacaaatgatcaaatctgccgccccaaataccgctggcaacaatatttacagcttccggcatagctgccagtaaaagctgtaagtctgtatcatctttcagaggatcatgcagaagtatttttactcctgaaagctgtgctttttcccagcagtcttttgccgcactatcagcatcgccgcataaccaaacaggttttaaattattttcacagcagcattcgatccctttatcagcacagtaaatatctttagatgcagctatttgcaccagccattcggacgcaggctttctacctccggccaataataaagctgtagaagaaccctgcctggaagtttttatttccagctctccctgaggcaaaagtagcttccaattctccattaccttaaatccttctttttagcaggtgcaggtttaattatgatttgtccctgttccttataaattttccagacaacgtcaccattaccatttttaaaccaatccatgcttatttccagcaaatactgatttaatttttcttgagcttcagcaggtaataataattctttcgctgctgcagctttatttttcattttagaagaaactattttttcatcagcatcaaaagcattttcaaagctttctttttctacatagcctttaaacatttcttcatcagaaagattttttttgattttcataatgacctccgtaattacaggtccagatttcttactttaccggcattagcctcaataaattgacgccgtggttctactttatcacccatcaatatggagaaaattgcgtctgcttcagcagcatcctccaaatgtacctgcaaaattgttcttccgtcaggattcatagttgtttcccataactgctccggattcatttcacctaaacctttataacgctggatatagggattgctgtcacgaccaacttcatccaaaacagtctgcagttcatcatcgctgtaagcatataaatgcttctgacctttacggaccagatataaaggcggctgagcgataaatacatgtccttctttgatcaaaggctgcatataacgataaaagaaagtcaacagcagagttctgatatgagctccgtcgacatcggcatctgtcatgataataattttaccgtaacgtgctttttccagatcaaaatcttcgccaataccacagccaaaggcagtaatcatatttctgatttcgtcactgcttaaaattttatccaatcttgctttttcaacattcaaaatcttgccgcgcaaaggcaggatagcctgaaaacgacgatcacgtccctgtttggcactgccgcctgcagaatcaccttcgacaagataaatctctgtttctgaagcatccttactctgacaatcggctaatttaccaggcagactgctgatttccaaagcgcttttacgccttgttaattcacgtgctttacgtgctgccatacgtgccctggcggaaagaattgatttttctacaatcctcttggcaataacaggattttcttcaaaaaattctcctaaaccttcgctgactagattatcaacgatcggacgaatttcactgtttccaagcttagttttagtctgaccttcaaactgaggctcctgaatcttaatactgataactgcagtcataccttcacggacatcatcaccgctgaggttttcttctccgtctttcaaagcacctattttacgggcataatcattgatagtacgcgtcattgcctgtttaaaaccgcttaaatgtgtgccgccttcttcagtattgatattattgacaaaagtaaataaattttcagtataagtatcgcagtactgcagagctacttcaacaatattagtatctttgataccttcgatgtagataggatcatcatggagcttatccttattttcatttacatactttacaaattcaatgataccgccttcgtaatgaaagctttcctgttttccagtacgttcatcattgagattaatacggatacctttatttaaaaaagccagttcacgtattcttaaacgcagggtttcataactgtagataagttccgtaaaaatcgtcggatcaggtttaaaatgtacagtagtacctgtttcttcagtagtacccttttcataaagcggcacaactgttttaccacgggaaaactcaattccataaattttaccgctacgacgtacctcaacctccatatgctcgctgagcgcattaacacaggatacacctacgccatgcagacctccggaaaccttgtagcctccgtcaccaaacttgccgccggcatgcaggatagtcataactacttctacagcaggcttgccaactttatgcatttctacaggaataccacgaccattatcacgtacagtaatgctattatcgctatgaatagtcacatcgatagcatcgcaataacctgctaaggcttcgtctatactattatcaactgtttcatacaccaaatgatgcaaaccacgggcagaaatactgccaatatacatacttggtcttttacgtacagcttccagaccttccaggacctgaatctgtccggcaccatattgtcccttaacctcagttgcttcttccaaattagacatagtaacctccacattcctataattcaagtatatttaatactttccttcaacgatcaaaaacttttataaatggcatcactgccaaaatcttcttcagcccttcgttttaaagtcagagcggaaattcccgataaatacaaagtatcagttgttaaaatacagcttgaacactcaccattttccgataaatcaataattttatatttatccttattcacagaaatataattatcataaatttccgactgttgatcacgaatattaaaaatagctataatatccgtattttttatcatacagtcggcaccaagatgcagatacatattaatatttcctccgcaatcctttaataatattttgtgcaagctgttcactgattttatcaggctgcatccctgtttttaacatcacagccgtcatttcttctctgatatcagactgattattataaaccttggcataataatactgtttcaaagaattttttacactatcgaataacattttatcacatttgacatatttttgacagtcattgtaattcagccaaggttcagatgtcaaaatagatactatttctgttctcaatttctctttttcataacgctggcagacgcggcaaagatcatttttttcaattaacgcagcaccacaatatttacatttcatatcattgttttcgataagtaatgctttttttctttgcagacaaactttcctgaaatgagcaagctttttctgcaattcctgattattaatatttaccagtgcctgtctaataaaaattttctctgattccgtcaaaggtttaaaatttaatttcacttcctgttcctctttcggaagctgcaaaaaattttcaatagagcctgtgaaaaattttatatccttgacagggttattagtcataacacgattgatattattaataaactgctgtttcatcatcaaaagatgattagcccaaacagagctatccgtatttatatataaaactttgtgttccaaacgtactggttttgaatgcttagctacgttagcaccacagatctgttcccatttactctgcatagaaaaaataaaatatttattacgaccttcctgattaggaagcatttttaaaaggactctttctataccttccatttttatccctctgcgattctgccttcaataatcctgaaatacgcatttccactcaaatccggaatcaaagctttatcgtttaccgtaataaaagtttgaactttaccatcaataaattttaatagctgacaacgtctttgatcatcaagttcactcattacatcatccaacagtaatacaggaaactcatctatttcctggcggacatattcaagctgtgccagttttaaggctaaagcagcactgcgctgctgcccctgtgaaccaaaagctttcaaaattctgtcatttactttaaataacagatcatcacgatggggtcctatgccagtactgcctcttaaaatatctacctgccgccgttcaaacagcttactgcgatagaaatcttcccaacagatagcttcatcaggataaagaagctcgccattattagctttaagttcataaaaaacagttaatgtttccaattcaccagttaaagcagcataaatatctttagctatattttttaatttctgcaaagcggccagcctttttacagctattctggccgcagtcagcacaaattcctgatcccaggtcaataaaagctcaatactggcattattatcacggatatctttaagaagcctgttgcgctgctgtaaaatacgattatattttatcaacagatcataataagctttatcagtctgtgagatctgcatatcaaaaaaacgtctgcgtaaagcgggctcacctttgataagctgcagatcctcaggtgaaaacatcaccatatttaaagttccgtaatgttccttgggccgaacctttacatcgttcaaaaacaattcttttttattcttaccatcgagctgctgtctttttattttaacatcatttaccccatgtaaatcttcaaaattaataccaacagctaactgatttgtatccagacgctgcatatcatcttcctgggcagtacgatgtgacattccaaaggcagcataaaacatcgcttctaaaagatttgtttttccctgagcattttgcccataaaagatattgaccattgaagtaatttccaaacagcattctttataatttctaaagttaactgcatagattctttttactttcataaattattccgttataacttttatttctacttgctgatctaaaacaacagtatcctgcggaaaaactttcttgcgtttttccgtaactataacaccattcaacgtaactactcccgcttcaatagcctcatgcgcctgtcctccggtctctaaaactcctgcatatttcaaaagattagagatcgtaataaattcagtagtgataccgacagttattttttccattttttaccttctcgcttaaaatacgactctgacaggagtaacgatataaatataattactttcagcaatcggtttaatgcaaacaggactcagagaagtatttaactccatcgtagcctgttcatcagtaagattttttaaaatatcaatgatatatttagaattaaaagctacattgatcgtttcgccctgagtttgacattcgattacttcacgtcccttaccaacgtctggactgcttgagcttacaacgatttcattatttccgacacttactttgataatactgtaatcaccatcactggaaaataaagcaacgcgttctacagctccggccagttctttaacattgaatagagttttaatgttaaaagcaggaggaataactctacgataatcagggaattttccttcgattaagcgggaaacaattaccactttatcgatctgtaccatgatttgattatttaataaagaaagttttacttcctgaggtaactcacttgttaaattacgagcaatttcacttaaaactctggaaggaataatcattgacatagcttcgctgctttcctgttccatagttttgattgataaacggtgagtattagtacctacaaaagttatcttaccatcctggagttccactaaaatacctgtgaacaaaggtcttgcttcgtctgtagagcaggcaaaaatagtttttttaataagttccttgattttttcatcttctaaaactatttgtttatcagcattaaattctggaaattttggataatcatcttcattcatcagtaagagctgaaaatcagatttatcggattgaacattgatagttttttcttctttattttttacgatggtaacattttcgccaggaagcttacgcatcaattctgaaaaatgctttgctgaaacaactatttctcctttttcctgtatttccgcttctatactgcaagctatagccatattcagatccattgcctggatctctaaaatgttattatctgcaattaaatggattccggaaaagataggagtactaggtttggaagaaatagctctttgaactgtttggattgctttgttaaggttagttgttttacaggtaaaaatcatgttatacagacctccatcttttttattattgctatattaatttaaaatcttagtagacgtcgtagtagggagtgtgaatatgtggaaacagcctaaaaacactgataaaagcttttatgaaacttgttgatataagtgtggataatttgggaaaatttattaacattatcaacagttttttgtgtgatgctttttattaactgtttatccacagaaataacgcaacttatccacagaaactgtagataagtattatataatggtagaattttgaaagttattgttttaatttatctacaaggtaagtaatagttttttcacaattaggatcttctttgatcttttttacgattttttcatatgcatggataacagtagtgtgatcgcggcctccaaaaaactcaccaattcggggataagaaaaatcagccatttcacgacacagatacattgctatctgtcttggataagcaatattttgagtacgtttttttgtaaaaaattcttcttttttgattttgaaataatcagatgtaacctgaatgatatcgtcaaaagtaatttgtttgtttttagtgctggttcccatagcgtcaagtattttttttgccagatctatagttatcggacttcccatcaatgaagcataggctactatttttgtataagcgccttctatttcacgtatattggtgtcaatgctggatgcaacaagagaaataacatcatgaggaatagagatgttttctgattctgctttttttctcaaaatagcgattcttgtttccagatctggagattgaatatctgcgagaagtcctgattcaaaacgtgaacgcaatcggtcttccagcgtttcgatttcacgcggaagacggtcgctggatatgataatctgtttgttagcttcgtataaggtgttgaaagtatgaaagaattcttcctgtgtcatttctttattttttaaaaattgaatatcgtcgataattaagcaatcgatattacgatatttttttctgaaagcatctgtatttttattttgaatagaattaattatttcattggtaaatttttcacttgagatgtataagattttcattttggaatcatttatttttatctgattgccaatcgcatgcatcaagtgtgttttacctagaccgacaccgccataaataaaaagtggattataggctttagcaggatttgaagctacagcttgagctgctgcataagcaaacctgttggaattgccgataacgaaagtttcaaagatatattttgggttaaggttgctttggatatcatcttcaaaaagatcttgctgggtaaaactgttttttacaggcggcagaactgcctcaggaagcagagacctgttttcagtttgtactggagtagtttctgctgaatttatagggagttcttcagttttcaaatcaaggttttcaattttaaactgcaggtttgtgccggtaatactggcaagcataccttcaatgactgtagtatacgtttcttcaagccatttttttgtaaaattatttttggcgcctacttttaagtaggtatctgttatttctaagggaatcaaaggtttgatccaggcattataaacattttcactggtagattcatggaatttttccaggaattttacccaaacctctgctaaatcgtacgagctcataaaatacatccttcctgtggctactcataaacggcttgtaaggcgttgaaataataatttgagacaaaaaataatagcaaggcttataaaaaatcctacagtcggttttctgtcgctgtaaaatataaaaaatgacatagtaagactattattactatcactatattctatcaaaattaagagttattagcaatttttaattgagaagaaaattttgaaggatagaaaataataaaaatttctttaactaactgctttattcttgacactttaagtcgtttctaatataatttctgtagctatcaattcaaatcaatatagaatttgataaaactagtgagtggtaaggaggtaagatttcatgaaacgtacttttcaacctaacaaccttagaagaaaaagaacccatggttttagagaaagaatgaaaactttgggcggtcgtcaagttctcaaaagaagacgtgctagaggcagaaagaaattgtctgcataatatcataaaaataggccgcgagagtggcctattttttccatgcgggcaggtgcaagaatttggaaccaagaaaaaagttcacttttcctaaaaaaaatcgaatcaagtctaaagccggttttcaattggtttatactaccggacgttctgtcgttgacagtttatctgtactttatgttttacctttagacgcagaaggtcctaagattggttttgctgtcggtaaaaaaattggtaacgccgtagtacgtaatcgtgtcaaaagaatgatgagagaagtatttcgtcatcataaatcggaattgttgacgaatatacagcttatttgggtagctcgtaaaaaactggctgctgcagatttaaaaacttatgatcgagtatttatgcgtttagctaaaagagccgttttattgaagtaaggtgaatttctgtgaaaacattgatgattgtttgtatccgtttttatcagttatttatttcaccgttatttccgcctacatgcaggttttatcctacatgctctcagtacgccattgaagctatccgaaaaaaaggcgctttaaagggcggctggctggcagttaaaaggatagcaaaatgtcatccttttcatccgggcggttatgaccctgttagttaacaacttgataatgcaaattaaagtagtaaatatatacactaacctctaaggagtgatatcttggactttctcagtaatattgttcagcaggttattacggtactttataatatgactgctactgtaggtttacctaattatggcctggcaattatcattatgacgattattgttaaaatactgttgtatcctttaacaaaaaaacaaatcgaatcaacaaaagcaatgatggctatgcagcctaaaatgaaagctatccaggaaaaatacaagaacgataaacaacgtttgaatatggaactggcaaacctttataaacaggaaaatgtcaatcctttagctggctgtctgccgttattagtacaaatgccgattatgattggtattttctatggtattcgtgattttcattatgttggaccggctaattttttatggattcaaagtatctctaatccggatccgatgtatatactgccggttttatcagctttgactacttttgtgcagtcaaaacagactatgccggatacttcttcagcacaaaataagatgatgctgtattttatgccgctttttattggctatatcagttttagcttccctgctggtctggtactttactgggttgttatgaacctgatgcagatcggtcagcaggcactgatgaataaggctactgtaaaataattgctacaggaggcgaaaaagatgggtttcctagaaaaaacaggaaaaaatgttgatgaagctttagaacaggctttgaatgagttaaaaactactcgggataaagtaaatatcgaagttattgaagaagcgaaaaacggtttatttggtttattttctaaaaaagctaaaattcgtgttactttaaaagatgctgctgctaaaatcggcgatgttgttgaagaagctttagataatattaaagctgacgttcaggccggtaaagaagaatataaaaatactgctgtagacacagatacagaagcagcagtaaaaaaagaatttgtagttgatgaagaagcagtccaggccggtaaggaatttttacagaaaatattccattccatgaaaattgaagtggttatggaaaaattcgttaataaagctgatagtactgttactttaaaattacatggtccagatatggggatactgatcggcaaacacggacagactttggatgctctgcaatatctgactaatctcgtggctaataaaaattccagtgaaagaattcgtattattatcgatgttgaagattaccgtgagcggagaatagaaacattgagccgtttggctgtacgtcttgctgataaagttaaacgtaacggtgaaagagtagttcttgaaccgatgaaccctcatgaaagaaagattattcatatggcgttgcagaatgatcgccgcattaccactttaagcgaaggtgaagaaccttatcgtaaggtagtaatcgaattaaaaaaataatttgtgtctgagacccagtaatttattttactgggtttctctattggagaataattatggcaaagaaacatacagtttctgaaactaacgaaacaatcagcgccgttattacggctttaggtgaaggtgcggtaggaataatacgcatcagtggtactgaggctgctgcgataggtgataagctgtttcgatcagcttcgggtaaaagattgaccgaacatacaccgcatctgcttgtttatggtcatgtagttgatgaagaaaatagtaaaatagacgaggttcttgctgtttatatgcagggaccacattcctatactgcagaagatgtagtggaaatacaaagtcatggcggtttacaatcgttaaaaactatcctgggtctaacctataaaatgggcgctcgtccggctgaaccgggcgagtttacaaagagagcttttttaaacggacgtatagatttgatccaggcggaagcagttatggatattattaaatcacgcagtgaagcttctttaaaaatggcagtacgtcaacaggatggccaactgtctaaaaaaatcaaaggtctgcgccgtaatttattagatattgtagtaaatctggaagcagttattgattatccggaagaagatattgaggaaataacttttaatactgtcagtgaaggtatggaaaaggtcaaacaggaactggaatatctgcttaaacatgctcataccggtaaaatattacgcgaaggtctgcagacagtaattgtcggtcgtcctaacgtaggcaaatcaagtcttttaaatgctctgctcagtgaggaaagggctattgtttcagaatatgccggaactacgcgcgatgtaattgaagaacagttattgcttggcagtgtgccattggtattagttgatactgccggcatcaggcagacagaagattatgttgagaagataggggttgccaggagtaaggaacgtcttgacaaagcagaattggctgtagtagttttggatggatctcagcctttaaatgaagaagatgaagaaattttaaatgcagttgcaggtaagccctgtgttataatagtaaataaaggtgatcgaccgcaggtaaatgatttaacagctttacagaaacgctttggtaaagatagagtactgcttttatctgcaaaaaccggcggtgggctggaacagtttactgcctggctgcaaagttatgtttatggttcagagcatgctatatctggtggtgcttatgtacaaaatacacgtcacgagaatctgctgcgtgaagctttgttaagtgtagaagaagcaatcagagcagcggcatcgatgctgccatatgattgtctggtcattgatctgcataaagcgattgatgctatgggtttgattacaggtgatactcttcaggatgaaatcatcaatgagattttttcaaaattctgtgttgggaaataagagtttaggttgtaggtgacaaaatgtatattactgataattatgatgtcgtcgttatcggtgcaggtcatgccggagtagaagcggccctggcggctgcacgccttggcggcaggactcttcttgctactttgtctttggataatattgctttgatgccctgtaacccttctgtcggcggaccggctaagggtcatttagtgcgtgagattgatgctttaggcggtcagatgggtctaactgctgatgaagcctgtattcagatgcggcttttaaatacaggtaaaggttatgctgtccatgcgttaagagctcaggctgataagcctttttatcatactttgatgaagcaggttgtggaaaaccaggaaaatctggatgttaaacaattgatgatcgacagattattagttgaaaatggagctgtagttggtgtagaggctgaaacgggcgaagtttttgaagcgaagtgcgtcattttagctaccggcacttatctgcgcgggcgtattgtttatggtcaggtaaattatgaatcaggacctaacggattgcgctcagccaataaactgtcgtcttctttattagagaatggagtagagctgatgcgttttaaaacgggtacgccggcgagaatcgatgcccgcagcctggattacagcagaatggaagctcaatatggcgatgaacaggtacgtaatttttcttttatgagtacgattacggagagaaagcagattccctgctggctgacttataccaatgctgatactcataagataattcgtgataatctgcatttgtcaggtatgttcaatggtatgatcgaaggcgtcggtccacgctattgtccttctattgaagctaaaatcgtacgttttgccgataaggaacggcatcagttatttgtggaaccggaagggttacgtacaaatgaaatgtatgtgcagggaatgtcatcgtctttgccagcacatgttcagctgcagtttatgcagactatacccggtttggaaaattgccggatgatgcgcgccggttatgctattgattatgattgtcttgatccgctgcaattgcagcggacgttagaacataaagctatcagcggacttttttctgccggtcaggcgaacggtaccagtgggtatgaagaagcagccgcgcaggggcttcttgccggcgttaatgccatgcagaaaataaggagtaaagagccgcttattttaagccgcagcgaaggctatttaggtgttttgattgatgatctggttacaaaaggaacgaatgagccttaccgcatgatgacttcgcgtgctgaataccggctgctgctgcgtcaggataatgctgaccttcggttaacggaaaaaggcagagctgttggtctggtaaacgatgttcgttacgaagcttttactgcaaaacgcagtttgctggaacggacattgcagaatttgagcagtacacatttacctcctaatgcggaagtgcttgccaaattggcagagctgggaacagcgccgattcgttcggggatgtcactgctggatctgctgcgccgcagtgaaatgacttatgaaaaattacagcaggcttttgaagtgtcggagctgccggaagtagttgccgagcaggtagagatttttgccaagtatgaaggttacatcaataagcaaaaacaggaagtggaaaaagcattgaagctggaaaataaaaaaataccggctgatatcgattatttgagtatcaaagagctgtcttccgaagcagcagagaagctggcgaaagtgaagcctgcttcaatcggtcaggcttcacgcatttccggcgtttctccggctgacgtcagcgtgttgatgatagcgttggaagtaatgcgcaggaaggaatatgaatcatgacgtttgctgaaataatgcagttgaaagggaaagaagcgggactgagctttacggcacagcagctggaacaattcagtgcttattatgaactgcttgtggagacgaataaagtgatgaatctgacggcgataaccgagcctgaagaagtagccgttaaacatatgattgattctctgctggcatttgatgagaagctgtttggtgaaaaaactttagctgatgttggtacaggggcaggatttcctggtatccccctgaaaatatactgcccttctttaaaagtaactttgattgattccctggctaaacggctgaaatttttggaaacggttattattgaattaggactaaaaggtattcgctgtgtgcatttacgggccgaggatgccggcagagatcccaggcatcgtgaaaagtatgatctggtgacggcaagagcagttgccagactgagtgttttggcagaatattgcctgccgttagtaaaaacagacggcagctttattgcactaaaaggcagcaaatatcaggaagagatagctgctgctgataaagcgctgcaaattttgggcgggcgcctggtaagtgccgacgccgtaaagcttcctgggttgaatgatggtcgtgctattgtgaaaatagccaaaataaaaactactcccaaggcatatccgcgtaaagctggtttgccggacaaacaacccctggaataaatagtggaggttaagtttatgacagttgatgatggattttctgttttagaagcaggacgtgcggaaatgggtaccaagcatagcagtaaagcaatcgaggtagtacgggtgcctttagctaaggttataccgaatccttaccagccacgtaaaacatttgatgaagatggtttacaggatctggcggcatctattgcccaatatggtgttttgcagccgcttttggtagcacccatggaagatggcagcggtaattatctgcttatcgccggcgagaggcgtctgcgtgcttccaaaatggcagctttgagtgaaattcctgttattatcagtgattatactcaacagcagattgcggagatagctttgatcgaaaatctgcagcgggaggatctgcattatttggaagaagccgaaggctacgaaatgctgatgaacgaattccatctgacgcaggattctatggcggcccgggttggtaaaaaacaatcgactattgccaataagctgcgtttattgcgtttgccgcagcctgtacgcgagtctctgcgcaaaaatgccttaacagaaaggcatgccagagttttgcttaagctgccgacagaggcagagcagctgcagattgtagaaacgattgtaaagaataatttcagtgtgcgtcagacagaagaatatgtaaaaaaatatttggatacagatgaaggcgaagttactccgaagaaaaagcgtctggtgattgttaatgatgtgcgtatctatcttaacagcatcaagcaaatagtttctacgataaaagatgttggcattcccgtatcaatggagcaggatgttgacggcggtgacgtgctggtgactttaagaatccgtaatactaaaaaaccaaaagagccgcgtttgttttaagcctactgaagcagtggtctgtaaagatcactgcttttctttatgtatttttaagaatagttctgtacaaatccagctaatgtagtaaaatagaaacaaggtgacaggagaataagggagggtcaattccatggattataatgaggttttagaaacggcgcggacaaaaatcggtactaaatgtaaggcttgtcccatatgcaatggtgtagcctgcagaaatacgatgccaggaccaggggcgaaaggtataggagatactgctatccgcaattatcagaaatggcaggagatccgtgtcaatatggatactatttgtgagaaaaaacagatagatacaggtttggagctgtttggcaagcacttcagctatcctttttttgccggtcctgtaggagcaatagcaatgcattacagtaacgcttatagtgacgttacttataatgaagtcctggtttcagcctgtgcggaaagtggtattgccgcttttacaggagacggtctggacagcagtgtcatggcagcggcgacgcaggctatcaaagctgttgacgggcagggtgtacctactgtcaaaccatggaatctggaaacgattaaagaaaagctggccctggtaaaggagtctggcgcttttgccgtagctatggatattgatgctgctggattaccgtttttacagaatatgatgccgccggccggcagcaaatccgtttctgaactggcagaaattgcgcagcaggcaggtgtaccatttattgtaaaaggtattatgacggcgaaagcagcgttaaaagcgcagcaggcgggagcgcaggcgatcattgtttctaaccacggcggacgtgtcctggatcagtgtgccgcaacggcagaagtattgccggagatagcggcggcagtaggcgggaagatgcgtattattgttgacggcggcgttcgcagtggtgttgatatttttaaagcgctggccttgggagctgatgctgttgttattgcccgtccttttgttactgctgtttttggcggagggaaagagggtgtcaaagtatatatcgaaaaactggctgctgaactgaaagatactatggcgatgtgcggtgcgtttacattgaaggaaataacctctgagatggtgcgccgcagttaaatgtttataagtgcagaagcattatgaagaggatgtttcatgtgaaacatcctctttttactcatatttggaaatagtgaaggaaagaaagatggaaataataaaaattgtaagacgagaacgaaatttgctggaaatattaatgattatttgggaagattcggtgcgtcatacacatgattttttgagggagagcgatattaaagcgctgcgtccgttggtatacaagaatttggaatctattcctgaattatgggctattaaggctgaagatagctgttataagggtttcatgggcattgacggaataaagctggaaatgttatttgtcgcaagcagtgaacgtgggcagggatttggttcgaagctgctgcgccatgctgtcagcgggcttggagtgacggaagtcgacgttaatgaacaaaatccgcaggcctattgtttttatcagaaacaaggttttaaaaaatattcgcggtctgagttggatggacaaggcaacccgtttcctgttttgcatctcaggtatatatctgcgaaagatggttaaaaatataaagaaggcaggtagatcataatgaaatttcaggcagcacttctgattgtaaaaaatatggaaaggtcagtcaaattttataaaaaagttttagggctgagagttactatggatctgggtgcgaatgttactttaacaggcggagtagcgttacagactcaagaaagctggtgtgaatttatcagtaaggatcttcaaagtatcagttttggcggcaatgctgctgaactttattttgaagaagataaattcgatgattttttaaaaaagctggcagcaataaaagggatcttttatgtacatccagttcagcaatatagctgggggcaaagagtaattcgcttttatgacccggattttcatatcttggaggtgggtgaaaatatgaagtctgtctgcagaaggtttcttgatagcggcatgactatagaagctgctgctgtaagaatgaatgtgccggaaaaatttgttcgtgcctgtgtgagataaagctggaaggtggatagatgatgttaaaaatagaaatgctgacggtggaaacagttggtgcgttgaaacctttactattggagctggcagattaccataatcagacagctttaaatttccgggggctgtatccgctggtttgtgcagatgaaaagatcaggactctgcagcggggaatcagcgcaggcaaaactgtcgcagcagttctggctgttgatcatgggtggaaaggtttctgtgttttttcgcatactgatgtctgcggcagtattgactatctttatatcaggcaggagctgcgtgggcagggggcgggaaagatgctgatgcaatggatgcttgaacgacttgagcgtctgcctttgaagctgttggaactgaaagttgtttgtggaaatactgaagcggagcggttttatgaacattatggttttgctgccagaacaataactatggccaaagaattaaaataaaggctgctgtttatggaagagaatttatgctggaaaaggcattgacgcagaaagagttaagcgctttattagggatgacgacatttgaaatttataagaaactttgttggcagattgaagccgattatgatatggaacacatctggaataaaggcggcagttgctggcgttatgaatataaataccgtcgcggcggcagaactttatgtggattatatttgcgtgaaagctgtttatggtttatggttattttgggaaaagctgaaagggaaaaatttgaacaagacagagcaaatttttctgattcaatagtacaggcgtatgatgctgcaactacgtatcatgatggtaaatggctgatgatagaatgcctatttactgatctgaaaaagttattatatcttaaacgcaagccaaataaataataagtacgaacataaaaactgaaagatgaaggtggaaaatgtttaaattacgtccttgtcgaatttttaggagaacaatgggaaataatagaaatggagtggttggcaggtgagagataaatgtatactgccgtttttaataactgaacggctggaattttttcaattgacacaggctgatttgccagagctggaaatattgcttggtgatcctgagatcatgtatgcctgggaacatggctttactaaaatagaatcacaggcctggttgaatgaaaatcttcgccgttatagcagtgatggttacagctactgggcagttcgtaaaaaaaatgatggcagtcttattggggtgatggggatactgaaagaagtggcagaaggtaagcaatatattggaataggatatattctgaacaaaaaatattggggacaaggctatgcaggagaaggaactgcggctttgtgtcaatatgcttttcgtaaactgcagctgcaaacgcttacggcgcaggtcaggacgaataattttgcttcgcagcacattgcagaaggacttggtatgaaggcaatgtgtaattttgtgaaaatttaccgaggtcaggaaatgccgcattttctttatacgctggatcgtgataaatggctgaagacagcatcgaacggaactgtaataatgctggaactggaagcaaaaaaagattttttacaattattactgctgggggacgaagacgagaaaatgctggatcgttatctgaagagaggagatctgtttgctttatataagggagatctgaaggcgacagtggtcgtgacccaggaaaaagaggatgtgtttgaagtcaaaaacctggcggtatggccgcaggaacaacgtagtggttatggacgttttttaatgacagaaatgtgccgcttgtatagtcgcttgggaacaagaatgctggtcggaacaggtgatgtttttgaaacgctgaatttttatcaagcctgtggttttagaagaagccatgtgataaaaaatttttttacagataattatcctcagccgatttttgaaaatggcatacagcttaaagatatggtgtatttagaacgttttttgaagaacgatcgtaggcttaaaaagtaagctgtgttatgagatctatagttgtaatgataagctgtacatataataaaaagcgatgtttcatttgaaacatcgctttttgcttttatgctgttatctgatagccgttggttcttaatgcagcagcagccttctgcagatgggattctttgataaggatatagtcagtattataggttgaaacggcaaaaatactgataccggcatttgccagcagactggaaattttagcgaggataccgactaaagcaaaatcaagtacgccgcagatctttaaagcccgccagcctcgttcgcattgcagaactgctgcaggaaggtcggtttcagggcagaccagggacaattcttcagcagttttactaaaaaaaaacagcggcatctgccagtttatttgagaagtatcctgaatctggcacacagcaaaggtttgtggtagaatctgtaattgcatataattgctccttaaaatattaatgatactttaagtataagcagtacagtcgattactgcaaatttatttgccagagaatatctgtccggctacggcaacagcattgaggactttagggaaacccgtataaggtatgcagtgcagaaatgcttcgataattttgtcttcttttatgccaacatgtaatgctgcgttgatatgtacctgcagctgggcttcgcggccgcctgcagtcaaaaggctggacagcgtcagcagttctcgttcctgcagactgagcccgggacgttcgtaaatctggccaaaagcaaattcaatgatatagcgggccaaatcaggagcaatatcactgagattttcgatgacgttactgcctgcagtcccatcgattttctttaaattttctaaacctgttttaaaataattatcagacatttacattcacctccaaaatgattacaatgaaagtataaattttagactatactctaagtcaaggattaaggataaaaaatgaaaatcggtgcatttgcggaattaactgggatcagtgcttatactttgagatattatgaaaaaaagggcctgttgtttgttaaacgtggtcaaaatggctgtcgcaattatctggccgaagatagggaatgggtacagtttttgtgtaaattaaaagcgacagggatgctgctgcgtgatataaagagatatgcacagctgcgttataatggggacggtactattgccgagcggttggagcttttgctgaaacatcaggtttatgtagctgaagaagtacataaatggcaacagtacagtgaaaatctgcaggctaaaatagctgtttatcaagaacaattattacagcagcgacagaatgcaggtctgaaatagcagtatactcaggttatattacggcaattataaatacaggatgtaaattctttatcagcggatgaagaaaatgattgggtgttctaagtcacgccttgtttttgaaaggtgtagatttggacactttttttgaagggagcagacaaatggtaaaaatttataattttttgtgtacagaagcaaaaactatcagagaaaaagtttttatggaagaacaaggttttaaaaatgaatttgatgaatatgacgaaatggttccgcatgcagtactatttatggaagggtgtgctgtggcgacaggaaggttacttccgggagagcggtcgggggattttattattggtagggtggctgttttgccggagttccgtggcagaaatttaggggcacagatcatgctggcactggaacaggaagcacgcagagttggcggtaagcggatcagtttgtccgctcaatgtcgtgccagcggcttttaccagactttaggctaccgggaaattggtgaggcatatttggatgaattttgtcctcatattttaatggaaaaaagcctgtaaaataaaaaacagattttgatgaagttttagtaaaagcaaatttcattaaatatgtggataaaactgtgggttatgttgataaaaactcaaagcaatggtaatagaagcaaagctggaggaagttttggctgcaaagaatgttgcagcaatgtttcacgtgaaacattgccttgaagaagctgcgtaaaagacgatgatttgaaagaaagtaagtgaattttagtttttgctataggtgaaacacttaatttgtgataaaatgggaaacagatgaaattcaaataatttattttgaagatattaagggtgaggtgaagattttggttaaggttatcgctattgccaatcagaaaggcggcgtcggtaaaactacgactactgtcaatttggcggcgtgtctggcacagaagggacgcaaagtattattgatagattctgatccgcaggggaattctaccagcgggttggggtttgataagcgcgatatcaaaaagtgtatttatgatacgttgatcgatgatgtgccgatgaaagaattgatcatccatagttcctatgataatttggacgtactgccggcgacgatccagctggcaggagccgagatcgaactggtaagtctgatgaacagagaaggccgcctgaaaagctcattggaacgtgttaagcacgactatgattatgtgctgatcgactgccctccgtctttaggactgctgactatcaacgcactgacggctgccagttcggtgctgatccctattcagtgcgaattttacgccctggagggtgtcagtcagctgatgaatacgataaaattagtgcagagaaatcttaatccggctttaaagctggagggcgtagtgatgacgatgtatgacgcgcggaccaatttatcggccgacgttgtcgatgaagtaaaaaaatattttgaaacgaaaatgtacaatactattatcccgcgcaacgtacgcttgagtgaagctcccagccatggacagccggtcattgtctacgacccaaaatccaagggtgcgatggtttaccaggaactggcacgggaggtaatcggtgatgaataaaaaaggtttaggcaaaggtttgggtgcaatttttggtgatgcagccgatccggtcaatacagcggtagaaccggtacgtagtgacgaagaaaagaaggagctgcttctgaaagatattgttcctaatccacatcagccgcggcaggtttttgatgcagcgaaactggcagaattagttgaatctatcaagctgcatggagtaattcagccgttggtagtacgtaaacacggacgtaaatatgagatcgttgccggagagcgtcgctggcgtgcttccaaggaagccaagctgaaaactgttccggttattattcgtgattatgatgatgcaacgatgatggaaattgctttggtagaaaatattcagcgtcatgatcttaatccgctggaagaagcagaaggcatcaaacggctgatgaccgaatgcaagctgacacaggaagatgctgcgaaaaaagttggccgcagccgtactgctgttgctaatctgctgcggctgttaaatttaccgcagcagatcagagaatatgtttcacgtgaaacattgacgatggggcaggtaaaaccgctgctttctttggataatgaaaagcagcagcttgaagttgctgcggccattattgaaaaaggctggagttcacggacagtggaagacgttgtcaaagagctgaaaactgggcgcagattcaaagttactgaagaagcggtaattgttgctgaggaaaaagcaaacaataaaaaagtaaaggcagccgcggcaggagatgtttttaccagcgattttcaaaacaggttggtagaattattaggaacaaaggtcaaagttgtgcccaaggatgaaaaaaaaggcaaaatagaaatagaatattattcacctgaggatctggagcggatatatgatttgctgaacagaccggcgcagcagacattaaaaaggaagaagccctggctgtctgtttaaaataaagtgttgctgcattggtgaaagaatgaagtaagtgcaaaggatctggcacgagcagcgcttaccgggaggggaattatggtcggtttgggaacgctggttaactccggagcgattttagccggagcgggcgcaggattattgctgcgccgcggactgccggaaaaatggcaggaaagcatcatgcagggtgtggcactgtgtatcattgttataggtgtacagatggcttttaaaagtgaaaatatcatggttgttattttcagtattgttttaggtgctatcgttggcgaaggtatcgatatcgatacgaagctgcaaagatttggagattggatcggcagtaagctgattggcggacatgatgccggagcggccaaagctattggagaaggttttgttgctgccagcctgatttattgtgtaggcgcaatggcgattatcggcagtttgcaggatggattaaaaggtgatacaacgatcttattcgctaaatcgactttggatggtatcattgcgattatactgacggccaatcttggtatcggcgtcgctttgtcagcagtaagcgtactgttatatcagggtactttgactttgctggccggggtactggaaccggtcttaactaccagtattttaaatgaagtaactgctacgggcggtatgctgattatggcgatcggtgtcaatatgctgaaagtggtgcagattcgtatttctaatctgttgccggcagtgctttgggccgggatcatcgttgcagtttcaggtcttttataaagggagaaggaagaacaatggaacagatcaatcaaattttgggcaataatctgctgtttataatagcggtactactggtcttgatagtatttttgctggtgatgctggtaaatatgaatagtaagctgagaaaattacagtggaagtatgattattttactaaaggcacaactatggatttggacgaagtacttactcagacgctggaagatgtgcgcagtgcggaagccaaaataacagctttggaaaagagccgtgatgatctgcggctgcggttaaaaagttgtgtgcagaatttacgcgtgttaagatataatgcttttgataatacaggaagtgatttaagttattctgtagctctggttgatgaagaaaataatggtgtggtgctttcaagcatttatggcagagaagaaaatcgctgttatgccaaaccggttatagctggaaaatcccagtatgtactttccaaagaagaacaggaagtattgcagcaaaagtgataaaacagacaaaaaaagcatcgttttaaacggcctgtaaggctggcgaaatcaaaaacgaatagaatggactgcatcataaaggaaaaacgctcacaagcgatttgtgggcgttttttctgtgttgaccttaatcagcaaatggatcttcactaagaatttttttgccatataaagtttttaaatttgtgcttgtgtttttataatttttatctgccagcgagtttgtttcttccaaaacaggaaaaggaatctgcatgatattgataagcgtatcaaaaataaggtcattagtaaaataggctgacgtatgcttctttaaaatagccatagtatgcgggtatttttgaatatagttatcagagaaatacatatacaatggaatgcgtgccatatcgaaagtaaatctggaagcgtcgtgaccaagacctgcatcaacatcatcggcatgatctgaaaaataaatcatcccctgaaagtttggcagatcttttaccgtactaaaaagctgcttcatgacaaaatcgttgtaaagaatactgttatcatacttatcaatatgagattttcccgtccagcgattaaacgcatgcggataacgttcttcgtaagaaccatgattacccatcagatgcacaactatcagggctttgtcgaataccggcagtttttttaaaacatctaccagactcaagtcgaaatgagtagtttgagtagtttctcccagatgtccgtttaaccagtattgtgtttgtgactgatcagcaattacggaaaccggagtatcccaagcgccgtattttacctgattgcttatccatacagtatgaaagtctgctgcctgagcaatttctataatagatgctgcctgttccagaggcagagtattatactgatttttagctgttagagcataagtcagaacgggaacagtatgactgtgacaggaataggcgttatcaaaaagcagaaagccatgctggtttttgattgattgaagccatggtgtcgtaggccggtgataaccgtaagcagacatgtggcctttattttgcgattcgcctataaccagaacgtagacacctgcagcgtttttgggaagggattttaaagacccaagtattttttgacgggcgtttttttgggcagaaaaattatcatattgagccaaagcatttcttgtctcccgtaatgtattggtaaaaaaattatcaggggttatagaacttttatatactgtcagcaggttaagaagcacaaatacagcaatcgctactggaggcatattatttatgcggcagcttttaagacgcaagtgtaaaagcagagaaaacaccagataaacaagaacaagaaaaagaaataataataaagtctgcccagtaaagtttgtttgcagatattcgtaactttcagaaacattggtttgtaatagtgcaagaattgttgtggcagtggggaaactttggctggaagtataataaccccaaactgctgttgaaagaagaaacgtacagatttggagtaacagtactactggagaaagaagtcgtagagttttatatgcggtactgtaataatacagaaaaaaaatgatattggtaaatgaaagtgaaaatatagaataataagctatattgacggaagttataacttcgccggctgcggttttacaaaatagcagtgataaaagcggcagcagagctaataaataattgtaaaaataaattctggaataggagaatattgatgtaaggcagctcgtaataaatacggtgaataacagctgctttgttttggtaataataaaagttccgctgccaagcagctgtaggattagcaggactgcaaataaaataagaaaaaagtgcctaaattgtttggtgaaaatatttttcataagtaataatttgttttttatcattatatgcaataaaatcgcctccgaacaaatattttagcacatttgcccccccccacaagaccgcaaaactaaaaagaggttataatagctgttatttatttggaggaaataaaaaagcgattcctaataatttagaaatcgcttttataatgtttatatatatattggtaattcttatttttgtagaaaaagatgagcagttctacgcactacatatttccgtggaacagctgcagaaggatgaacattatttgcgcgctcatcaggtacttaaaccagattttagcataaataaatccctgtggacttacttcataggcaccggcaatacgtccctggacaccataagactccaaagcagaaagaaataacagcatacatccgggttcccagctgtcaccggtaatgagccagatacagtagaataagaaaagaatatcaatgagaaaataaatcagaaaaaaaatagtggttttatcaataaaaacaacatgtacctttttggtacttctgcgcgcttcgactatggcccggaagttatgcaggaataaagccagctcccggtgatatatgaaggaaaaaactttcgcacataaaaaaagtaagggtatataatgcataggagctcctatctgtaatcgattaacatacaaggatattatacatcatatcaagaaaagctgccaagccatttccatgaattttgtatacagtctatgctgaatggaaaaaagtatcttggatacggattaaaataaaaaaagtccaaaaaatacaaaatcgtaaggtaaattatttgttttttgtatggatttacaaaaaaagagttgacaaaagtgtgaaaaattatttataattgtgagcagatagttacaaacgtagctttgccaggaaaatactgttaagaggggaacagcgtcggctgctgcatagaagtaaccaatttatactattataggaaaaggggaaagaacaaatgaaaacctggaaaaaagttgccagtgctgctttggcagcgatggtatttgcttcgctgacagcaggctgcggcggcggagacaaaaagaaagaggctgcaaacagcaacgaaatcgtagtaggtgcaagctttgagctgaccggtaatgtcgccaattacggcaagtctactctttcaggcttaaaaatggcttttgatgaagtaaataaagccggcggtattgatggtaaaaaattgcgtatcgtggaaagcgataacaagtcggaaccttctgaagcaggtaactcggttaccaaactcgtcactcaggataaggtaatagctgttgtcggaccggcaaccagcggttgtgtagctgcttccacacctatcactactgctaataaagtgcctttgattgcaccttgtgcaactgcgccgaacattactgtcgaaaatggcaaagtaaaagaatttgtgttccgttcctgctttatcgatcccttccagggacgtgttatggcagaatttgctgataaaaacctgaaagtaaaaaatgtagcgattttgtatgatgcttccagtgattattccaaaggcttagctgaagtatttactaaaactatggaagaaaaaggcggcaagatcgtcgctaaagaagcttttcttgctaaagaccttgattttaaatctgccctgacgaaaatcaaatccactaatccggaagcaatctatattcccgggtattatgaagaagttgctaaaatcattaaacaaacacgtgaattggggttgaatgttccgcttttgggatgcgatggctgggatagtccgaagcttgttgaaatcggcggtcccgaagctttgaacaatacctatttctccagcgcttattccgcacaggataaagagccttccgtacaaaaattcatcgccggttataaagctatgtataataaagagcctgatgttttctgtatgcagggttataatgccggtctgattttagctgacgctattaaacgtgcaggaactgctgacggtactaaattggctgcggctattgctgcgactaaagacttgtctgttgccagtggtaaattgacttatgacgcagatcataacccgatcaccagcgccattattattgaattaaaagacggcgttcagaccttcaaagaaaaaatcacgctgtaattcagataaaaaaactgtttgcaaaagaatatataatatagaacccaggtagacccattgttttttagatgttttttagtccggcgtgttttaaacgcaccagattaaatatattttgcagttttcatcagagggggaaaaacaatgaaaaaagttaccaaggtattctcagtaatggtagcaagcgtagctttagcagctatgctcagcggctgcggcggcgataaaaaaccggccggcggcgataccatcaaggtcggcggtaatcttgagatgaccggcggcagtgccagttttggtatttcttcgaaaaatgctattgagctggctttcaaaaacattaatgacaaaggtggcattaatggcaaaaaactggagcttgttgtggcggataacaagtccgaagcagcagaagctaccaatgccatgcagaagctggtctctcaggacaaggttgttgccgttatcggcccaaacctttcctcggctacgatagccgcaggcgcgatcaataacggcagtaaagtgctggatattgctcctatggctaccaaccctaacgttacagttgatccggcgacaggaaaaacaaaagaatataatttccgcgcctgctttattgatccgttccagggtactgttatggcaaactttgctaaaaatgatttacaggcaacaaaagcagcgatccttatcgataattcttctgactatgccaaaggtctggcggcgttctttaaagagaactttatcaagaacggcggcactgttgtggctgaagaatcctatctgcaaaaggataccgattttaaagctactttgactaaaatcaaagctgcggctccggatattctgtatgttcccggctattatcaggaagttggtatgatcgttaagcagggccgtgagatgggtatcgagatccccatggccggcggcgatggctgggacagcgctaaactgcctgaaatagcaggtaaggcggcactcaataatacttatttctcaagcctttattctcctgatgacgattctgctttgaataaagcgtttgtcagcgagtatgaaaaggcttataaagtaaaaccagacgtttttgcagcgcttgcttatgactctgctttgctggttgccgaggcaatcaaaaatgcaggcgataccgatccggtgaaaatcgctcagtctatggccaagatcaacggtttccagggcgtatcaggtaccgtaacctttgacgcgcagcataatccggttaaaagtgctgtaattatcgaacataaagacggcgctcaaaccttcaggacaaaaatcaatccttgataaaaatccacaattaatttttgcaatggtgcgggctgtggtattaccacagcctcattgcgtttaatccacgagatcaggaggacgggaattatggacatgggttcctttatgcagcaatttgtccaacagcttattaacggcatttcgttgggcagtatttatgcgctggtagcattgggatacacgatgatctatggtatcatcaagcttatcaacttcgctcatggcgatatttacatgttgggtgcgtatttcggctttatagcaactacaatgtttggcttttcttttattccggctatactcttttctatggcctgtgccgcattagccggtattattattgaacgcgtggcttataggccgatgcgtaatgctccaagaatcgcaatcttaattacggcaatcggtgtatctttctttctggaatacagtatgatccttattgcaacgccgcagccgcgtacgttcccggctgtgtttgaagcgactatttatcattttggaccgttggtagtaaacagccagcagatcgttatcctgatcagtgcgctgattttgatggccgtactgacttacattgtacaaaacaccaaagcgggcaaagcgatgcgtgcagtatcttttgatgctgatgccgcccgtttgatgggtattaatattgaccgtgttatttccatgacttttgctttaggttctgctttggcagcagccggcggtgttttggtaggtatctattataactctatcgatcctctgatgggcatggtgcctggcatcaaggctttcgttgccgcagttctcggcggtattggcattattcccggcgctatgctgggagggattatcctgggcgttgttgaggcgatggtcagcggtttcttttcttcaaccttccgcgatgctgcggcatttgctatcctgatccttattttgctctataaacctgccggtatattgggcaaaaatgtacgtgagaaagtgtaggtgagagctatgaatgcattgagaaaaaaagatttgctgacattggtagcctgcgctgtactttttgctgttatgcagggattgatgatggcagagatcatcggacctttctgggaactgaatatcgttctgatttgtattaatattattctttcagtcagcttgaacctgatcaatggttacacaggccagttttctatcggacatgcgggctttttggcggttggtgcttataccggcgctatcgttacggtcaagcttggtttttcatatgagctggcattgatagcgggcacagttgctgccggctttttgggatttttgatcggtctgccgacattacgtctgaatggcgattatctggcgatcgcgacacttggtttaggtgagatcattcgtatctgtatcctgaatatcgattatgtgggcggtgcttccggactgatgggcataccccgtttgaccaatttcccctgggttttctggattatgatcttcatcattttctttattaaaaatttcaagaattcagcgccaggacgctgttgtctggcaattcgcgagaatgagatcgctgctgatactatgggtatcgacactacgaaatacaaagttatggcgtttacgctgggggctgcttttgccggcactgcaggcgtattgttctcgcattacttttatattgcacatccggcatcctttactttcatgcgttctttcgatattctgaccatggtcgttttaggcggcctgggctcgatgacaggcgctattaccggcgctgtgctgctgacttttatttctgcttatctggcagaatatcctgaatggcggatgataatttactcgattactctgatcgtactgatgctgcgccgtccgcagggactgttcggtaataaggagctcagcttgaaaatgtttcatttaggaggtggcaaagatggaagcactgctgaaagtaaatgatatttcgatggttttcggcggcttgcgtgctgtctccaacttttccatggaaatcaaagcaggtgagctgattgggctgatcggtcccaacggagccggaaaaactacggcttttaatatgattaccggtgtttatacacctactgaaggcgagataatgttcaacggtacgcgaaccagtggtaaaaaatcgtatcaggtaacgcagctgggaatggcgcgtactttccagaatatcagacttttttccgagctttcggttattgacaatgtcaaaattgcttataatatgcatgtcaaatatactttaggcgaggcgattgcccgggttggccgttatttcagcgaagaggatgaaattaccaaaaaagccctggagcttttaaaaatctttaagctggaagataaagcttatgaaacagcaaaaaatcttccctatggtgaacagagacggctggagattgcccgcgcactggccacggaaccgaagctgctgcttttggacgaaccggctgcaggtatgaatccacaagaaactaaagagctgatggaaatgatccgctggatcagagataaattcagcttgtcgattttgctgatcgaacatgatatgggtttggttatgggggtctgcgagcggatatatgttctggaatatggtttttgtattgccagcggcacgcctgatgaaatcaaaaataataaacgcgttatcgaagcatacttgggcgaggaggtgtcctgatgttaaaggtagacaatatcgatgtatattatggtgctatccacgctatcaagggcatcagtatcgaggtaccgaaaggtgagatcgtaactctggtagggtctaacggcgccggcaaaagcacaacgctgcggactatttccgggctgatgaaaccgaaaaacggcacgatcttgtttgaagataaaaatatcgtcggcgtaccggcacataaaattgtgggtatgggcctatgtcaggttccggaaggaaggcatgtttttgcaaatatgtcggtcatggaaaacctggaactgggtgcatacctgcgtaatgataaggatggtattgcccgcgatctggaagacgtttttaaaaaattccctagactgctggaacgtaaggaccagatttcaggaacgctttccggcggtgagcagcaaatgctggctatgggacgggctttgatgagcaggccgagacttttgctgctggatgaaccctcaatgggtctggcaccattgcttgttaaagaaatttttaatataataaaagaaataaacgagagcggtacaacggtgcttttggtagaacaaaatgccaatatggctttatcaattgccgataaagcttatgtattggaaaccggccgcatcgctttggcaggtacagcacaggaattagccagcagtgaagctgtgcgtaaggcttatttgggcggctgatgccggaaaaggagcgtgtttacaatgctagttaaagactttatgacacctaacgtattaacgatttcagaagacaaaagcatgctggaagcccgggaactgatgaagagcagtgcttttcgccgtattccggttgtagatgatatcaaaagagtgatgggcattatcactgatggcgacgttgggcgcacttcaccttctgatgccagtactttatcacgttacgaagctaattatctgctgtcacgtctgaaggtacgcgacgtaatgacccgcgatgtgattactgtgcgtgataacagtgcaattgaggatgtcgcctatatattgtataaacataagatcaacgctctgcctgttgtgaatgaagataacaggctgtgcggcattattacggacagcgatattttccgcgctttcgttaccatcatgggcattgctaaaagctgcactcgtatcacgatcgatgttactgataaggtcggcgttattgccgatatcggaggtatgttccgcgatcagggcatcaatatcatttctgttgtaaccaagcgtaatgatgccgatactacggaacttactattcgcgctgacctttcgcagcatggtatggatattattgagcagatccgtgaagccggttacgatgtaacggatatcagtacggtgaagggtgtagaataagctatgttggacgctaagttcaatgtcggcgatgtagtgcggatgaaaaaagctcatccctgcgggtcctttgaatgggaaattacccgtacaggaatggattttggtttaaaatgcaggggctgcggtcattttgtaatgattgccaggcctaagttcattaaagctgtaaaagctgtggtttctgcggccgatcagtaaaatagcaaaaagctctgctgtaaggcagagctttttaattaaaaatattgaaagagagcggcgcaaaatgcagattacagctttagatcatttggttttgacaacgagtaattttgaactctgcgtctggttctatcgtgatgtcctggggatggaactgttgtgccaggacgaccattatgcatttcgcttcggtatgcagaagatcaatgttcatcgttgtcctgcggaatttttgccggcggccggaaatgtggcttacggcagtctggatatttgtctgctgacagtaacggaactgcccattgtttatcaggagatggcaaagcacggtatcgcggttgaagttggcatcgtcgagcgtaatggtgctttagggaaaatgcagagcctttatgtgcgtgaccctgataacaatctggtcgaaatcagcagatatgaatgaaaacggttgaaaaacaagccccctgtttctgatgaaacggagggcttgtttttttataaagattgaagtgacgttgcagggcaaagagtacaaggctctgttccggtgtgatagtaacagtttccggaatttgatgattttattccagtttacttttaaaggtccagccggcaatacttagtgttaaaacagctattaaagccagcggtatcaaatttatcagcacatgatacatatccatatttttcagcagtacgcctttggcaatgaccagaaagaaacgcagcggattaaggtaagtgaggtattgcagtatgaccggcatattatcaataggcgagataaatcctgataacaatacggcaggcatctgaaaggtaaagacacctaaaatagcctgctgctgcgttctgcataaggatgaaataaacagaccgacaccgactaaagctaaaagagcgacaaagtcagctgctaaaaaaactgcaagcgaaccaaccaaaggaaaatcaaaaaagtgtactgaaatagcaagcatcaccattgtcagaagccaggctaagagctgggccggtacggctttgccgataaggatctcggtagaagacagagggctgacaatgagctggtcaaaagtaccgacttctttttcccgggcaatagacagcgatgtcagtaaaagcacgatgaccatcgagagcatagccatcagggaaacgagtgagtaatacttataatcaaggttgacattgaaccagtttctggtgactatttccaagcgtggctcgctgccggataattctttggcatagctttggatgatctgtgtagcatagctgccgatgatcgaagcggaatttgtctgcctgccgtctgttatcagctgcacgctggcgccggtcttgttttttatagatacggcaaaatcaggaggtatttccagagccaggcttgctttttggatatcaatgctttgtttgagctgttcaggcgtgtcaacaaccgctacagagttgaaccagggcgaatttgcaaaatggctgatcagttcgcgggaatagtagctgcggctgttatccagcactaacatatcaatattttttacttccattgttacagcgttggcgaaaacaataagctgaataataggcatgatggtaacgatcattctgctgcggggatctttccagattgctttaaattctttaatgatcagcgtcaataatcgtgttgtcatttttccaacctcactaacgtatttttataaactaaaaataacaacacaaggcacagacagcttaaataaacggtgttgatcagaactatatcactgatagttcctgctaaaaactcactttcaataaacgacacaaaataacgctgcggcaaaacagctgttaaatatctgaaaaaagcaggcatggatgaaatcggaaacatcagcccggaaaggagcagtgccggtaaaaaacccatgactaaagagatctggcaggccagaaattgatttttaaaaatcgtggataccagtaagccgatgcccatacaggtcagcaaaaacaggctgcccaccaaaaatagtatgatataagaaccgcggaagggcagatcaaaaacagcgatgcataaaaacacgttaaacaaaagcgagcagatgcccaaaatatagtaggaaaaatattttccggctacaaaatgcaatctgctgagcctggtgcttaacaaagcttccattgtaccccgttcccattccctggctacgacaagcgctgttaaaaggataccgaccagacttagggttacggccagagaacccggcaaaataaaataatggctgtcaagcttctcgttataccagatccgcagctgtggatctatcagacttacctgttgcttactgtagccggtcgtttccagccactgataaataacgccgctggcatagctttggacatagttggcagtgttggtttcgctgccgtcggtaatgaccaggatctgtgcggtgcggccattgttaagagtgacagtaaaatcgttaggaacgatcacggctccctgaagtttggaattgacgatatcgctgtacatggcgtccttgtcatcgtagaccttcgttctgatatactgattattactgaaagacctggccagagaaactactctggggttggcgtcatccagcttaagacccagattgatattgacggagtcgacattgatgccatacatataaatcaaagacagcagcgtcggcaagataaaagcaatcaaaatactgctgggatcgcgaaagatctgcaggaattcttttttgataaaagcccataaaattctcatagccgtccgctttctgcatctttgcggttaataagcgtaataaaggcttcttccatcgtcgcagcagtagcctgcgattttaaagctgccggagtgccgacggctatagtttcgccctgataaaataaactgatgttatcacaatattccgcttcatccataaaatgagtagtaatcaaaatcgtgacgcttttttttgccagggcgcgcagatgacaccaaaattctttgcgggtgaccacgtctacgccggaggtggcttcgtccagaaataagatcggcggattatggatgagcgcgcaggctaaagataagcgctgtttgatgcccaaaggcagtttttctgacagctggtcaaaatagacagtcaaaccaaaataagacgcgatgctgtcgacacgttctttgatttttgccaggggaataccgtaaataccggcgaagaattccagattttcgcggactgacatattgccgtataatgaaaatttctgcgccatatagcctagataggagcgggctaaagtaggatttttcctgatatctacccccatgatttttgcagtaccgtctgttggccgggccaggccgcacatcattttaaaggaggtagatttgccggcaccattagggcctagcaaaccaaaaatttcaccttttctgatgtgaaaggtgttattttttacagcggcaaagttaccgtacatttttaagaggtttaaagcttccacgggatattctacagtgctttcccgataaatataatgggctgcgatctgtgattctttttcttcatagccgcccatcatgcggataacttcgcgttcaaaatcagcagaagtggcagccagtgtttctggcggaccatgaaagatgacttttcccttatcgataactacggtattgtcaaaactgttagcttcgtccagataagccgtagaccagattacggtagtatcttctttgatcgtcgcccgtaccagacgcattaaatcgcggcgtgagatgggatctacaccaacagaaggctcatctaagaccagaaatttagggtctcctaaaagcgcgcaggctaaaccaagcttctgcttcataccgccggataaattaccggccagtcgtttttgaaagggccgaagaccggtaaagtccaaaagttcgtcaaaatttttatcgactgatttcaaatctgcatagaattccaggttttcacgtacgctcaggtcttcgtacagtccaaatttttgcggcatataacctatttgagcgataagttcttttttttgccgtgccggatcatagccaagggtcgtaacggttcccgaatcggcacacaaaagcccgattatgatacgcagaagcgtggttttacccgcggcatcggcacctacgatgcctgtcatttgtcctgtaggtatggtaagcgtcaaatcgtctatagcagtcgtatgttcaaattttttagtgatattatttattactaccgtatccattttacttaccccgggtatccttcaaatcgatcaaaacagtcgtgggcattccctgacgcagaaatttatccgggttatcggcataaacacggatcatgtagactagatctgtacgcagatcggttgtctgtacgcttttgggcgtaaattcgctgacaggggaaatataaccgatatgaccctgatacgttttcctggcgcctgtctgcggatcagtactgtcggtaataatctgtgccggcataccatcgtaaatattgcccagatctgtttcattgatataggctctgacccagatcgggcgcggcttggataaagtatagacggccgttcctttttgaatgatcgtaccaggctcaactaaacgtgcggtaacgatgccttcttccagtgcataaagtttggagtaatcactttgcctggctaaaagatcttttgcggttacggatgcattataagctgagcgcgcttccttcaaggtgttttccacagtttcaaaatccagcttggaaatagcgcctgtgccatataaaacagtatatttatcatagactgactgcgcctggaccattgctgcataggccttggctacttcactttccgacttggcctcctgcagcttgtaatctgccgcgtcgatctctgcgactaggctgccttcccgtattgtatctccttcttcaaaatacattttggtgatttgtcccggaacctgaaagccaatatcaaattggcggatatctacattcccatatagtgttaccagcgtaggatcttttgcagcaggtttcaagaaaaaccacaggcagcttattaccgctgttattactgctatcatgattaaaaattttttcttcatcatacggctcctttgagtgctttcttaatttaataatagaagaagagcagcctcttggcaatcaacaaatcaggggcttttgtcggattttgcagtcattgcagccagcagggcgggctggtcgataaagctgcgtagtttgagccaaaaatcgagcggtgaaagcggactgtcatgctcgtagcaatagaccaatacctgcagatgaccattgattataaattctatcaacagctgcagctgcggtgttatctgctgagtagtcagctgcaggttttggatcagtactttccgaatatggtttttcattttatggacaaaacgcggatcgccgttctggcctaggagcattgccaaaatacgggcattgcttttaaaaaatctttgtgacaacaggcgttcttctgctgtaggcatacctgtgcgaaaaatacgaaggccatgcggcagaaaagtgtcgacaagctgaaataattcattttctaattgtttcagcagatcatctgtattattgaaataggcgtaaaaagtactgcggttgtaaccggctttttttgtaagctgtgaaactgttattttgtcgcagggcagggtctggcacagctgcagaaaagcttctacaatgcaggtacgtgctgttgtcggcttagtcatggcaaaatcccctttgcttttattaatttaattatactataatctgtcagactgcaaaagagaaggccggtaagccgagggtaattgatcggaaacagatcatttattgcccgggtaatatttacagcttttttatgctggtcagggctatttttacggttcctgacatttacctgccgctggggcagcggtattatatggttatgaaagagagaggtgaagataaatgacagccgcaacctttaatgcttgtttgagtttagcagtattgggtgtattaacctttgcctgctggcgtaaatacagaatctgtctgcatactaacgtacataaataaagcggtatccgtgataggaagtgaacctgatggttgatttgctggtggtgctgttttttccggcagtactgacggtattgctgagcatagcagagctgcgcattaaatatgcagaaaaagaactcctgaataaaataaaagagcacttctaaacagaagtgctcttttattttctatttatcttcctgcatatagatattcataccgggaacagcgcctttgacgccattagcggcataagctttgctgatgttttccaacaggtcaaaatatacattccagtaatcggagccctgggcccaaacacggatcgtatattcgacggcatattctttataaccggaaagcctgataaaaggcgcgggatcattcagagtattgtccgtagctgcaactgcctcggtcagagctttttttacagtggcaatgtcgttattatagccggcgcggatcacaatatcgacgcggcgtaccggttccgaggaaaagttagtgattttcccgccggcgatctcactattcggtacgaaaatatctttgttgtcgacagtgatgattttggtgcagagcatggaaatttctttaactgtaccttcgataccagctgcggcaatataatcgcctgctttgaatggtttggtgatcagcagcatgataccattggaaagattggataaagcgccctgtacagaaagtgaaacagctaaacccaacatacctaaaacggccagcagtgaagcaataggaataccgatactttcagcaacgatgcatacagcgacaaaattgagcactactctgataacagtgcgtaaaaaaccgcgcagcgtcaaatctacgttcagtttatccagcagtctttctattggacccatcaatgctttgattactgcgtggcagacaagaaaaatgacaagtgcggaaataatgttgccaacagtcagtttaccgactgaaaaattaaggatttcctgaatcgtttccatcatataaacagctccttttcatacttgtttatacaaacaagctaaaatatattattattataacataaaataatgtaattaaatatctttaaatgagattttaataatttactgcaaaaatatatactgtagaaatataaataaatatgggctgaaaacaactaataaaagcaatggcataatctccgccgcagtaatgatattgcataaaaacggtctttgaggtaaaataaagtattactaatagatgaggagcgatcagagtgagtaccaatttagaagtagggatagtcggtttgcctaatgtcggcaaaagcaccctgttcaatgctattaccaaagcgggagcagaggctgccaactatcctttttgtactatagaacctaatgtaggtgttgttgatgtgcctgataaacgcttgtctgttttgggagaaatggtcaaagcaaaaaaaatcgtacctgcggcaatgcgctttgtagatatagccgggcttgttaaaggcgcgtctaagggtgaaggcctgggtaacaaatttttggcgcatatccgtgaggttgatgccgttgcacaggtcgtacgttgctttgaagatggaaatatcactcatgtcgagggcagtatcgatcctctgcgtgacattgagatcatcaatacagagctgtgcctggcagatatggaatcggttgaaaaacgccaggaaagactggtgaagcttttaaagactggtgataaaaaggtgccaatcgaaaaggctgttctggataaagtcttggcaggactcagcgaggcagtgccggcacgccgtctggggctgactgaagatgagctggaatttttgaaagaactgcatcttttgactatgaagcctgttttatatgtggccaatgtcagtgaagaggaagttgccgacgcatctgccaatccgcatgtgcaggctgttgtaaagtatgcggccggtgagggtgcagaagtgattaccgtatcggcgaagatggaatcggagatcgccgaactgccggatgaagaagcgcaggaatttttggcgatggccggattagaagaagcagggcttgaccgcctgatcaaagccggatttaaacttttagggctgatgacttatattactgccggcgaaatagaagtacgtgcctggacgatcgtacgtggaactaaagcgccgcaggcagcaggcaagatccatacagatttcgaacgcggctttatccgtgcggaaatcgtttcctataatgatctggttgagtgcgggagtaaagcggctgcccgcgataaagggctggttcggcttgaaggtaaggaatacgtgatgcaggatggcgacgtagtcgaatttcgttttaacgtttgatttgcagactcttttggacggttttaataagcggtccaaaagagttttatttatatcacgttataaattttcacaaatgtttatgaaccggaaatatttttgaagtgcagataaaagtatgctataataattgcaaattatccatctgatgatatttacaaatgattgagaaactttaacagttatttgtaaatattcagacgaactcggttaaaggagcgattctaatgaaaaaattattgttagttatttccatgttgatttttgcaatgctcatgactgcctgtggtggcagcagtaaaagtgttttcactgagcccggcgctatcgggaaaattatgggcgagctgcagaataaagatggtttaaaaggacaggagcttaaggtatttcaggatattacgattgtttcaggaaaagattacggcggtaattttatttctatcaatatccttaaaccaggaaccaaagaagatgtcgatcattatgaataccgcaacggaagctggagcggcccatctgctgtaaagattaccggcagcggtaatatggaagataatctgatcgctttgcaagcattaaatatggacaaaattcctgagatgtataaagctttccaggaaaaagtaagtgataaaaaagatgtaaaagtcaaagaatcgttagtgtatcgtttttggaaaggcgattggaccgtcatgatggatgcagagagcgacagagaagcatacagcgcagaatttgatttaaatggtaaaatgattgattttaaaaaacgttgataaaaaactccttaacagaattttttctgttaaggagttttttaataccggttaaatattgtgaaaaatagttttaaatagtttttctagttgctttttcaagcctatttgatacaatataaactacgaaaggatggccagaatatgatttttgacacacatatgcattgtgattattcctgcgatagtcatatgaaaattgccgaggccgtcgctgcggcaaagcagcagaatattggcatcgttatcactgagcactgggacgatgattatccgacgaatccgagtgcatttatgtttgatgtagacgaatattttgaacggtttggcccttatcgcagtgacaaagtgcttttgggaatcgagatcggaatgcagaagcagacaacagctgcagatgaagctttggctgggaaatatccctttgactatgtgctggcatccatgcattgcattaatggccgcgatctgtatgaagaacgctgttatgaagggctggcaaaagttgaagctgtacgtgaatttctgatagatacactggctaatttggagcggcataataattttgacgcttttgcccatattgattatatgtgccggtatatgccttacgcagataaagaactgattctgggagaagcgccggaactttttgatcaggtttttaagctgctgatagcaaaagaaaaaccactggagatcaatacccgccggttggatgatgctggagctatggcttcattactggcggtgtacagacgttatgcacagctgggaggtaaatatgcggtgatcggcagcgatgcccattataaagagcatgtagggcgccgcatgagagaagcgcttagtttagcagatgaggcaggcctggagcctgtatattttagagaacgcaagatgcggaagatgaggagttaaaatttatgagatgcgtacgttttgaagaacagggccgtgccaggattggttttatcgacggtgatgttatccgcgctgtctatggcagtattgatacttattggcggatgacagatgaggtttttcctttggctggcgctaaacttttggctccatgtgtgccgaagcagattatttgtgtcggtttcaattatcgtgaccatgcaagagaatttcatgtggacgtacctaaggagcctgcgctttttactaaagctgcgcatactgttatcggtaacgacggcaaaatcatttatccgcgtcagagccatgaggtagtttatgaggctgagttaggcgttgttatcaaaaagcggatgaaagacgtagctccggaagatgtgccggattatattttagggtatacctgcgctaatgatgttacagcacgggatctgcagttgtcggacgtacagtggctgcgcagtaaatcttttgatactttttgcccattggggccctggctggaaactgatcttgatcctacagatctgtcgatcaaattgtatttgaacggacagcttaagcagaatgggcgcaccagcgacatggtatataatccctatgagatattaagctatatttcgcaaagtatgacactggatgccggcgatctgattctgaccggtacgcctatgggttgcggtccaatgctgcctggagatgaagttgtcgtagagatcgagggtatcggcaagctgcgtaatgaagtggtaaaaggatactgaaataaataaaaaggacgctgcggcgtccttttttattgtttgaagaggcagtgaattgacagaaaaaaatttgtcttgttaagatatttgaatcagtaaaaaaagagatttgatttatttgtaaattcatcctgaagatgaattgcaaatatttgaaataaatgttaaaattaagttctgactgatcagtcaggaaatggttgggtggtgtttttatggtaaggaatatgacagagggagatccgctgaagctgatccttccttttatggtaccgcttttgatcggtaatgtctttcagcaattatataatatagcagatatcattattgtaggacggacgataggggtcaacgcactggcggcagttggggctacagcgcctctgttcatgatgctggttgtgctgacgatgggtttgtctaatgggttcacggtggttacgggccagcggtacggcgccggtgatcttgacggtgtgcgccgcagtgtggcgatgagcacgatgctgagtttgttttttgttttgataatgatgcttatagcaacatttgcccttgatccggctttagcggcgatgaacgttcctgaggagctgtttgaagatgctaaaagttatgttttgatcatcagtcatggtattatcgccatgatgggatataatcttctggcaggcattttgcgttctctgggcgacagtaaaacaccgttatattttttgattatcgcaacgatcctgaatatttttctggcgctgctgtttattattcagttcggctggggcgtgcctggttcagcagtagcgttggttattgcgcagggcttttccgcgctgctgtgtattgtttatattgtcaaaaaattcccgatcctgcgtctgcaaaagcaggactggcactttgactggaagtttgcctgggagcatctgcgtatgggcctgccaatggcggtgcagttttcagtgttggggcttggtatgattttcattcaggctgtttgtaataagttcggcccgactacgatcgcagctttcacttccgcaatgcggatcgaacagctggccctgcagccgatgatttcttttggcttgtcgatggcggttttcagcgcgcagaattttggcgctcatcggtttgacaggatccgcgagggtgtaaaaaaatgttcgttgctggcgctgtgttttagtttatttgccgctgttattatgtatttcttcggccgcgaaatgatcagtatttttatcagcgaagctaatgaacaggttttatcgcaggcgcagcagtatctgcatctcagcgtgccgttttattttttcctcagtcagatttttatctatcgtaatgccgtacagggtatgggtattgcgatgatacctatgttcagcggtatcgtagagctgatactgcgtacttctgccgcagtatatctgaccgaatattttggttacagcggcatttgttacgccagtccgattgcctggctgggttcgtcgttatttctctttgcgagttatcattatttcatcaggctgctggaggattcatataaacagcatgctggtataaacggctaaaaagaaaaactcccggaaaaccgggagtttttctttttagaatagatactccaaagacagcatgccttggaaagaactgtaagaattactgccaaaacgtccgctgagatcagcagagatgaaccagtctttattgaattctttttcataaccgagacgaagttcgccaagatttttgttaccgtcttgagaaatactgtcaccaagagaagaaatagtgtaattattagaattgtggagccagtttacctcggcaaagaaagaatctttttttgtcgaagctgtattctgttcacttaaccaacgcagtcccaaacgtgtttgaagattggcttcattgccaaaagcgatagtactgccattattttcagtatacgtatcattattaagcttggtataggtaagctgaagcttaggctgccaagaataagtacgccgatctgtttctttgtaatttatggatttaccgatttctgccgaaagtccccagccgttggtatcatagctttctttgcttagtccggcaccattgacttcgttatcaaaccagccatattggaaccaggtatcagcataccagccgcttctgtcatgtgcgttttcaaaccagctgccatagacacctaataaaaatccatcgacagaacctttggaatcacggttggcgaaactggctgaagtcgtctggctgccattgccataagctgccattatgccgaacagctgctgttcacctttatcactgacttcattataaagatcagtgcccacgcgcagtttgtatagattggcattaccgtggatctgatcgttgctgaaatcctgtttcgtacgggtatagctgtttatgatccagatattagggccatcttcctgattgttttgatgctgcagatgcgtttcacgatcataaaggcggagatcgaacatagaaccggctaaggccatgtttcccagatatgaacctgtttcaggacgatagacaggggcagtagtaggcgcataggatgttaagtaccaatcactttcagtaccttgattgccgcctttgacgagtgaatattcatataagccaccgaccaggggattagacttgatgaaattaccatcagaattcccgagaacttcaatgaccttgataccctgagcggtctgtgcgccactaccaccgatatttttaaaattgatataggttgtgcctgaagtgtcaccgccgacgatcattttatcagttgcagaatcgtctttgcccaagacgacattcatatgcagctggccattgtcgccgctgtagtttcccgccacatataaatttttgaaattttcagccttttgagcttcgagaagctcattatcgttgttccagtccagatgaccaaatttaataactgaattattcagggacagatcagtaacaaagttgccttctgcttcagatccctgccataaattttttgcagaagcgttttgggtcatattccaggtactgttatccgtcagagcaagatcaagcctgctgcttttaccggtactgtctattgtataatctgtaaaaatagcaccgttcagaacagtgtttttagaagtattgacagtaatattactggcaacaagatccggattagttgtcgtttgaccgccataggtaatatggatcaagtctttattactggaatcatgagcggttgctgtactgtttaccaagtttaaagtagcgtccttgactgcatccgcgacattgataatgtcactgtaattagtaccgccaggattgctggcacgttgatgcccgtcagtggttatttcctggccatgtgaacctatctgtatcaggtggccggtatagacaccgtcactgtcactggtgctggcaactccgtcattagtgatatcagtattttccaaatggatgatttgcttaccggcagtcatattattaccggtcttatcagtggagttgcccagagctgaagaatattttacggctgtggagctggcgtggatcttactgcgttcaagctgtccatcgacagcaaacatattgaatccagccccatctcctgctattttgatgccataagctttttcatgatctacttttatatctgcagtaccatagaggttgacctccgatgatccgtatttacttcccagatgtttttctgcagcttgatttgttgcagccagagtaccgataacaataccatgttgatgattgcgtccgctggtttcgatagtagttttgaaattactgctttgagtactgttgatatctattctgccgccgccaatggcgataataccggattcgtgattgcctcctgtacggatatcaagctcaccgccctcatagccaagtacttctatctgcccgaaatttcctgtttccagtgccgtagctcctggtctgccggcaccgtcatttctattgaagctgcctccaagaaaagttattttagcctgttcgttaatgtctttagcaggatcgccgttggctaagaacattctgccattgctgtagccggttccgtctatttccactcggtcaaaattgattctccctgtcccgttggcaactaccatccagcgctgactgctgcttgctgctttaaataaggctgactggtcatcgcttttaccattggaaaaagttatagaagctccatcctgagcggctacaatgcggctctgacttactttgacagttgtcgtgtcaccggttacatgtatttcaccattgttgtaagcaaaaaatgctgattcagaatttttatagtttgtggatttggaggtaatagaattatcggtaccgctgaggattattttactgccgctgccgttagcaacaattccagaataacctactcctgtagaataggtatcgcctaaaccgaccgtggtatttaaactgccattaacagtaagctgaccgccgctgctggcggtgagggattcgctgctgtttacaccgttgacggttgttgcaccggcggtgacagaaacctgagcgccattagaaactttgatactgttgatagtatcggtatgtgtgataggatcataagtgtctgtgccatctgcagtgtatttgccgtctgtaacaggtaccggcgcagccattacgttagttccgtaaaaggtgcagtgcgctgcaaggagcgccaaaagtattgcttgacgtttcttgttgctgtacataattgggtcctccttaagaataaaacaatggaagataaaaataataaaataattattgtaataaagcattttaaatcctataagttaaaataattatattttgcgaaaatgtaccgtgtcaagcatttatagattatatatccatatagtttaatcttggaaaaggaaataatactgtgtttttagaagaaagcgcagggtattactccgggtaatttgaaattacaatagctgataaaaagtcggctatatttaaaatattaagaataaaactgaaaaattagaaattaaaatgcagactaatattagtctgcaaatgaataaaataaagaaatataaaaaacgccgttatctaaatgataacggcgttaaaatagtgcttttagttgtttcttttccggatctcggtaacagaaatgcctccgatgccccaattatcagtatcgacttcatcgataacgacaacagtagtttttttgtttttaccgagcacgtcgtgcagcagattggtagcaccttctatcagggcttgttttttctctggtgtcacgttgccttcacgggtgattttaatatttacgtagggcataacaaagacctccttttttctttcagtatagcatgaaagaatgaaaaacaacaggaattttaaagtgggtgatatcatgagtacgctgtgtttccacggtgctttttacaaaatatacaggcagggacctaaagaaaggtttttttgtaaagtaaggtaaaaaacgcttgtcaaggccggagtgcttgtgctattatagcggtgaccgtaaatggccgggcagtatctttgtgagctgtaccataagccgcaggtcttaatttaaaatcagtcattaatcgcttggatcagtaatgaccgggacgagacgcaataacaaggcctttttataagtatttttgcgcgctcccggcgggagtgcgttttttattttactgccttggttatgctctcaagcgaagaaagggagggaaccatgaaaataggcatcattgggctgggtaaggttggcagtgcttttttgaaagcctgtgcagtaactgctgctttacaggtagtcagcgtcaaagcgggtcgatcgccgaaaagttgtgcgaggctggcgggcatgggtgactttcagattacttcagtcggggcagaggtgctggcggctgctgatgtagttttgctggcagttccggacgggcagatcgcggcagcagctgaaacactggctgcggaagtcggtactgccgggcggagggatattctgtcaaagaaggtgtgcctgcattgcagcggttctttggggttggaccctttggcggcgctttctgccttggggatccactgcggcagtctgcatccattgcagagctttgccggaggcagcgccagatttaaagatatcggcatggctgttgatggtgataatgaagcacagcaagctgcctgttatctggccgaagcgcttcaggcatatccattcagagttcctgaagcggagcgcagtgcctatcatgcggctgcttgtttttgttctaattatcttgtgacaataactgcgatagcacagcaactgtttgaacgctggacacctgacaaggcaagggctttgcagtttttgctgccgctgctggatgggactgtcagtaatctgcatcagacttcgttggcccgcaaggcattgaccgggccgattgcccgcggtgatgcaggcactgtagcaggacatctgaaaattctgccggaggaactgcagctggtttatcgggaactggcacttcagactgtgcgtctggcgagtgaaaacggcagtatcgatgaagcgaaagcaaaaagtttacaagaactattgaaagcttgacagtaaaggagtaaaaccatgaataaaaaagcaataaccacatcgactatcaaagcaatgaaacagcagggtgaaccgataacgatggttacagcatacgacgttgcgatggcccgtaatgttaatgaagccggtgttgagatgattctggtaggtgattctgttggtaatgtgatgttgggttacggttctactgtgcccgtaacgatggaagagatgcttcatcacaccaaagcagtgatgcgcgcctgcgggacggcactggttgtcgctgacatgccttttatgagttatcaggccagcattgctgacggcctttataatgcggcccgctttttaaaggaaactggctgcacggcagtaaaactggaaggcggcagtgaaatctgtgaactggtacaaaaaatggttgccgcaggcattcccgtggtcggacacattggtctgacgccgcagtctgtcaatcaaatgggcggctttaaagtgcagggtaaggatgtagccgcagcgcagaaattgctggatgatgctaaagcgttagaggcagcaggagcttttgctattgtgctggaatgtgtgccggctgctttggctgcaaaggtgactgctgaactgaaaacagcggcaactattggtatcggcgccggaaattcctgtgatgggcaggtactggtttgtaatgatctgctgggattttcggacgggttctgtccgaaatttgccaaaaaatacagcgatctgcatggaagtattgtcagcgcagtgcagcaatacatcagggaagttaaggagcgcagttttcctgcgccggagcatacgtttaaaatagatgatgaagttttagagaaattatattgagaggaagccttaaaatgaaactttgccaaacgacagcagatttacaggaagaggtagctttagcaaaggcagcgggtaaaagcatcggtctggtaccgactatgggggctctgcatgaagggcatggttcactcattactgccgcacgtaaagagaatgagctggtgatagtcagtgtttttgtcaatccgacacagtttgggccgggggaggatctggaagcctatccgcgcactttggaagcagattgtatattggcagggaaaatgggggccgatatcgtttttgcccctgcggctaaagaaatgtatcccagtgccgatatgacctgggtagaggtaacaggtgatattacaaaggttttatgcggccgcagccgtcccatacattttcgtggcgtgactactgttgtcagcaagctgttcaatctggcacagcctgacagggcgtattttgggcagaaggacgcgcagcaggtacaggttatcaaacgaatggtcaaagatctgttttttaacgttcagctgcggattatgccgatcgtacgtgaggctgacggcttggctaaaagttcgcgtaatacttatttgagccaggaagaacgcacagccggtttgattttatcaaaaagcctgcgttatgcggaagaactttttaagcagggtgagcgtgacagcagtagaattgcagctgaaactgccaagctgatcggttcagagccgttgagtgagattgactatgtagaaatttatgagctgcccgatctgaaacctgttgcaggtgatattaccggttcgtgcctattggcagtagcagtgcgttttgggactacgcggctgatcgataatgtgattttggaggttgaataaatgcttttgaatatgtttcatggaaaaatccaccgtgctacggtgacagaagcctgtctagaatatatgggcagtattaccattgattccgagctgttggaactttccggcatcatgccgggcgagcgggtacagatcgttgataataataatggcagccgcctggaaacctatgttattgcaggggaacgcggcagcggtgtgatttgccttaatggcgctgcggcacgcaaggtcgtagtgggtgatacagtgatcattatcgcttatgcgctgatgacgcctgaagaggcggcaggttttgaaccaaaggtagttatggtagatgaaaataaccgccctgttaatgtgcgcggaacagaaaaagaacgcgaaataggttaataaaaaacctccgtaagcatttgcctgcggaggtttttgttatgttagacgtgaaaaacagcagtactgccacgttggccggggattacttccaatcgggctgaaatgcgttcgcgcagctcgctgacgtgggaaatgattcctaccagacgcccgcctttctgcagatcggtaagcgtgcggatagccatatccagggcttcggagtcaagcgtgccaaaaccttcatcgaccagaatggtatcaaggcggatacctcccgcataggcctgtactacatcggaaagccctaaggccagcgagagtgaagccagaaacagttctccgccgctaagtgttttgacaggacgggcaacgcctgtaaagctgtcggtaacttcaatgttcaaaccgttttcccttctggcatccagaacatcaccggtacgtgataaactgtaacggccacggctcatagaggttaaacgcagattggcggcctgcagtacgtcgtctaaaatagcctgcaaaacaaatgcggaaaaggtaagtcttgagggattattgcctcttgcggtttctgccaaagaggctgctgtttgataggcatcctgtaaagtgcccatctttttttccaattcctgcagctggagctgtgctttttgcagatcagaaagctctttggcggttactgccgtttgagctgtcagctgacggtagagagcgtctgcctgctgttccgctgctttgcaggcactgagttctggctcggtcttaccgttgacggcattttgagcgcgttgcagacggtctgttgctgcggccagattttgttcataggcggcgatggtctgctgcagttgttttcgcgtactttcagtacgcaaagcggcaagaaaggctgcctgtgattcaaagtctgaagcgtccaggcgttctttaaaatgttcgcgcagagcgctgaattctttggcagcatttacagaagccgcctggtttgctttcagagtagcttcgcagcctgccagatgcagctgagcctgctgatagctttgctgcagcagctgtaagctctggacctgtctggtaatcgtctgtgttttcaactgcagctcagatttctgggccgcagttattgtagccgggtgcggatgctgcaaagctccgcagacaggacacggttcattgtcaacgagagccgcggccagacgttctaattcagaagtgacaccggataatttagcggcttcgctgtggagctgcaggatccgctggttcaaaagctccagcgctttatccaggttcgcagtattcttgagactttgaccgtcaagctgttgtaattgttctgaaagcttttgctgcagttcctgcagctttgcttgcgccgctgctgttgcctgctgagcgctttgttcggctgacagacattcctggttgtgtttatgtgcgcgcagggtagagttgtaaatttcttccagcagtgcggctttatcagcctgtgctgcttcagtttttgcagtttcaacagcgctgcgctgttctgtcaaagttaagaaagccgttcgtgcagccgtttcttccgcaaaagcattatgcagctcctgagcctgctgcaattgcagttttgctgctgcaagctgtgcggaagcagtctgcagtgcagccgtttcttccttttgccgctgcagaaatatttgtatgtcagcaagaagctggtcgttgttttcacattcggtgctgttcaaaataaactgttgttgttgtttaagtgctttataatcgttgtcgatagcagtgctgtgttctgccagcagtgcttcgatacgccggtacagctcggttttgaagatcgtttccagaatcgccttgcggtctttcgattcagcgatcagaaaccgtcggaattctccctggggcaacaaaactatttgacggaactgttccgctttaaacccgataagttctgtaatttttttcgtcacttcgtcactttttgcggccagcggttccttgctgccgtcagtaaggattttaaaaagggcggctgctgccggtacctttcgagtgccctcgccgcgttgcttttttaattcctgctcgggagctctcagtacctgatagatatattccccgcttttaaaggtaaattctacttcggttttttgttcggcgggagcgtagtcgctgcgcaggtttttactttcgcgcagatcgccgctggcgctgccgtataaagcgaagctgatcgcatctaaaatagtagttttaccggaaccggtcggtccgtggatcaggaaaaagtttttatctcctaaaagagtgaagtcaataatttgctcaccggcgtaagcaccaaaggcccgcatggtaagttgtaatggtttcatggtcaggcctgcctttctgtctgcacttcgctgttaataatgtccgataaaagggatttttcactgtcagtgagctgacgattgttgacttgtgtaaaaaaagcttcaaaaagctcggcagtaccaagctttttatgatttactgcggcagtgtccgcatcgttgccactgtgcagccgtgcgtattctaaatgcaggatattggggtagacctgttccagccggtatttggcgtccagtatcggctgttcgtcagtcagggttacctgcagataacaatcatacaattccggctgcggcttgctgactaattcagaaaaactgccgcgcagacaggccagttcccggcgaggcttgagctgtactgtttcgacagtaatactgccgtctgcggccatatctacaatatgtacgcccttggactgctggacttcattaaaagaatatttgagcagggaaccgctgtaacgtaccttgctgctgccgttctggcaggcgtgcagatgtcctaaagccgcataattaaacggggcaaagcagtcgatgcctacggtggttgctccgccgatagccaaagggcgttcgctgtccggagattcctgcgctcctgtcagaaagacatgcgccagcgcaaccttacgcgctgtatcagggctctgccttaactggttgcttatctgccagcgaacaacatcttcgtgtgtttttaaaggctgccggagcagttcggacgctgccaggggctcgccataagtcagcggtgcaaaataaactggcccgtaggtatcatataatacaacgggctgggtagaagggctgactggcccggtgatataaagcttgttctgagataacaggctttgaccgaagccgagacggtcggcattatcgtgattgccggcgatcataatgacatttttgccggcctcccggactaaacggcgcagaacctcgtccagcagggtcactgcctgtgtcggcggtacggcgcggtcataaatgtcgccggcgatcaggacggcgtcaacattactttctttgaccagggcgattaattcttccagtactatagcctgatcgtcggtcatatgtaagccgtgaaaaatacggcccaggtgccagtcggaagtatgtaaaaaacgcatggttcctcctttattacttacgataaagctgcatgatttcgtgaaattttgctaatccgcattcgataccgtgatcgtgcagctttaaaagctgctgcggtttctggtccagtctgccgatctttaaaggtacggttggacggatgataacggccttgccgtcctgttccagttgttcggcaaaagcaagctggtcattatataggtcaggacgtctggccatggtttcccataatttaggatagtgtttatagacgaggcgcagcagatattgcggtaccgggtgttttttacggtaaccggcattacgggtaagtacgataacgaatttctgataaccgtcagcaatggatttgctgataggtatgggctctactatagctccgtctaataatttatggccgccgatggtgacgacaggagcaaaaaagggcaatgaagcggatgcgcgcagcggcagaaaatctttatccatatcgccctgggtataccagacaggcttgcctgtgataacatcggtcgtgccgacataaagctgtccgggatatttacgaaaagcttcatagtcaaaaggcagcagattctgcggcagttctttgagaatgaagtcaaaaccaaaaagtgaacgggtcctgagccagttgctcaggctgcagtaacgtttatcaccaacataattttgaatgacacgtctggtacgcagcggctgctgtgacatataggaaacaatattgcaggcacctgcagaaacgccgacaatatgcgggaaaataagttctttctgcatgaatgcttcaaaaactccggcggaaaacatgccccgcataccgccgccttccaaaaccaggctgataccgcttactatcatacatgacacctcgtaatcaatgatataaatattatacaccatttgtaatgccagcgggaatttgggtggcaggaaattgtctgccggcggctgatatgttatgatgaagtaaataatgatgcaaggaaggtgcgagcatgaaaaaagttgttgtaatgactacaggcggtactattgccatgaaatatgatcctgtgacgcagggcctgatcccggctgtcagtggtgatgatttgatcgaagccgtcccggcactgcgggagattgccgaagtggaggtagttgaattttccaatgtgcccagcggtcacataacaccgcagatgatgtttgatttggcaaaaatggctgatcggtatgcagagcgggaagacgtcagcggcattgttgtgacccacgggacagatacactggaagaaacagcttatatgttaggtttggcagtaaaaacgaacaagcctgtctgtcttacaggagccatgcgcggcgcttcagaaacaggaccggacggaccggcaaatatcctggcggcagtaatggtcgctgccagcgatgaagccttgggcaaaggcgcattacttatttttaacgatgagatacatgctgctgcagaagttaccaaaacgcatactacgtcctgtgctacatttcattcgccgggctggggtcctatagggcatatttattttgacagagtggtttttcgacgtcagccgctgaatcttgaaaaaatctgtccggcagtgctggcagaagaggtctgtttgctgaaaacctatgcggggatggatgcgtatttatttaaaatgctggcggaaaagccggtacagggattgatagttgaagctttaggctgcgggaatgtgccgccggcagttaaggaaggtatcgaatatgtgcggagcagggatattcctgtagttttggcttcacgtgttcatacggggcgtgtagttccggcgtacagttattttggcagcgccaggtcaatggaagcaagtaagatcattctgggcggggaactaacaggacagaaagccagaataaagctgatgctggctttgggactgacgaaggataatgaggaactgcgcagattttttgataactgagcggaatttgcagttaaatggaaaacgataactaataattaaaaaactttgcgtttatgcttaaaattggtgtaaacgcaaagttctttgtttttttggaacagaaatttgtgatgtgggggggtacatgttataataatcgtacttgaaaagtagaaagagagagtgcagagatgaaggagcaacatgatattttgacgggtatgctgaattgtaccgaggctgcatcaattttgttagcaatgacgacatcactggccgatgaaaatgctttaaaagagctgttacagaaacaaggttacaaatttgctgttacggaacttggcggcgatgcatctaaaagcgaatttagagaaaaaatgacacggtcaattattggagcctgtctcaactgtagtgttatttcaaaaactgcgcaggagatacatgcggtattacatgcagcagctgatgcaaaatctggttattcccagaacctgcttcaggccaatatttcgtgtaaggttgcgattgtaagaggaaatggatggattgccgtaactttttatggagattcagcggcgcattatatcactaatcataaacgcatgggttttggcattatgcatatatagaaaagtttgaaaatatttaacaaataattgacaaatcgattttttgtgttattataaaagcgtagagaatatgagagctttaccaagagagtatttgagagttttcaaaatagtttattacaactgcatagtggtgacggagtgatagtgattctattacttcgtcttttt

SEQ ID NO: 9994 - DNA, 8637 bp, Unknown
  gut microbiota DNA sequence
tattttttttaccataatttggttatccggaaaccgacagttgatacgccaggaaagaaaagtttgaaaggggtttgaagcaatgaatgtttatgcgtatgcaggattttcttacttgttcactgcggctatttcgctgtttatgattggcgtagtggtattgctcaataaattgatgggcaataataattctaatggagaagggatggaataacgatggaaatgagtctagtcgcaacattgtttcctggtattgccagtttatttgtgcaagatcctgtaatcgcctgtgcgcgtatttttatgataattttcggttttattctggcttatctgggctttaagagaaccttagagcctttgatcatggtaccgatgggtgttggtatgatttgtatcaactgcggcgtactttttttagacggcggtaagcttggcactttgtttttggatccgctcgtttcagaaccgggcgcattgatgaatatcatgcagatcaattttttgcagccgatctataatttgaccttcagcaacagtctggtagcctgtctggtttttatgggcattggggctatgtgtgaaattggttttattttggctaatccgtggacttccatcattattgctatttttgccgaagcaggtacctttgttacgcttattctgggtgtgaatcttggattgactccaccggaagctgctgctgtagcttcgatcggcggtgctgatgggccgatggttctgtttacttccttgatgctggctccggaactgttcgtcccgatttccgttattgcttatctttatttaagcctgacttatgcaggctatccgacattagtaaaaatgctggtgcctaaaaaatatcgtggtatcgatatcatttttgatgctcctgaaattccgaaaaccaaaaaatttatttttattttagtatgctgtgctttgttatgtattttattgccgatggcggcgccgttgatcatgtccttcttcctgggtatgacgatcaaagaagctgaaatcgttccgtatcaggatctgctggaaaacgttatcctttatgctgctactttgatgctgggtcttttgcttggcactttatgcgaagcctctaccctgcttaatcccaaagttgcaccgctgatcattcttggtgtggtagctttggcagtatcaggtgctgttggtgttttaggcggctggatagtttacaaattcaaaaaaggaaatttcaatcctgttgttggtattgccggtatttcctgtgtgccgactactgctaaaatcgctcagcatatagctgaagatgaagatccgttcgccgtaataatgccggtggcaatgggggctaatatcggcggcgttatcgtctcggcaattgcctgcggcgtcttcatttcgacgatccacctggttaagtaaaatttgagacggggcaataaagatggtagaaataaagaagatactgcacaataaaatatattattatgagcagttggattctactaatctgaaagcgctggagcttgcaaagcagggggcagcagaaggtacaattgttattgccgcaaggcagactgccggacgaggacgaatgcggcggaaatgggaatcaccggaggggaagggattgtggttttccatgatcctcagaccaacgatagctgccgaatactgcgcccaaataacgctgctgacagccgttgctgcggtgaaagctttgcaggtgctaactgataaaaaattttctataaaatggcccaacgatatcatgctggacggtaaaaaagtctgtggtattttagcagaaatggcactgactgctgatggcagtatcgagtacgccgttgttggcattggtatcaacataaatatgtcttctgaagatttcggagcccagctagaagctacagccacttctctttatctggcaacgggcatcgaatacgagcatgaacaggtcctcaaggcgtttctggatgaattcgatctgctttactctcactggcactgctgcggttttgctttgatcaggcaggactggctggactacagctgtacactgggtcataaggttacagtaagggataatgatacagagatttattccggagtggcggaagacatggatgattatgggagtttgcttgtacgaaatgctgcgggaaaaatcgaaagcttcgattttggtgaaataagcatccgtagctgctgaggttgcagtaaagggagggactgagagatggaagcgtttttacagggtgaaagtgttaaaagcgtaggcgtagcggcaatgctgctggcgctaacacgtacgctgaaggacgaggaaacggctaaaagagcgctgactgaagttggtcataaatttgtagtgacagaggtcggcggcaaaacttcttatgatgattttcacgaaaaggtgaacagggccgtaattggggccagtctcaattctggaatcattgaaaagacggctaatgatattcacgctttgattcacgctacggaggaagctaaaaaaggtattttagtcagcgtttcttccagcgccagtctggcgctgaaaatagcggttgtacgtgatgatggctggctggcggtggcattgttcggtaaatcggcactgcattatatgactaatcatgaacgggccggtttgggagttatgcatatatagatccgggtgaaagtaaatagtggtgaatgagagaatgaaggcgcagtttgcagctgtgctttgttctctctttttttatccgggttcggtatatatgaagcagttttgtaataagaaaggagagaatgtaatggagcttaaaggtattacgcgtgagtgggactctttaaagaaagatgctgcggcaagagctgcctcagctgccccttacgtcaaagaaggaaaaatcgttgatgccaaagatgcagtcgctttactggaggctgttatcaaacccggtgataaggtcaacatcgagggcaacaaccagaaacaggccgattttctggcgaaaacactctgccaggtagatcctggtaaggtgcatgatctgcacatggtacagtctgttttgaccttgcctgaacatctggatgtttttgaaaaaggtatcgctaaaaagctggatatgtccttttccggcccgcaggcaggccgaattgccgaatttttaaaagaaggcaaattggagctgggagctatccatacttatttggaactgtatggacgttattttgttgatttgactccgcgtgtcgcattgattgcggcaacgaaggctgatcgccatggcaatctgtttacaggtttcagcactgaggatactccggcgatcgtagaagcgactaaattccgtcagggtatcgttattgcgcaggtcaacgagatcgtagacgagctgccgcgcgttgatatccccggtgattgggtcgattatgttattcaatctccgaaaccgttttacatcgaaccgctctttacacgtgatccggcactgattactgatgctcaggttttaaagggcatgatggcgatcaaaggtatctatggcgagtatggtattaaaagcctgaatcatggtatcggttttgatacggctgcaatcgagctgctgttaccgacttatggtgaggagctgggattgaaaggcaagatctgcaccaattttattttgaatccgcatccttcgatgatcccggctattgaaagcggttgggtcgaatcgatccactgcttcggcggtgaattgggaatggatgagtatgtagctgcccgcagtgatattttctttgtcgggccggatggttcgatgcgttcaaaccgtgctttttctcagacggcaggacattatgctattgatatgtttatcggcggcacactgcagatcgatccttatggcaacagttctacagctacggctaaccgtgtggcaggcttcggcggcgctccgaatatgggctgcgacccgaaagggcgtcgtcattcttccgaagcatggcttaaatgcggtgaagaatatggcgttaaagaagcaatgtggggacctgtacaccgcggcaaacgcctggtcgtacaattggccgaaaccttccgtgaaaaactggcgcctggcttcgtagaggaactggatgcttttgctttggctaaaaacgctaatctgccgattgaaccggttatgatctacggcgatgacctgactcatatcattaccgaggaaggtatcgcatacctgcataaatgcagaaatatggaagaacgtactgccgctatccgcggtatcgcaggctttaccgaagtcggtatgaaggctgatccgaaagagaccctgcgtctgcgtgatcttggcgtgatcaagactgccgatgatcttggtattgatatgagcagagctaaccgttccatgctggcggctaaaaacgtacatgacctggtcgtttggtctaaaggtctgtataatccgcctgctaaattcagaaactggtaagaggaggagattaacgtggcattacaggttttggaatttgaatttaaatctgctgcaacacaggaaatcgctaaggaatggtcgcatcttggtgtaaccggttccggcgatttggaagtacttatggaaaagaaagctttgaacggcggcgttaaagccaaagtagttactcctgttaaaggctttgatgcggtttgggaaaaaatgctcggaaaatttgtaactgatacaggtgttggcaatgtaagtatcgagatcaacgatgataacgccaccccgatcgttgtttatatgagattacgccaggcactggcagaagctactgcaaaggaggctgaataattatgaaaaactggactgaacttgaaaacagcagcttctttgacgctaatgcccgtgaacgtgctttgggcatggtcgacaaagggacctttacggagtttttaaatccgctggatcgttattgcagcccgcatctgccggtacttgggactgctgtggaatttgatgacggtactgtctgcggcgttggtttgctgggcaagcatcctgtttttgtagtatcaatggaagggaaatttattggcggcgctattggcgaggtcaatggcggtaaaatggtcgcaactattcgcctggcattgaaggcggctgctgacattaaagctaaatatcctgaagaatatgctgcaagacgtccgctggtcgcggtttcttttgaaaccggcggcgtacgtctgcacgaagccaatgccggacttctggcccatgccgaagtaatggatgccttccaggactgccgcggtatcgttccggtagtagcggtagttggcagtaaagtcggctgctttggcggtatgggctttgtagctgcagctaccgacgtcattgtgatgaatgaagaagggcgtatcggcctgactggtccggaagtaatcgaacaggaaatgggcaaagacgaatttgacgcttccaacaaggctttggtttaccggacaaccggcgctaaacataaatatatcattcaggattgtaactatcttgttgaagataaaatcggtgagttccataaaactctggctgaagtggctgagataccaatggctgagatcgaaaaaatgcgccgtatcggttctctgaagctggtacaggaacagcaggagctggtgaagcttgttggagatatgcagccgaaggattcgatggatctgtggaaatatttcggtaatgaagatccggcagctttgcctgagatgacgacagcggaattccttaaagtagtaaaacgcagagtacgcagttaaggaaaaggaggaatatgaacatggaagaattggacaacactatgataggtcgcggacgcgatgctattgatatgatcatcgataaagattccttccaggaaaatatcattgacggttacagcttcgatcctgattatggccccgggtctgttgtcggtactgctaagctgaacggcaaaccgactacgatcatcgctaatgatgcgatggcgtttaacgacagatttcctgttgttttcggcggtgtcatcggacttgaggaaggttataagatggcaacggcagtttatcggactatggaagccgataaggataaaccgctgcctgagaaacgcgctatcgttttgatagttgatactcctggtaacggtcccggcaaaatggaagaaatcgccggtatgaataaatccacaggcggttatcagctggctttagccgaagcacgcaaagcaggacatccaatcgtggccatggtcattggccgcgcaatttccggagctttcctgtgccatggtttgcaggccgaccatattctggccctttccaaagatttcggcaccatgatccatgttatgccgctgacctccattgccaggatcacgaaaatggatatcgaacggttggaagagctttctaccagcaatcctgtttttgcagccggtgtagatttcttctacaaactgggcggcgtacaggaaattgtcaatcaggtagaagatatgcgggaagtaattatccggcatatcgatgaggttgctaaattaaaggctgaagggaaaggcgaactgctcggtccctggggcagaggtattctgggcaatgagcggggcggacggacacatagaatggaagctattgccaaggtcaatgcagaatttgctgcagttgccgataaatatatcaacgcgtaaggagattgcagatgaacagcttgcttcaggaaataagcctgctggtcgaagatttcggttctgctcccaaactggaggagatgccgaagcgtactttggcggataaaggcattgccgggccgacggcggctcatgtgattgaagatgttcatacgcctttgaatcttgcttatcttacctttacaacgggaacatcggcttttcaaaatatcgtcggagttacctatgctgaattgccggcacgcatcagagcttcggtcaggatcttagagcgcgctggactaaagcgcggcgataagctgcttgttacttatccgccgctggtaaatgttttttcagggcaggctttaaaagattttggtttgaaatggtcgtttttagtgcgctccagccgtgatgcctttctggcagcgctgtataaagagaggcctgcagctgtggtgggtgagtctgcgtttttacgggcggcactgacagatgctaaaaatatgggcgttgctgaagatctgcctaaaggagtaaagctgttgactgccggtacgcctctggatctggagttgctgccggtggcgcaggaacttctgcaggcggaagtacatgatttatacggctgccaggaaataggctggctggctatggacggtatccctgtcagggacgatatcgaactgacaccggcggccatcaggggcggacagcaatattatgagctgatagcaggcggcctgccgatgggtgacagttttccgtgttcagagtcgggacatgtctgtaataaggccggtaagattattacttaccgccgggaacggacttatccggagtatgaagtgatcgtaaaagctactactctggcctcagccgttaccttaaacagggtggcccgcagtattttgaggattaaaggccggatcgtcaaggtcagtcctgaagtacaggtcaatgccgaacaaacaatattggaactgcggggcgatcctatatcaggaattgaaataccttctgttacaatcaccgggcctgtacagacggaatttttcgacactatggtacaggcgcagcttgattatcagcagaacagtaaggcggatcccgtatggacaaaacgcagttaaaaaggcatgacctggtttatccgagcagtatcggcagggcaaggctgaaacaagtgtttttaaacgagctgactggggaaaaggcatttttagcggcggatattttccgcgctgacagcgttattcccggaatagtcagacgtgcggaagtactttcggcagacgtgataccgttgggctttgtgcatccgcagctatgtgagggacggcgtttacgcctgacagcagagctggaggtaggcgaagcagttaaattgaaacggccttatgagcttgcggcagctgaatttaaagtatctacgaattgtctggcagcggcgcaggcggcatgcagctatgcggcagagaggcggctgaaactgggaattttaggttcggccgggttggaaatagctaccggtttaccttttaccaacagcgaatctgatcttgatctgttgataacgggattgtctttgcagcagctgcaggaggtatatacagaactgcaggccattggaaagaagtttcaggtagacattgatctggaaacggagcttattaatggctatggtattaaggcggctgaattatttcagccgacacagacagttttaggcaagagtttacaggatgtacaaatattaaagaaaaagacagttgtggaaatactgtcacaggaggcataaatcatggaaattaaatctcgcgtacccggtaaaatcgttcgctttgaaaaacaaataggcgacagcgttgaagtaaaagacgtactgatagtaatggaagcaatgaaaatgaaacagctggtaccttccccggtagccggagtagtcaa

SEQ ID NO: 9995 - DNA, 9350 bp, Unknown
  gut microbiota DNA sequence
agttcgctttgaaaaacaagtaggcgacagcgttgaagtaaaagacgtactgatagtaatggaagcaatgaaaatgaaacagctggtaccttccccggtagccggagtagtcaaagaatataaagtgcagcccggcgaccgcgtaagtgccggtcaggttattgccgtagttgaataagtaaatttttaccgttgcctttagttgtttcgctccccttgagtggggagcgataataaaaaattgtactaaggtggtgtaatctcatgattatttatggtgttgcgttattagcattttgttttttaacaggtaattacattggcgatattttaggcgcgcttctgggtgttaaagctaatgtcggcggggttggttttgctatgctgctgctgattattcttaccaataaaggtatagatgcaggctggcttgataaaaagggtcaggagggtatcgcgttctggagtgccatgtatattcccatcgttgtggctatgagttccattcaggacgttgtcgccgctttatccggcggaacgatcgctgtattgggcggagtactgggcgtagccctcggctttgtctttattcctattttaagaaaatttggtgcatagtcataaaaagaatgggaggcgttttatatggatttcgcagcaatgttcattaaacttattactaaaaacggattagttgcggcttttattatcatcggtatcactacctggattgcctataaaatcggcggtttgaccaagggacgtatccatggctccgcaattgcgatcttcttcggtctgattctggcatatatcggcggtgtagtcggcggcggtcataaaggtttggcgagcattccgatgtttgccggcgttggtgttatgggcggagctatgttccgtgattttgccatcgtttccactgcttttggcgctgacctgcgtgaaatcaaaaaagttggtcttgtaggtgtactttcgcttatttttggcttattgacttcctgggtagcaggtgtgggtgtggcttatgccatgggctatactgattctgtaagtctggtaaccatcggcgccggtgtggcaacctttgttgtaggacctgtaacaggggcttcactgggcgcgtcttctgaggttatagccatcagcatcgcagccggcgttgttaaatctgttctggttatgattctgactccatttgttgctaaatttgtcggacttgataatcctcagtccgccatgatctatggcggcttgatgggtactacttccggtacggctgccggtatggccgcagtcgatcccaaactggttccgtatgcggcaatgacagctacattctataccggttccggttgtctggtatttccgtcaattctgtattttgcaacaaaagctatttttggttaagtaatgatcccggcagaaagcaggtgcagcgatgtatgatcaccaagctaaaaaattaaatgagcaaggtacgtttaaagaaatagtagtcgagatatcagcccgccagctttctgctaaatctgaaactttacggcaaatgagtatgtttttgacgcaggcggtttttatggaggtttgcgtccatccaaaaccaggcttagtcacccgtcatggcggcggtgctcatacagatatgagtattttgacttttgctgccggttctgcggttttggcaaaagctttcagtgatttacagattttagggatgaagcataatggaaattatcaggagttatttggaaaggtaagacgttacggcgtcagtgcggagcaggagctgctgcgcgtgacgaaaggagtcaatacccaaagaggcattttatttgccggtgggctattggctgctgccgcaggggctgccatgaataaaggtctggacagtaaagcactgtgctctatcgtggcagaaatgacgcaggggctgacagagaatgagctggctggactgcaggcagaccggcctttgacggcaggagaaagattatatcaggcttatggtatcacgggtatccgcggcgaagtggaagcaggatttcccagtgtacgacagaacgggttgcccggcttaaaggaagcgtttgccaaaggcgctggactgaacgatgctttggttcatgctttggttcatttaatgacggttgtgcaggattctaatgtcatctggcgcggcggttatgcgaagctgccgtttgtacagcagcgtgccagagatattttggcgcagggaagtatttttactgattctggacgccggctgctggcagaaagtgaagaacttttcaggaatgaacggatcagtcccggcggcagtgccgatctgttgtctgttacggctgcgttatatttagttgaaaacaaggaattccccgttgcgattatttaggacaggtcgcaggggaaagattagatagatgtttactgcttccggcatagaaggtgtgattatgccattcctccatcaagcaaaataaggcccgctaaaagggccttattttgctgttacaaccagaaaagaggtgcggtatggaatttgttttgaaagcactggaaggtcttttcagtatagtttttatcattggtatcggttttgtgttaagcagacgcggctggtttgacgagtacagcagcgcattgatcgccaggctggtgactgctgtgtcattgcctctttatatgatcgtcagtatcagtaaaaattttgatcataataaactggttgccatggcgcctgatctgctgctgccgatatgttccatgctgctggcttttggtgtcggtacaatagctgctcacgtttttaaaataaaaaaagaacggcgcggcattttctgtactaatttttttattgctaataccatgtttattggtctgccggtcaacctggctctgtttggtgaaaaaagtatcccggcagtaatgctttattatatggtcaatacaacctttttctggacacttggtgtacataatattgtgcaggatactctgagtgatacaaagaataaaccagcgtttttttctccggcagcactgaagaaaattttttctccgccactggtcggcttcattgtcggtatcattttagtcttgctggactgcaggctgccgtcttttttgatgaacagcttccaatatataggtaatttgacgacgcctttatcgttggtttttattggcatcgagatgagcaagatcccgttgggagaaatcggtttcgataaagatctgctgctaggcgttgccggacgttttctggtttgtccagtatgtgttttggttctgataccgtttctgcctgtaacgacgctgtcagcacaggtttttactatgcaggcgaccatgccggcgatgacacagatggcgatcgtagctaaaacttatggcgcggattctgcttatgcggcgactttaagctttttaacggtgcttttaggtattgttgtcgtaccgttgtatatgatgctggttaatatgtatatataagtaagaggtgattgaatgaacacagtaacagatgtagctgcccatatcaaacagatctggagcagcagcgcgtttatgaatttgctgaagatagagatcgatgagatccactgcggcggtgcgacggtaaagatgccgatagattttgacatccataccaatcactggctgggtgtgcacggtggtgctttggcggcattagccgatacagttatgggcattaccggagccagtgtcggcgaggttgtgcagacattgagcttcaatatcaattttatcagcaatctgccagggacggggacggcgatcgttaaaagccaggtcaaacaccatgggcagacaactatggtcattatggctgaaatgacagacgaacagaataatctactggctgctatcacgacgactatgtttatcgccggacattttaatgaaatacccagagaatggtaatgagggtatgaaatattagataacaaataaaaccgtagctgtgatccaaaacagtacggttttattttatgcagacacaagatgaatttagttaagttttctacaataatttactgcgaagcgggcgttaaatatgttacaattaatatatctaagctgatgtaaaattttattgcagataggagaatggatatgcagcaggatatgatcgtaattttagatttggggagccacgaaaacacaatggtggctcgcgccgtaagggaactgggtgtttacagcgagatcaaaccccatgatatcacagcagcagaactgaaagcgctgcctaatgttaaaggtatcatcatcaacgggggagaaaacaatattatcgacggtcagccgatcgacgtggaagcagctgtttatcagtttggcgtgccggtaatgtctgtaggccatactttggctaaagtagaaaatctgcctgcctggccggaacatacagccatgctggaagtgctcaaaaaatttgtttttgatgagtgccatgctacagctaactggaatatgaaaaatttcatcaatgaccagatcgaactgatcaaaaaacaggtcggcgataaaaaagttctgctggctttgtccggcggtgtcgattcttctgttgtagcagcgcttttgatcaaagctatcggctcgcagctgacctgcgtgcatgttaaccatggtctgatgcgtaaagatgagtctgaaagcgtcgtcagagttttcagagatgaactgaaagctaatcttgtctatgttgatgccagcgaacgtttcctctctaaactggcaggtgtagctgatccggaagccaaaagaaaaattatcggcgccgaatttatccgtgtttttgaagaagaagcacgtaaactggacggtatcgaattcctgggacagggcactatttatcctgacgtagtagaatccggcactaaaacagccaagagcgttaaaagccatcataatgtcggcggactgcctgaagatctgcagttcaagctggttgaacctttgtatcagctttttaaagacgaggtacgtgcctgcggtatcgaactgggtttgccgcacagtatggtttaccgtcagccgttccccggaccgggacttggcgtaagatgcctgggcgctataactaaagagcgtctggaagcagtgcgtgaagctgacgctattttgcgtgaagaattcgccaatgccggattagataaaaaagtatggcagtattttaccgttgtacccgattttaaatccgtcggtgtacgcgataacgccagaaccttcgagtatcctgtgatcatccgtgcgatcaataccgttgacgccatgacggcaactatcgaagaactggactggccgatcctgcacaaaatcaccaacaggattctggctgaagtcaaaaacgtcaaccgcgtctgctatgatttgtcgcccaaaccgaacgccactatcgagtgggaataaattaaaataggcttttgagtcccgaaaaaccttgataatacttgaaaaaataatttgtatagcacaagataagccatttatatgtgtagtgacaaaatccataagaaaaggtcttattgaaccaacagtgttcaataagaccttttcttatggattttctatcttgaatgacgtctttgaagatagtataatgaaaacaatgttaacaatgccataactgagcaagaaggaggcagaaaatatagctgtctgttacgacaaactttggaaattaatgattgataaaagattaacaaaacacagctttgcgaaaagacgaagattacaactaacgcaatggcgaaactcgagagaaatgaagatgtgcgagtggagacacttgtgaagatttgcaatgtgctgaattgcgattttataatttggatatgataatttctcttggatatagaattaaatcatccgtagctacaaaatttagaaaagaggctacatagcgatttaaaaagtataagattaagggctttaccaatgtaatagcacatgggttgctctattgcatacaaagacaaaggaaaagaggacgtggagtatgtcaaaactcaatatagaccaacagacaataagacagttgttttctgataagaaagccgattttttgattccggattatcaaagaccgtatgcatggggcgagaatgagtgtcagacattatgggatgacatctttacatttgcttttccagataacgactattcaaagtttgacagcgatagtgacgaatatttcttggggcctatcgtaactttcaaaaatgagaatgcaaagcttgaagtaattgatggacagcagaggcttaccacattaatgttgttgatccgtgcgttttactctaagtttgagaatatgaaagatgaaaattcaagaagtacaagagaaatcatcgagaaatgtatttggaagactgatgaatttggtaagcctaatatgaatcgtttaaaaattgattctgaggtatctactgacgatgataaagatgagtttataaatattttaaaaagtggaagagttgattcttcaatgaagagtagatatgcagatacatatcgtttcttcgagataaaaattcatgatttcttgagtgattatccttcctattttgcctatttgccaacgagaattttgaacaactgtattttgttaccgatcgaagcagaatcacaggatactgcactgcgtatcttttcaacattgaatgatagaggaaagccgttggctgatactgacattttcaaagcacagttatataagtattactccacaaagggagaaaaagataatttcatttccagatggaaagcattggaactgatatgtgattctatttttagtacgactactggttctcctatggatgaattatttacaaggtatatgtatttccttcgtgctaagaacggtataagatcgacgactactgaagccttaagaaaattctatgagcgaaataactatttgattttgaagagtgatgtcgcactgtcggatttggagtcacttgcagcattctgggattccattgtaaaacagtctactgcgttctcagaaagaaacttaaagttattatttgtgctgaattatgcacctaacggtatgtggacatatttcttgtcagtatattttatgacaaatagggatgctgatggtaatctggaagaaacaaaactttatgatttcttaaataaaatgattgcctttatatgggcgtatgcaattatcagaccaggcgtaaatgctctgagaacaccagtgtatccggaaatgataaatattgtaaatggtaaagatattgcatttacagattatctgttggatgagaaggaagtaaccgcagcgatcgaaaactacgtgtttacgaatggtcgacctatcactcgttcgatgcttgcgtggtggatgtaccaagatgaagaccaagtattgatagacggtgcgcagaaacttgaaatagagcatatatttgctcgcaaacgtcaagagaacgagaagacgcttaaggataaaaataacctcgaaaagcttgggaataaagtgcttctggaagaaggaattaacattcgtgcttctgattaccgtttttcggacaagattaaatattacaaaggattcactacagatagcggcaaaaagaaggttgccacaaaggataatgagcttcttactatggcaaatacgatgacggattatacagagcaggatattgtggatagaacagcaaatatctatcagagttttattatgtttgtaaaaaagaataacctgtttaagtgatgtagcagggaaagaaaatgtttatattttgattactaataggaagactattgaaaggattgtatttgcccactgatttaggggatttctaaggatatcagaagtacttatttattttaatgctgttataagatatcaagaatagtaaagaaggtgttttatggaaaatttgcaaagaatcgcgcttttaattgatgcagataacactcagttggcaaagttggaggatgttatacaggaaatatctacacatggccgtatcgttgtaaaaagagcgtatggtaattggagaaaagatacattaaaaaactgggaaaatgagctgaaacgtttagcgataaaagcggagcagcagtttgactatgtttctggtaaaaatacaactgatatggcgttggtaatcgatacaatgaatttgctgcataaaggtatttatgatgcatttgttatcgttgccagcgacagtgattataccccgttggcaataaatttgcatgaatccggagtatatgtgatgggtgttggtgaaaagaaaacaccggaagcttttagaaacagttgtgatgaatttatttttctggagaaccttggcgaaaatataaaagcagcaaagtctaaaactgaaagcagtgaaaaagcaatagagatagaagaggaatgcttggaaactgctacagtcgattctacgaaagaagatataagtgtaatacataatttattaaaaatagcatctgacaagtaccaggatgatgaaggctatgtaaatgttagttcagccggacaatttataaaaagagtaaaaccggattttgatgtgcgaactttcgggtttattaaattgccgaagctaatagaagcattccccagaaaatatgaaataaaaaagtatcccggaaaaggtaaagttaccattattgcctatagatgcaagtaataaatacagaggtatttgtgttagaccttgtaatatactgaagtcaccataaagagtgtgcgagggacagccctgctgacaacacagcaacctgccgaaggtaagatgctaaagcctgaatgatgggcttacaggaaactttaagacccatcatatcatcgatgggccttttttatgagtaaaattgagggggacatagtcatgaaaaagaaaggaaaagttgaacaggaaggatctgacatatctttaagacgcgagaaagtttttggtgaagatgtatcgcggctttttaatggctacgatcgaagaagtattaacattattattgtataaagtattatccaaaccactattttgtgttctgtaataacacaggcaaataatgtaattatgaacgatcctatgtttgtattttgttttgtgatagtaaaaataataatgccagaaataaaagagatgtacaaaattaataagcgatgtgaaagcaatgaatttatggcgttttataaagaaaaatttaattgtagtttaggtaattataagttgaatggtatttgaatatattatattcaaaataattggcatataaatcatttatagactataatgattacaatacagctaaaagaatataaataaaat

SEQ ID NO: 9996 - DNA, 59109 bp, Unknown
  gut microbiota DNA sequence
attacatatgctcagttatttaataactatctggcaattcaaacatttcatatatcattaactctattacttccaccatcgtaaaatctccctattctacaataataacagaaagaagatgatagttatggacactttaacctttaatagcaacacttatagcggtacctacactcctggtaataacggagttccatgcacatttacggtggtagttggaacactgtcgcctactgtaggcgacaatttgacgttagctagaataaataatcgaaatgtttatattcaagatagcgcaaacaacaaccagtacattgtaacccttgcctaaattcctctgtattataaaataaaaagaataccatatggtattctttttattttacttttgattctcatccgaattatttttatcactataaattctaaaggcactacgaaataccagaaagaaacataataaaagcgttactatatccccgctgtcagagatattgaaatttaaacgccgtaacacgaaaatataaagaaaaattacaaaaattatagtataatcctgctgcttcattatcttcaccccaatatattataccccgctgattttattataccatctcctgatattagtgctgtattttattatttacaaaataaaatacagcacaaaaaaataatgcaaaacactgccagtcatcacaaataaatgccatactgaatgcataaatttatgttttttatcagcatagaaaaaaattcctattgtataagctaatccaccacttactaacaacattagaccatctgcaggcaacattttccacaaatacggcaaagcaataataacagaccatcccataagcacatacatcagcaacgacagtttttcccacctgctgagacttatcgcattgagagtgatccctacaactgtcagcagtaaatttatccccaataacttccaacctaactcaggcggtaataaaacaatacaaataggtacataactacctaaaatcaaaagaaaaatcgaacaatgatcaagcacctgaaaaatctttttcgcggtactgtttgttatagcatgatatattgtagacatcagataaagaaaaatcaggcaaaaaccatatatcgccgcactgacaataccgctgacactgctgttataggatgcataaacgatcaaaacaacagtaccaagaacagccaacagtgcgccgatgccatgtgaaacggcattagctatttcctcacctaaagactgcctgtttaaactgctcatataatcaacctccagtcttacgtagtaaattatagcactatccgtttaaaaaagtgtgacaataaagttaacctcttactttattgtcaaaatattttctaaaagtaactattatcaacattttccaaaatataatcgaaacaattagtaaaaagcattttagattcgatataaggagtaataacgcttctaaacaagccattccctctaaaaacaattattttaaactttttttcaagttttttagcattgcttaattcatatttctttaatatgattaattcagaaagtaaaattaaacttcaagaaaatcattggaattcttatgaagctattttttacaagaaaggactgatttttatgactacaagaaaaataaaaaaattaactacaggacaacgtacaattgatggcgcaggcgtacatctggtccgtgtacttggccacgatacagtaatggactatgacccgtttttaatgctggattcttttgactcacataatcctaccgactacattaagggttttccaatccatcctcatagaggtattgaaactatttcttatcttgttcaaggcgaaatgacacaccaggatagtttaggcaataaaggaacaatccgcagcggcgaaagccaatggatgactgccggcagtggtatcatgcaccaggaaatgccccaggccagcaaacatatgcttggcgtacagctttggctgaacctgccccaaaaagaaaaaatgactgatccaacctattttgacattaccggaaatatgataggcagtaaaaaaacagataatgctataatacatgtgcttgcaggtgaatatgactctataaaaggtgttgaaccacctcatatcaaggcaactatctatgatgtagaactacaggcaggcaagtcaatcacactgccaactaaaactgaggataatgtttttatctttttgattgaaggcaatgctataatagacggcaccaatattccagaaaaaactgcagtgctctttagtgagggcgatgaaatatctgtcagtgctgaatcagataaacaattacgttttatgttctgttctgctaagcctttaaaagaacctgtatcttggggtggaccaattgtgatgaatacgcgcgaagagctaaatgaggcttttaaagaacttgacaaaggaacttttatcaaacataatgcagcccatcttgattaatcagtaatactatccaagagctgttaaatattaaaaaatacacaaaaaagccgcaacctttggttgcggcttactttttatttggtgggcccagctgggttcgaaccagcgaccaaccggttatgagccggtggctctaccactgagctataggcccatagtaccatgcgttgtctcaatggtcaacagtaatattctaaacaaatttggtcgagttgtcaagctaaaccgattattccaagaagtcttttaaccgtttactgcggcttggatgacgcagcttacgtaaagctttggcctcgatttgacgaatacgttctctggttacaccaaaatgctgccctacttcttccagggtacgtgaacgcccgtcttccaaaccaaaacgcagttctaaaaccttcttttcacgcacagtcagtgtttccaagacttcttccaactgctcacgcaataaagtgaacgaagcagcatcagctggtgccggtgcatcatgatcttcaataaaatcccccaaatgcgaatcttcttcttcaccgataggagtttccaatgataccggttcctgtgcgattttcataatctcacgaacacgatcaacagtagtatccatttcctttgcaatctcttccggcataggttcccgcccaagttcctgcagcagttgacgtgatacgcgaatcagtttattgattgtttcaaccatatgcacaggtatacgaatggtgcgggcctggtcagcaatagcgcgtgtaatagcctgacgaatccaccaagtggcataagtactgaatttaaagcctttattataatcaaatttttctactgctttgataagaccaaggttaccttcctgaataaggtctaaaaagagcattccccggccaacataacgttttgcaatgctgacaaccaaacgaagattagcttccgataaacatcgttttgcggcttctccttcttcaaaaacttcttccaaaagttttccgtaatcttcttccaacgtcatatagctatcaaaaacagcagcatcattttcttctggtaagcggcgcttgatctcgtcaagtaaagtcttgatctcaaacagcgcatgtacttctttatcactggtctgacgatcgactaccattttatcacagtctgggatcatcacattgtgttcctgcatcatacgttgtaaatgcaaacgctcatctttagtaaactcaacaataagatcctgatattcagacaatgtacagggagtacccgctgcagccgccctcgcaataattccaagcactttttcaacattgcgcagttcacagcttttatgttcctgttccaaatgcttcttgatttttttgatcagagtagcagttttttctttaccgctgtaagcaggaaccaaagctgcaggcaatgacgaattcatcagcctttcggcctgttttcccttatccatacgtttagcaagcttgatttcatcttcgccgatcaaaagcggtacacggccgatctccttaagatacatcctgaccggatcatcaatgcttaccccttcaggcacactgagattagccagctctgcttcattgatttcttccgtatcatcatcgttgaccggcagtacatcatcatcgctgttttcgtcgactacgtcgatgcctttttgggcaatcaactcatacatactgtccatatcgtccggagtcatatcttctacgttttgcatagaatccataatttcacgataagtgagaacaccgccgtgagatttgcctttaagtaataattcctctacctggtcggcagaaattttagtattagccatggtgttccctcctttcgttgcttaatatctgctgttgttttttaatataattttttgatttcatctttaattttctggctttccgcaagttcctgcaaaaagcggtcatcccccaaacgttcatattcgtcggcgcgcagacggtgctcttcatagcttcgttccaaagcgcccctgcgcatctgccgcaggcaatcatctactagtttttcaccgttttcttccgcaagatcttttgtcataatctgcgccagctccgtggccgcttcatttgacagttctgtaaaaagcttatcagcagcactctgattgccagcatcaagctgcttcagcaatccttcatagatttctccgcgaaattttgacataaaaccgacactatcaattttatctctgtaaacaagcgccaaatcggtattttttaaaataacgtaaagcaaaagctgctctgctaaatcttcagctgaaagtacgttgggctgtacctgccatttagacacggcttccctacgatcatttttacggcttagcttacgatattcactcatgatgagcccttcgtcaattgtcaaacgttgggccagcgttttgatatgctgtgcaacctcaatttcatttttgcactctagtaggaatggtagtatattcgacacagcttcaacttttcctgctaaatttgaaacattattttgagaaatgacatactgcatctgaaattctatacctgaaacagctgtttcaatcagccgtagataagcatctttaccgtgcttacgcacaaattcatcaggatctttcccatcaggcactatgagcactctgactttaagcccggcttctttagcaatgcttactgcccttacagtggcccgttgtccagctgcgtcgctgtcatacgaaaaaactacttcatcagcggcacgagctaaaagtttagcctgctcctgcgcaaaagccgtccccattgaagcaacagcccaatcgataccagcagcatgtaaactgattgcatccatataaccttcaacaatcacggcctgcctgcgtttctttatttcctttaaagccacattcatcccgaacagaagagttcttttgttaaaccactctgtttcaccagtattcatgtattttgccatctgttgagaattttgctctaaaatacgaccgccgaaaccaactacatgaccacgtggatcctgaataggtatcatcactctgccacggaacttatccatcggcccacggtcatagtttaccgccagcccggcctgcaccaacagtccagcactacatccacgttttccaagtgctgaaagcaatgcgttatagttcggcagtgccaccccgattgaaaaccgctcgataatctcaggtgtaatgccgcgtcctgtgagatactcctgtgctttaattccataatcagtcttcgtcaaacaggcctgaaaaaaacgcgtcgccagttcattagcggcaataacctgttttgcctgtttctcacgttccagttcagctttagtcttttccttttcaggaacagcaatacccaatttatttgccagaagctttaaagcctctgggaacgtgcaattttccattttcatcacaaaggtaaaaacatcaccgccaacatgacagccataacaataaaaaaagttcttgtccggcgttacggaaaaggacggtgttttttctccgtggaaagggcagcagccccaaaaactgccgccgcgcttttttagcggtacatattcagaaattatctcgacgatattagcttgggagcgaacctgctctttaaaatcatcaaacataccactcataattattgctcctgtcacctcgaataccatctgatttattatattcaatatttaacaaaaaaatcctctttttaacggtagataattttagcattacgacaagtttatattatgggaatgtaatgtttattaaatagctgcacagctcctgcatctgtcagtccacccacaaaatcgactacagtctgctgcaatccgaaacgatctgccagttccccatattctcttggcaacagctgcggatactccatatataaatccataagagtcctaacaacatgttctgccttgttatgttcaaccgtcagctggggcgaacagtaaatataatcaaacataaaattgcgaaattcttcaacagcttcttcataatatttatcaataataatttgcggctgattcagtgataactccacaatattatgaacaagcacatccaatatctggcttggttctgttcctaagcgcatagcgacgatacctggcaatttttcaggaccgatgatgccaactttgcatccatcatcgaaatcatggcacagataagcgatacgatcacaacgccgcaccacttgcccttcaagcgtctttggcatcgtactgcctgtatggttcacaatagcatcacgaacttcacgggtcagattcagccctttccccttccgcccatacaattctacgagacgaaggctctgttcattatgtttaaaatgtccagtataagaattaattgcccgctcccctgcatgtccaaaaggagtgtgcccaagatcatgccctaaagcagcagcttctgtaagatcctcgtttaatctcaatgctctggcaatagtcctggcaatctgcgacacttccatgctatgagtaagacgcgtacggtaatgatcacccggacataaatatacctgtgttttatgttttaacttacgaaaaggagtactgtggatgatccggtcccgatcacgctggaaagccgtgcgcagatcatcggcagcctcctcactatcacgtactgcctgcgaacttttagccgcccagggtgccagtgtttcctgttctatattctcgcttatttctctaactgataacattgttcttcacctttatttcactttcaagcattgtcatcaggcacattaagtaatataattactcatgtgaggtgaactgaatgaaaaaaatttttatctttgttttactgttgctcttagttcctgcaatttgtctggcagagccgcaggtaaccagtgataaacaaacttttaacccttttacaggagtttatgatcttcagggcaacgtccatgttgaaattggtgacagaatcatcaccggcgatgccgcacaggtaagtatgtataaacttgaggtacatggacaaggtaatattaccctgcgcgaaggagatatcaccttcgattgtgatacagtcgatgtatacggtaaagaaaaaactgcctacgtagcaggtaatatgaactttactcaaggtgatatgatcatcagcgccgataccggcagctttaactggagcacaaaaaatgctgtttttaacggtaatgtaatcgtcaacggtgaacctaaaaatggcgaagtcatttacaatgtccgtgaaaaagtttttgtaaattagttttacagtttaaataaccctcgcttaggcgagggttatttttatttagcggcggtctttatttttctgcacatactctaagatcatacctgctgtttcttcgatcgcacggttagatacattgataatagtacaatgcagacgacgcataataccttttgcatattcaagctcttcattaatccgtttaacatcagcataagcggcaccatctgtcagtcccatagttttcaaacgttcgctgcggatctcattaagtttaaacggatcaataagcagaccaatgattttatgcggaggaactttaaataattcttcaggaggcatgatttccggtaccagcggtacattggcaacttttatttgtttgtgtgccaagtacatgctgagcggagttttagaagttcttgaaacacctatgataacaacatctgctttagccagtcccaaaggatttttgccatcatcatatttaacagcaaattctacggcttcgacacgtttaaagtattcatgatctaaagcatggatcaatccggcctggtttttaggcagcagtccggaagttttttcaatagccttaagcatcggtcctaaaacatcaacaacctctacatcatgctccattgctttatgcgcaatatgttcacgcaattcaggtgaaactacggtataacagataataccattattttccttagcctcttcaataaccttttcaacctgcgccttatctttaacataaggaacacggatcacatcaaatttttcctgtacaaattggctggtagtagcctttacaacagactcagcggtttcaccaatagaatcagaaactgcatagataatcggtaatttagctatgataattgcctcctttgccctctgccagatccactaacagacgggtaaaattcgttttagtgatacgtcccactacttcgtaactgcgcttatcctcgcccacacatctaataacaggcagacaatcaatctcattatcaataattttacgtgctgccgaagctacagaatcttcctgtttgactacaataagtttagacagtggtgtcatcaccattacaacaggaatttcacgcagatcgctgccattattgatagcagctttaagcaagtctttacgcgataccacccctaccaaaagaccagcctcatcaagaacaaatactgtccctacatcctccaggaacatagttacaacagcttcataggcgcttttatcctgattgactgctacaggcacagactgcagatcacgtacaaggatgccggaaatttcttccatcaacattcccagcgtattcttgccggtaaaataataaccaactttaggacgcgcatctaaaataccgcccataactaaaatcgccagatctgatcgtaaagccgcacgagttacattcagacgttcagcaatatgttcgcccgtgatcggcccatcctggcgcacgatctcggcaatacgtttttgtctgttacttaaagaaattgtcctcacacccttccgaacttacattaatttttcctatatttatatagtatacgctattttatgcaaaatccctgcttccggtcataaatatttttaaaagtatacaaaaataacagggccaaaatttcggccctgttattttcatatattttcataactgctcatgttccattctctggatcataatacacagcagcaaaaaataacggtctgtcattttaaaataatttttttgtgttatttctttgattttccccaaccgataacgtagagtattaatatgtatatgctgtctttcagctgcatcctctaaactgttttcccgcaaagccgctgaaagtgtatccaaaaggctcgattgatagcgtctgtcatattcctgcagtttatcaagcaccgtcgtcttaataaaattatactccgaagtattgcggcagtgcatcagcaaactgaacggcagccattcttcagccttacgtactcctgaaatatgcaatttatataaaagtctgataacgtttaccgacatctcataatgctctttaattcgctccagttctgtaaattcaggagatattacagctgcagctattttattctgttccttattatattttttgaatatattaatgctcgtaagagcttctttactgctgcataacaagatataaaatttttcctcttcaattaaaaatctatcaatcaaataattgcttatattatggcttcctttagaaaataaaatcaaattatatgctttttgctgcacaaatcccagattagcaagcttttcagcaataacttctccacttttgatttcaccattttttatttctttccaaaaacgttccactgttttctgcagcgtttcataatggtcccacagcttgatggctaaaaaagaagctccctgttgcccaatcaaccgttctttttccgttaactgcccctcagcaacaataataaacctccctataagctgactacgggcatagcattcgaaaatatgcagctcattgataaaaaagcccgcatcagtatatattctttcattaaaaccagttttaattttttctgtccaatcaagaaaatcctgtttacgagtacctcgtctgctccaggaagcaagtatcttcccttcatgattcaggcaaaaacaattcttgtgaagctgatttcccaaaacattcaccagcgaagccagatcatctgaattcagtgaagtatgaataagtttttgatagtttttttctacttcaatcaacatattggtttgataattctggatttcagaagtgattgtctgcaccagttctctaaacttgactgcagttttcacttcaaataccggcagccggtactgatctgccaactgcagtattttcagcgggatcttattgataaaacgacctgttttgatacctatcgctgatattcgcggagcaagctttttaaaaccatcttcctgcaggtcaggacttttactgaaggcataccaggtagttaaaacaaactcacctcctgttacccattcgtgcaaatcaggcccttccataattgttacatgtgttatctgattgtttaagttcccatgcttattaaccaatgtcacacgttcggcaaaatctttgatttccaataattcatttaaggtcaccattttcttggacattatctcaccttcttttctaatgccatatatttctttttttccagaatatcctgattacgattttactatttagttatttttttagcaaatccaaagatttcaaaaactgttatactaaaaagctaaactttacccatcgtaaaaccttcttgattttaaaccagcgccttatttttcattccggtaaaaaaatcttgaggcaactataaaagcagcctcaagattatcaaatcttccattaatcattcacataaaactaagtattacaaaagttccactgatgataacgccggaaacaattgtccaaataacgcaatatcccataatatcacgcgccgataatcccgcaactcctaaaagcggcaatgcccaaaacggttgaatctgattagtccagccatctccccaagcaaaagccataattgtctgcggaatattcgcccccaatgcctcagcagccttcatcatgattggtccctggatagcccattgcccacctccggaaggaatgaaaatatttaccagccctgccgataaaaatgtataaagagggaaggtatgtgctgtagaaatttccacaaaccacatggaaatcatatcaaccagaccagaagcagtcatcatccccgacataccagcataaagcggaaattgcaaaataataccgcggctggcaccgattccctgtgccacagcctttaaaaagccgttaggactgctgtgcagatataaacccaatgttaaaaaaatcaaaatgaccaaattcaaattcaggtcaaaaccaatcttagaaaaattagctcccagataaatcaatgggaacaaaccaaacaaagcgttgagccaataagcattttccaatctttcggcaaatgtcatatcttttttagcaattcttatctctggtttttcttgttctttttcactgtattccactatttcattagcaggaggtttcatattaaaatacacgataaacagcataattacgatgatagccgtcattaccagattccaggaagaatacagcgtatcaccaaccggtgtcagtggcagtccgagcttctccataaaattgcctggtgttgctgaaacaagcggaatcgaagaagacggcccgcgaataatctcaccgccataagccgcagctaccaacagcggaaaatgcaggcctttaacctttttgcctacctctttcgcaagaactgcacctataacaagcccaaatccccagtttatatagcaagacgcaatagatactaatgcagtcaacccaagagcctgctgcggagttttaggaatacctgttaccttgttcaaaatctttttagccaaaggtgtcaatgccagtacataacctgtcaataaaactaaaaccatctgcatcccaaaaacaaacatcgatgagtaccctctgccccaatattctatcatttgcagagcactcttgttcattaaaaacattccgccgcaaaatacaacaaatgttaagagaatagccaaaataaaagcatccggaagataattctgcaccatcttcagacagaactttgttacagtcttcataaaaatccgcctccttttcccattttctttttcatttacaccagctctaaaaccgtagctgatcctagccctccagcaatacataaagtagccaagccatatctgacctgtcttttctgcatttcatgcaataaagttactaaaatccttgctccagagcaaccaatcggatgccccagagcaattgcaccgccatttacattgaccctggtcagatcaatttccagctcctgtatgaccgctaatgattgtgctgcaaatgcttcattgatttctatcagtccaatatcttcgatccttagccctgcccttttcagcgccaaccttgttgcaggcacaggccccattcccatatatgccggcgaaacacctattgaagcctggctgattattttagccataggctttaaccctgcctttgcagccgcactttcttcagcaatcagcaacatggctccaccgtcatttcgtcctgatgcattgcctgccgttacgctgccgtcctttttaaaagcaggcttcaattctgaaagtttttctatcgttgacaaacgtggatgctcatcagcagcaaacatcaaaatctcttttttcttttttactggcaaaggttcaatctcatcatcaaagcgtccactttttattgcagcctgagctttttcctgactttcgcaggcaaaataatcttgtgccgttctgctgataacatatttttcagcaatattctctgcagtcatacccattgtcaggactccatactggtcagcaggctgtgaccgcggctgactttcggtattaggatccagcaaaatcccgttacctactgcataacccctccgtgcctctctgagataatattgggcattactcatactttcgacaccaccagctaaaacgaagtcagcatagccgcacataatctcctgtgccgcattctggacagcctgcataccagaaccacattgtctgtgtactgtataagcctgtacttcaagcggaaattttgttatcaatgcagctaatcttgcaatattaggctggtcgctgctctgctttgcctgccctaaaattactgcatccagaagtctgatatctaaatgactacgttcacatattttctgcaacaaaaaggcagcaatttcctccggctgtatgtccttcattgctccgttcagttttcctataggcgtcctgattccatctatgactaccggctgcagcatatctatacctcccttatactaattttttcagccagctcataatgagcagatgtcattgctgcaatttcttccaatgtaacatcagaagtatgttccagtaaaaacatcattccgtccttaaacttaaatacagcatattctgtgactaaagtattaactactttccgcccagtcagcggcacagtacaatcctttaccagtttatgcctgccattttttgccgtatgagatgtcgcaacgatcacctcttttactccaacgaccagatccattgctccccctggtcctaaaacacctttgcccggcaaagcccaatttgccaggtctcccgcttcatttatctgtatggctccgataactgtagcatccatacgcccacttctgatcattgcaaaagatgtagcactatcaaaataacagcatccgggcgtttcagtaaccggtgtacgactggcattaatgagattaggaattattgcctccccgctaagttgtttaggcccaacacctagcattccattttccgtctgaatataaatatgtttatttgctggtaaataatcaaccgccattgtgggaatacctacacctaaattgacaaaaccaccgtcaggcagcatttccgcaactcttttagcaattcttacttttgtttccgcttctgacatgtttctcatttaactgcaccccgattctgcggtaccaaaacatccacataaatataaggtgttacaatctcttccggcgaaagcataccggtttctacaatctcatcaacctccacaatcgtcaaagcggctgctgttgccataagcggattaaaatttcttgctgttttttcataaactaaattccccatagcatccgcttttctggcatgtaacaaggctacgtctgctttcaaaggatacgccaaaacataggcttcgccgtcaataacttttgtttcacaatgcgcagtcagctctgtgccagctccaacctttgtataaaacccgccaattccgcagcctcctgcacggatactttctgcaaatgtgccctgtggcatcatctctaaatttaactttccatcaaaatataattccgcagcttcagtattataggtaaaataggtacctatagcttttttcagcatcctattccttacccaccttcccaagcctacattaggagtaccaagatcattggcaataacagtcaaatcatgtatgtctgtatctgccagtaaatcaatcagcctctttggattacctacatttccaaaacctccgatcataacaacatcacctgacctgacaagcttaacagcttccacagcttctacaatctttgctatgataatcacctccatattagttctttgatttcagtatacaaagctaaagacgagcctaatatgtagaaacctacaaaaataatctgatttttttgcatttttgcacaaaaatagcccttataacagttatcaaactgttataagggctataaaaaataacaggaccgaatattcggtcctgttaagttaattattcattattgaagcagttcgcgtaccatttgattgatacgtttaccgtcggctcggcccttagccttcgccataacagcaggcattactttaccaatcgctttcggtccttcggcaccagtctcggagatagcttcagcaaccataacacgcaattcttcatcgctaagcggttcaggcagatattttttgagaatctcaatttctgctttagcctgctcggctaattcactgcgttcggctttttcgaattctaccaaagaatcctgccgcatcttgacctctttcagcaagatagccagaacctcatcatcattcagttccttcttctcattgatttcgacatttttaatattagcacgcaccatacgaataaccgataaacgcagcttacctgcttcacggtccttcatggcctgtttcatatcttctgtcaattggtctttaatagacatacagcacgcccccattatctggttttacgttttctggctgcttcggattttttcttacgttgaacgctcggtttttcataatgttcgcgctttctaacttcagaaagaattccggccttttgggttgctcttttaaatctgcgcagcgcactgtccaatgtttcgtttttgccaactttaatttctgccatctgatctccctccctccacacacttagggaagtgtatatatgcatttcatgcgttttttgcactattgctgactatcgtcagaccgcaattaccgcacaatattaccagtaaattatatcttatgataggccttttgtcaaggtatcagcagggcggccaccccaatgctttaccgcctaaaagatggatatgcaaatgcttaacggtctgccctccatcatcaccggtattggcaacgatgcgaaaccctttttcattaacaccaagtttctcagccagttccttaactttcccaaacatatacaggagcagctccggttctgcagtaataatattttcagtatgagctttcggtatcattaaaacgtgtaccggagcagcaggagccacatcacggattacgatcattttgtcatcttcataaactctttcagacgggatctctccggcaataattcggcaaaagatacagtcgttcatttctttccccccttagtgatcctaatttttataatattcgtcagaaaatttaaaagtcctttttctatttactctgttcacaatttattttcaaactgtaactaacaaagtaaaaaaatctttaataaaacgcttgacttatagtcaactccagccattatactgaacttaaagtatttttaatcatttatctaagaaaggagaatttacagtgaaaaaatttttatcaacattactttataccgctgccgcaactttattattcagcgcttgtggaatgactgccaatacagtttcttctcctgttgaaccaactgttaaaagtaatgaaaaaacagcagtaaataataaagctcttgtttatttcagcaaggatatcagccctgtaagtctgatcaaactatatgataaaatcaaccaggatatacatggtaaagtagctatcaaaatccatacaggagaaaagaacggtcccaatatactcccacgggaaatagtgatggctttgcagcagcatgtacctgacagtaatttagtcgaaaccaacactttctataaaggtgaccgctataccaccgccggccaccgcgaaacattaaaagttaacggctgggatttttgtactgtagacattatggacgaggaaggagcagtaatgctgccagtaaaaggaggcaaacattttcaggaaatgtcgatcgctaaaaatatgcttaattatgattccatgatcgttttgacgcattttaaaggacacactatgggaggatttggcggttcaatgaaaaacatagcaattggcaacgcagacggcaggatcggcaaagccatgctgcatacctctgacccatccaacccctgggaatatagccaagagcgttttatggaaaatatggctgaatcagcaaaggctacaacagatttttttggtaaacaaatcatttatatcaatgtattacgcaatatgtctgttgactgcgactgtgccgggcttgctgcggcaccaccaacaacccctgatatcggcatacttgcttctacagatattcttgccgtcgatcaggcttctatcgaccttgtttttgttttaccagatgctgctaagcatgatctgcaggaacggatcgaatcacgtcgtggtctgcggcagctcagttacatgaaagaactttccatgggtaatgatcaatatgaattaattaccattgaataaaagaaaagctgccgttaaacggcagcttttttattattccttcagcaattctccgattaaaaaactcgtctcagccttcagtaatctcactttttttatcttgccacatagttcagcttccgaccgaacatagacccgtaaataattactggtcaaaccttctatatagccatcctcaacagtctgctcaaacaatacctccacagcactgccaacaaaacgttctaaaaatttctgctgctgcttatgatcaagctcagcaagttgtgcacaacgtctttgcttaacagtttcaggaatttgattgggcattttttcggccggagttcccttccgtttggaataaggaaaaatatgcattttactgaacccgcagttttctgcaaaaaccagtgtagatgcaaactcctcttccgtctcacccgggaatccggcaataatatcagtagtaatggcaatatcaggaatacgtttacggatatcggccaaaagttcggtaaaacgtcgggtatcatacggcctgtgcattctggctaaagttgtatcacagcctgcctgcaaaggtaaatgcagctgtcggcacaaccgtttatctttttccataagattaagcagcctcgcttcgacctccactgattccaatgaccccaaccgcagtctctgcagaccctctacacttaaagctgcctcaacagcatcaaataaagtcagttttccatcatgttctttaccatagcagccaaggtgaataccgataagcactatttctttataaccagaagctacaagctttttaacttcttccctgatgcttgtcagactacgcgaacgcaacggtccgcgggcaaaaggaataatacaataagtacagaattgattgcagccttcctgtatttttaaaaaagctctggtcttatcactaacatcacctgcactcagttcttcaaactcagtgttggcactcagcttacgcacgctgtctattgtatcaacagactgaaaagcagcagcttcttctaccaaccgtacgatatctgctctatcctgattcccgataataagatcaacaccaggaattgtcttcacttcttctgccgccgtctgtggataacagccagtcacaaccacgaaagcagttgggtttctgcgcacagcacgattgatcatctgccgcgatttacgctgccccgtattggtaacaacacaagtattgatcacataaatatcagcttcgcaattaaaaccaactacagtataaccatgactgcgaaatatcgcttccatgctggcagtatcggcctgattgactttacagcctaaagtgtaaaatgctattcttttcatcaatcagcctcctaaatcaccagtttcataaaatattgcggccgcagctactaatgcagctgtttccgcacgtaatatgcgcttgcctaaacttactaccaatgccccagctgtacgggcctgctgtaattccgtctcggaaataccgccctccgggcctatgatcagcagcagctccttcaaagcctgctccttttgcagcgcagccttcaaaccaagcttatcctcacattcataagctatcagtttacagtcacagggattatcagcaagcatctgttccatcgtctgtactggctgcaccattggtataatatcacgcttgctctgtttcgcagccgcttcagcaattttctgccagcgctcagctttcttaacagctttatcaccttccaggcgtacgaccgaatgctccatagctactggtataatctcactgactcccagttctacagccttctggataataaaatccattttttcacctttagccaacccttgtgccagtacgattcgcactgaaggctcatgactttccgccagtacctccagacatttgactgtcacaacactttcattagcatcagcaatttcagcaagagccgtgacaccatcatcacttacaatctgtactctggacccgcattgcatccgcagtacagtataaatatgcctggcatcaacacccattattgtcatcgtatcactgtatggctgcggtataaaaaatctatgcaccgtcagtcctccttacgcatctgcataacaacccagccgcctttggcatcaacagcttcgacacacaaaccgactttggaggcagctgctgatacatcattctgccgttcttcaataataccgctggcaaggaatattcctccggattttaacttaccgggaatatcctgcagaagcataataataatatcggcaatgatattagcaatgataatatcagccttaccttctgtaccatgcagcaaatcaccctgttgcacactgattttttctgttagttcattgccggcaatattttcaatagctactcgtaccgcagtagcatcaatatccaccgctttaactgttttagcaccaagtttagcagcagcaatagccagaattccagagccagtaccaacatcaaatacttccatatcagtacgcagaactttttccaaacgttccatacacatacaggtcgtatgatgtgttcctgtaccaaacgccatccctggatcgatttcaataatatgttcaccagctttagatgtatatttttcccaggtaggcttaatcaccaatgttctgccaatatgcgtaacatggaaatactgtttccattcgttagcccaatcctgctcggaaacagtacgaaaacgcgtattaccaaagcgacatttaccaatacgcgtttccaaatttgttaagtcctcatcaatctgtgtaagacgtggctgcagctcttcatcctccggataataagcagttatcgtaaccacttctgtgttttcctgctcaggaatatcgcataattcccaagtgcctgaattacgcaaagtgtttatcaaaaccgggtcctcaataacaacaccattgtttgcacctgcagcacgcataatttcggcaaccagatcagctgcctcatgtgtagtttgtatgcttacctctatccattgtgacaaagcgatcactccttaaataactatcatatatattaaacacaaagcttattctaaaatattttaccatatgaaagtgtttttctaccagtttgagaagatatttcaatgccaagtgctcacattatatcatattttttggcataaaaaaataaactgcggtgttcaaaccgcagtttatacaagtcattatttaaataaatctttaatcttattcaaaaagcctttttcttcaggattaatgttatctttactgatctcggcaaatttacgcaaagcatctttctgtttttcattcagcttctgcggcacaacaactttgatcctgactaactggtcgccacgtgtactgttacgcaaactgggaatgcctttgcccttcaaacgcagtacctttccaggctgagttccttcaggaaccttcatcacaacctgtccatccagcgtaggaaccttaatctcatcacccaaagttgcctgtacaatattgatcggcacttcgcagtaaacagtagtaccatcgcgctcaaaaaacttatgcggtttaacatacaaatatacatacaaatcaccgcttggtccgcctttaacccctgcttcgccttctccggctacccgcaggcgggaaccgttgtcaacacctgcagggatcttgactttaagttttttattctttttaacagtgccctgtccgcgacattccttacatggttcgctgatgatcttgccttcaccatgacatttaggacatggccgtacattggtcatctgtccgaacatagtgttttgagtaaaacggatctcgccacttccgtgacattcagggcaagtttcaactttagaaccaggttccgcaccattcccatgacaatgcggacattgttcgtcacgatataaactgatctcacgttctaaaccaaacgcagcttcttcaaaagtgatttccaggtcaaagcgtaaatcagcaccgcgctgaggaccggcattagaaccacgcgagccgcggccctgcccgccgaagaacatatcaaaaatatcttccatgcctccgccgccaaaaccgccgaaaccttcaaagcccccaaatccaccagcaccgccggcaccgccgttttcaaaagcagcatgtccaaactggtcatattgggcacgtttctgctcatcgctgagtacactgtaagcctcggacgcttctttaaatttctcagccgcttccggattatctttattcacatcaggatgatactgacgtgccagtttgcggtatgcttttttaatttcatctgctgtagcggttttagacacgcctagcacgtcataataatcttttttactcaaagtttacaccatcctaagccgattattttttgtcttcgtcaaccacttcggcgtcaacaacatcgtcatcagctttttttgcgccctcggctgtttcagtaccttcagcacctttagcagcttcagtttgtttgtacagctctgcggaaagttcataaagaggtttggtcaaagcttcagtatctgctttgattttttccatatcttcgcctttcagagtctcttttaaagtatcaagcgctgcctgtacttttccaatcaattcttcagagcctttgccttccatatctttaatggtcttttcggcttgatagcacagggagtcagcattattacgtacttcaacgccttctttacgttttttatcagcttcagcattagcctctgcttcttttaccagacggtcgatttcgtctttttccaaagtacctgaagacgtaatagtgattttttgttctttaccggtaccaagatccttagcgcttacatttacgataccattagcatcgatatcgaaagcaacttcgatcttcggtactccacgaggagcagccgggattccggaaagctcaaaacgtcccagagttttattatcggcagccatttcacgttcaccctgcagtacatggatatcaactgaaggctgattatcagcagcagtagagaagacctgcttacgggaagtcgggatggtagtattacgttcaatgatttttgtgaacacaccgcccaaagtttctatacccaaagacaacggagttacgtcaagtaaaagcacgtcttttacttcacctgccaaaacgccggcctgaatggcagcaccaacggcaacacattcgtcagggtttacaccacggtaaggctctttaccgataaattttttcaaagcttcctgtacagcaggaatacgggaagaaccgcctaccaagataactttattgatatcagaagcagacaggccggcgtcagccatagccttgcgggtcggctccattgtgcgttcaacgagatcagcagtcaattcgtcaaattttgcacgagtcagatccatatccaaatgcttcggaccttcagcaccggcagtaataaacggcaggttgatattagtagtcaaaacaccggataattcgatttttgctttttcagcggcttcacgcaaacgctgcatagccatacggtcattactcagatcaatgccttcatttttcttaaattcagcaaccatccagtcaacgattttctggtcaaaatcatcgccgcctaaatgagtatcaccgttagtagcttttacttcaaaaacaccgtcacctacatcaaggatagatacgtcgaaagtaccgccgccaaggtcataaaccataacggtatggtcgtcgcttttatcaataccatacgccaaagatgcagcagtaggctcgttgatgatacggagaacttccaagcctgcgatacggccggcatctttagttgcctgacgttgactgtcagagaagtaagcaggaacagtaataactgcctgagttactttttcacctaaatatttttcagcatcttctttcaacttttgcagaatcatcgcggaaatttcttccggagaatattttttatcgtcgattgctactttatagtcagtacccatatgacgtttaatagaactaatagttctgtcagtgttggatactgcctgacgttttgccagctgaccaactaaacgttcgccgtttttggaaaaaccaactacggacggagttaaacggctgccttcctgattagtgataacggtaggttcgccgccttccattactgctactacagagttagtagtacctaagtcaataccaattactttagacatgatttattcctcctcgggtttatatgttaattttaatttatatggcaactattcgttgctgataactttaactttgctgtgccggataactttatcacgtaatttatagcccttttccagaaccatctctacagtgtcatcatccatatcgggattttgccccctcatcacagcctcatgcatctcaggatcgaatttttcgccctgtgcttttatttcttctacgcccaaatctttaaaagtctgctcgaactgacgcctaatcatttcaatacctgaataaattccggcggcatcatcagattttctggcggcgtcttcagcacgttcaaaattatccaacacctttaaaaattttccgacaacatcagcggtaacaaaagttgccagctgttcacgttcggacgtattgcgtcggcggaaattatcaaaatctgcctgcagccttaaaatacggttctgcagttcttcgatcttaacatccttttcatcctgttcaggagttttttcttcagcagctccctcactctttttcccggcagtctcatcgactccattagcagcatcggctgtattcgtttgagcttcctgctgaggtgtttcttcggcagttgtttgctttgagctttccttcaaatcttctgtttgcaaaacacttcctccttatagtctttttacttatctaaaattgttttcagatatttatgcaggtaatccattacagaaatgaccttaccgtattccatacgggttggacctaatactgccatcgtacctacgatctgaccattcagacgataagtagcctgaaccatactgcaatcctgaataccggtaaatttattttcagaacctatcgttaccttaaggcctgaatcttcaccaccctgcaaaagatccttcaggaccttttcttcttctaatataccaagcaggtttctgactctttccacatcacggaattccggttgattaagcagttgctttgttccgcctaaaaataccttctgttcctgcctgcgccctgtcattttacgtacagcctgcagtaatgatgaaaaaatgagtttatcctcgaccacatctgtatggacattctgcaaaatctccacagaaatatcgctaagattgcgatcttccagcaatttgctcattttaccagccagataatccatctcttcagaagacatacctaaaggaatatcaacaacattcgtatctatactgccatcatcggcaacgatacataaaatagcatgctgactgtcaagcggcaaaaattttaaataacagaaatttgcaatcgtctgctggttagtcaaaaccatggaaacattctgtgtcatacgtgacaagatcttggctgtcgactggaaaatatcatcaatgttacgacgacgttcattataccagccatctattaatgccatatcattatctgtcaatgtccccggttcaatcagggcatctacataaaaacgataagcctgagcagatggaatacgtcccgctgaagtatgcggctgttccaaataacccagaagctcaaggtctgacatctcattacggatcgttgccgggctgagccctaagtcatacttgcgggcaatagtacgtgaaccaaccggctcagctgatgaaatgtagtcttctatgataatttgcaggatctttttctttctttcgtttaacacgatcccacctccaactcgattgttagcactcatctcattagagtgctaacatcttggtattagaatagcactgaccttaacagttgtcaaccaatttttcttacttcacaaagatttcaaaaatttcattgctaaagcgcatcccttgctccgtcagcctcatccgcctatgctcaatatcatagaatactaaatttcctctaataaatttttctaattcaaccccaaattctaacattacatcacagccaaaacgttgttcagtttctattaaatctatccctaccgtcgtccgtaaacccataaataaatattctgacagctgcatttcttttgtcagatcttcaaagcctccacaacttttgccactttgaatactttcaatataatcagttacagaatctgttgctgtaaaacgttgactgccattaaagctgcaggcggaactgccaaaagacaaatacggcagataatgccagtaaacaaggttatgccttgactcctgacctgacactgcataatttgaaatctcatatctatgcagtccctgtgcttccagatactcctgtaccaattcatacattgccagctgacaatcttcgtccggcaactcaacttttcctttgtccagcatacctgccaaaggcgtatttttttcaatcgtcaaaccatataccgacaaatgctgcaaccctgccgctgttaaattctgcagactggtcttcagcgtttgaagggactgctccggcaagccataaataaggtcagcactgactcgtgtaaaaccagccttctctgccattgtaatagcgtctaaagcctcgttggccgtatgtatcctgccaacagcccgaagttcggcatcgttaagactttgaacaccaaagcttatacgatcaaatcccaaatctttaaaaaaacgcagcttatccaaatcggcagtaccgggattaacttcaatcgttgcctctgccggttgcagccagcatccatttttttgcaaagcttctaccagtttcgccaaaagcttttccgaaagcaacgagggagtcccgccgccaaaatacagcgtggcctgatctgcaatagtcacttcattgctgcgcatcattatttcactgcagacagcatcaacatacttttccatagtttctgtgtcagcacctgcatatgaagcaaagtcacaatataaacatttttgcaagcaaaaaggggtatgtatatataccccctggatttgttcccatttttgcattttaatccatcttcaaaatcgccataaaagcttcttgcggcagctctacactgccgacctgcttcatgcgtttcttaccttctttttgtttttccaacaatttgcgcttgcggctgatatcaccgccataacacttagccaatacgtctttgcgcatcgctcttacattttcgcgggcaataactttattacctatggcagcctgtacaggtatctcaaacatctgacgcggaataagactgcgcagtttttctaccagctgacgtcccctggaaacagctttttcacggtgtactatagctgacagggcatccaccggttctccattcagcaaaatatctacctttaccaagctggaagcacgataaccggccagctcatagtccaaagaagcataacctctggttactgacttcaaccgatcaaaataatcataaattatctcactaagcggaagtgcatagtgaatcataacacgtgtttcatctaaataggtcatattttcatactcaccgcgtttttcctgagaaagctccattactgcaccaacatagtctttaggtacaataattgtagcgttaacgtaaggttcttctacatggtcgatcactgttggatcagggaaattagacggattatcaaccaattccacatcaccattggtgcgaaatacctggtaaataacgtttggagccgttgtaatcagcgttagattatattcacgctccagacgttccttgataacatccatatgcagcagacctaaaaaaccacagcgaaaaccaaatccaagcgctactgatgtttccggttcaaaaaccagtgaggcatcgttgagctgtagtttttcaagcgcatcccgtaaattatcataatctgagttttctaccggatacagaccacagaaaaccatcggcgtagctttacgataaccaggcagtgcttcggctgccggattattggcatcagtaactgtatccccgacacgtgcgtctttaacatttttgattgctgcagcaaaaaatccaacctgcccaacctccaatgaatcaacattaacaagattaggtttaaaaacaccaacctctgttacttcaaattcagcattggtagccatcattttaattttcataccaggttttatacgtccgtcaataacacgcacatataaaacgacacccttatacgcatcaaatttagaatcaaataccaaagcttttaaagggctgtcacttataccggaaggtgccggtactttagcaacaatagcttcaagtacatcttcaatacccaaacctgtcttcgcactcgtcaaaacggcctctgatgcatcgatcccgataacctcttctatctcatgcttgactcggtcaggatcagcactgggaagatcgactttattaataaccgggataatttccaaatcattatctaaagccaaatagacattagccaaagtctgagcttcaatcccctgcgtagcatcaataacaagcaaagcaccttcgcatgcagctaaagctctcgatacctcatatgtaaaatcaacatgccctggagtatcaatgaaattaagcatgtactcttcgccattcttagccttatagctgctgcgcacggcctgcgctttgattgtaataccgcgttcacgttcaaggtccattgaatcgaggatctgtgcttccatctcgcgtttagttaaagtaccggtatattctatcaatctgtctgccaaagtagatttaccgtgatcgatatgggcaattatagaaaaattacggatcttattctggtccatcatattctccttcatatataatcttgctaaagcggaacatccgccgtaaattcactgcaaaatattatatcatttttgccggtaattaagcaaatactaactcttattagtaaagcacttataaataaaagctgctgtaacaaaaaatatttatgttaaagattatgaaagtatatataatggtatttttagtcacttcacaaataatttacagcaaatcaaagcatcaacctgttacaatataagtaataataaaagaattattacaagaaaggaagttatattatggataccttaaccgctattgcaacccgccgctctaccagagtctacaaaccagaacaaataagcgattcccagctgcaaacagttttagccgccggctgggcttctcctgttggtcatggagcatatgacgaactatatatttctgttgtgcaaaatcccaaaattctcgaaaactttgcagaatactgcggtcaagctttcggaaaccccaaatacaatccgttttacggcgcccctactttaatcgtcatttcagctaagcctaaagatgacggccagatggtttacatagctgatgttggctgtattcttgaaaatatgcaattggctgctactgatatcggccttggttcagtttatctttgggctcttttaaatcgtattccgcaaagtcctcaatttgtagccagccttgaactgccggaaggcttcaaacctgtttcagctttggccttgggttatccggccaaaccgcttgaaaaacgttcttttgccgacattaaacccgagcgtatcgctaccaaaattatcaaataaagtcttttgtggaataatttgcagaaatcccttgcagaattaactccttcgtggtagaatactttagtaaacgtatttaattgtaggaggtgaattcgttgccgaacattaaatcttccattcgtagtgtaaaaaccgacgcagaacgtcgtgcaaaaaatgctccgatcaaggctgctatccgcaatgcagctcgtaaagtagttgctgtaaccgagaccggctctccagaagaagcaaaagcaacttttgcaactgcaaccggtttgattgataaagcttctcgtaaaggtattatccataagaatgctgcaaaccgcaaaaaatcaagacttgctaaaaaagtcaatgctatggactaatctctacagcgattaaagcctgctcttttgagcaggctttttattttctccaaaacacgctttatctcatcttaattaaagcttttgttattttatttttgctttagtttatatatttcattcatatcttaaaagtgctataatattataaatacaccctaacagacaggaatgatacatatggctgactatagcactgataatttaaaacaatctcaacaattcttacaggcatatgataagttatattcttttaaaaatactttttatgatcttcttgccagtttagaaaaaacacttggcctcacagaatatttatctcatatttctgtgattcaactgcgcaacgaaaaacattttcaggctgctttccactatccaaatgaagccctttcccaacagcagtctttgttaagccataaagctcaccttatcgcaaaaaagttaaagctcaagagtgaaatcaactgcaaagatttcagtcacatattaacagaatgcggttacaacgataatataagaccaaccacagtttatccgctgcgatttgacgattatctctatggttttgcagctttagaattaaacgaaaaagcaatcaattttcagcaattcagcactgacagtttaactgctgttgtaaatatattatgcgcatattttgtaaaaaagcatgcctttgaacaaactgcattacagcagaaagtctatacttcaattatcaatggcatgaataacctcatctacgtaactgatatccacactaataaaattctcttcatgaaccaaacgatgaaagaccgttttgccttaaaagcacctgaaggtaaaatatgctggcaggtattgcagcagaatatgtcccaacgctgtaacttctgccctgtttccaaattactgcgtgatccgtcttctaataagactattcactgggaagaagtcaattctaaaaccggacgtatttacgaaaaccatgacagccttattaattggtttgacggctcaatcgtacatctgcagcaatctatagatataacagattccaaaaaagctttccatgatgcctgttttgatgaactgaccaatacactgaccagacgtgcaggcaaagagcttctggaaaaattgattaaagcagctcatcagaattgccatggttttataacctgtatgtttgatataaactcactcaaacaggtcaatgacaattatggacacagtgaaggcgataagcttattatcactatatgccagactttaaaaaaacacctgggcagcggcgatatatttttccggctcagcggcgatgaatttattgtcgtttttacagaacattcgctgcaaaatgttaaggaaatactgcaaaaagtcctaattgaactaaaaaattcagcacaaaaaaatgctctgccctatgaaccatctttcacctatgggcttttagaagttcagtctacaagcaattactctcttactgatattttaaaccgtgtcgatgaaaaaatgtatgagcagaaacgttcttaccatatacttaaacgccagcaggacgctggcctgcaaaagcagtctgacccgtctgaaaaaaacaatttttcttatcaggcagaatatctctacgatgctttagttaacagcaccgacgattatctctacgtctgtgacgtccaaagtgatgttttccattatcccaaaaccatggttgaagaatttgctctgcctggcgaatacatcaaaaatgctgccgccatctggggtgccaaggttcatccagatgatcaaagcgcttttttagcatccaaccaggaaattttagacggacgcgccaacattcactatgttgaatatcgtgctcaaaacaaagaaggtaaatggatttgggtgcgctgccgcggacagatgcaatataacgagcagggtgaagcaattctctttgccggttttatcaaaaagcttggcgaaaattataaacagcagctgccttaacgtaaaaaaagctcattccaaaaaggaatgagcttttaatattttatagatgagtgcgtgctatctgcctaaccaagaacgagtactttttttaacagcttccttatcaacttccacatgatttggagcgtacatcagcaaattttcgctgaccttagaaacagttgcgccaataatgtaacttacaccgttcaaatagtcaaaaatacggtttttcattgcagaatcaacagcatcgaaagataccatcagtgtcgcaccgctcattaaagaatcagcatactcgcgtacgtcgctgaattgacgcggagagcgcaccaaaatatccatatgaccgcctttaactaagtacggaccgctataaacttgatcttcttctacatcgctatgccaaagcttacgtgcagcattttttaaatccatcttttacgcctccaaacgtccttgttgtcagatatgctaactgcctacttctacataaattctcaaaatccttctttttttagaaaaatttttatttttgtattattatgctttgttacgggaacgctgacgaccacgctcaacacgatcaagaatctttttacgcatccgaatattcttcggagtaacttcaaccagttcatcatcgttgatatgctccaaagcctgctctaaagagaaagtcttaggcggaatcagacgaatagtatcatcgctgccgctggcacgcatattgctgacatgtttctttttacagggattgacatccatatcatcatcacggctgttttcaccaatgatctgcccttcatagacctgttcgccaggaatgatgaacatattcccgcgttcctgcgcgttgcctataccgtaggatgtagtttcgccgttttcaaaagcaaccaggctgcctcttgtacgtccggggatctcacctttataatcagcataacctgcgaacacatgattcataacaccgttacctttagtatctgtcaggaactggttacggaaaccaataagtccgcgggcggggatcacaaattccatacgcaggtagccggccatctctgtcatgttagtcagttcagccttacgcagtcccagcccttccataacagctcccataaattcctgcggaacgtcaattgttaaagcttccataggctcctgtaaagtaccggtttcatcatgatgcatgattactttaggtttgccgacctgcagctcataaccttcacggcgcatagtttcgatcaatacagacaaatgcagctcaccacgtccggaaacaataaatgcatctggactttcggtttcttctaaacgcatcgaaacattagttttgatttctttaaacaaacggtcacgaagatgacgactggtaacatattcaccttcacgacctgcaaaaggactgttattaacagagaataccatcgacagcgtaggctcatcaatactgatgccttttaatttttcaggactttctgcatcagcgatagtatcgccgatattggcatctgccaaaccgatcaaagcaacgatgtcgcctgctccaacttcctgcgtctcagcacgtttcaagccttcataggtatacagacggccgatcttcgctttacgctcgccctcttcatccatcaaagtaatagtttcaccgttatggatagtaccgcggatcacacgaccgacaacgatacgtcctacataatcatcataatccaaggtattgaccagcatttgcaaaggtgcgtctacttcaacatccggagcgggaatattttccaaaatcactttgaacaaagcttctaaattgtcgctttcttcttccatagttaatttagcaataccattacgggcagaagtcaatactaccgggaattccagttgatcatcatcagcaccaagctcaatgaaaaggtctaaaacttcatcaataacctcttcaacacgttggtcaggacggtcaattttattgataactacaattggtttcagatgctgttcaagcgctttgcgcaaaacatacttagtctgcggcataggcccttcataagcatcaaccagcaataatacgccatcgaccatagtaagcacgcgttcaacttcaccgccgaaatcagcatggccgggggtatcaagaatattgattttagtatctttgtgcataacagctgtatttttagctaaaatagtaataccgcgttcacgttccaaagcgttggaatccattacacgttcttcgacatgctcgttagcacggaaaataccgctttgtttgagcattgcgtctacgagggtagtcttgccatggtcaacgtgggcaataatggcaatattgcgtaaatcatttcttaacataaatcctatcttcctctcttttgagcagacggcataccgcctgtaaatccaaaccgagctatgccatatacaacaaaagcctgcggtcaaataaaactactctaaaattaatgaaggatgcttgtcaataagcatccttcactatgactaattaattatattctttttaacttactatgtcaacaaaaaccgctattttactataccggggagccatgtagctatctccgggaagaaacacagcagcaaaatttccagcgccataataatgccaaaaggaataacacctttgatgatctgtgtcattttactatctgggctgatgccctgcaaaacaaacagattcattccaaccggcggcgtgataagagccagctccagattgatcaacatcacaacattgaaccagatcggatcgaagcccaatttcatgataataggatacaaaatcggcaaagtgataaaaataatggagatagattccaaaatacatcccaaaaccaacagcagaatattaattgcgataaagactatccaccggctggtttccatttcggcaaccaggctcgtcaaagcctgcggaacctgcagaatagttaaaacgaaaccaaataaagttgcgccgatcataatcgcgaaaatcatcgaagtcgttttgactgtatccagcaaaatttccggcatatccttcagaccaagcgtacggtaaataacaaaagtaataaacaaactgtaaaccgtacctatagcagcagcttcagtaggagtaaacgctcccgtataaataccgccaacgacaagcaccggcagcagcagtccccaaaaagaacttcttagcgcctgaaaacgttcctcccagctggccgcttcctgcaaaggcagctttcttgagctgtaaacaaccacagcaataaacagcagtgtcaaaataacccccggtacaacgccggacataaacaactgacctaccgattcaccagtaatagcgccatacaaaatcattggtatcgatggcgggatcagaatgcctaaggtaccacctgctgcaacagctcctagaactaacgttctttcataaccacgagacagcatctcaggaatggcaatagcaccaatagtaacggcgcaggcaacagacgagcctgtaatcgcagcaaaaattgcacaggcaaaaactgtagctacacctaaccccccaggcaaatgacgcagccatttattgcccagctcaaataaatcgttgcctactttgcctgttaaaagaatctggctcattaaaatatataacgggacagccgttaacacgaaatcatccaaagatttgtaagccaaaatcggtatctgggccaaagaagatcctccgcccataaaagcaaacataccgaaaagtcccgccgttcccagtgagaaggctaccggcagtcccaaaaccaaaagtcccagtaagataacggtaaaaataacaagcatcttattccgcctccttactgaattcaccgctgctgattttttgaatatctataagcagggtacgtacaaactgtagtagcaacagccccataccgatcggcagcgacatctgaggaatccacataggagttcgcagagtacttggtgaagtattatccatctcatatgaaagcaatgccatatccaaagactgcattacaaatacggcacagaaaaaaataccaacaatagttgtaaaaagttcgatataacaacgggtacgtgctgataaatggcttaaaacaatatcgacatggatgtgcttgccagcagcataagtaacggacatccctaaaaaacctgctactaaaacacaatatacagaaagttctattgaccattctgtcggcgcattgaacaaacctcgcatcacaacttcataaaagaccatcaacgccggcagcagcaatagaatgccggcaatgacgccaactgctttagtaatagcgttcaaaaatttttcatagacctcgagcgcgcttttcaagtctttttcctctcattcttttccaaaataaaaaccgctgccgcttatggcagcggtcaattaagaatttatctattgtttactgcatatttcgatcaattccttaccaagatccccagtatgtttaacaaaaatatcccaaactggtttagtagcagactgccatgccggcagctcagcctcaggaacaacgtaaacctgcatacctttttcttttaatttctctaaagcagccatatcctctgctttagcatttttacgcagttcgtcacgcacttcatttgcagcgtcggttactattttttgctgttccggagtcagtttttgaaaagatttttcattcatcgccagaataaactcaggataagcatgattagtaatagtcagatatttggtaacttcaaacattttacggtcatacatagctgtagttccagaagtttgtccatcaacaacaccgcgctgaatggccatataaacttcacctgatcccatagttacaggagaagcaccaagtgctttaatcgtttctgaaggcagctcaccataaccacgcagcttcagtcctgcaaaatcctcaggtttagtaatttcctttttgctgttagcgaactgcacaaagccataatcagcccagatcacaggacgcacacccttcttcttcaattcacctgctaatttatcacccaagcctccatcgatggcatgatcgactttttcataacttgggaacagaaacggtacgtcaaaaacttccattgccggaataacagttgaccacattgctgtggaattaagccccatatcaatgccaccagacataattgcgtcattcatacttttatcgttgaacagctgtccggaaggatagatgttcagtgtaatagtgccgttggatttttcagtaagctttttattaaaagcctccattccctgggccagcggatgtgccgttggcaaattgtgagccagtttcaaagtcaccttttcgctgccggcagattttttatctccgcccccaccgcagccggccgttactgccaatgccataatcatagcggcagccaaagtagttttaaacatttgggacattttcattactctcacctcataattttttatttatagagtttctccagcttcatataatcatcaagaccgatgaacctgttaaaatcagtaaaatgcatcattttatcttcataggccttagtcgtccccgtttgatgcagcactgtcattgcttctttaaaagcctgcgtaatgacgtataaggcactgcagggccagaacactattttaaatcctatattttccaaatcttttgcagtcaggttcggtgtcctgccgccttcgatcatattagctatcagtatggtatctggaaaagctttcgtaacagcttctaattctcttatatcctgcggcgcttctataaacaaagcttcagctccgttatctaaatacaatttgccgcgttcaacagcatcctccagtccattcacagccctcgcatcagttctggcaatcagtaaaaaatcctcgtcagttctggcatcagcagccgcccgcagttttttcgcatgctcagatgcatctatgacctgcttaccgaccatatgtccacaacgtttaggccatacctgatcttcaaaaagcactgcagctgctccggctttttcatattcctgcatcgtcctccgtacgcttaacgcatttccgtaaccagtatcaccatcggcaaataccggtaattctgtggcatccacaatacatttcacagcctgcaccatttcagtcatcgaaaggtaacctacatccggctgccctaatctggaggcagcgatactataacctcccataaccagtgcatcaaaccctacttctgccgcaatttttgccgtcaaagcatcataaacacccggcaaaaccaaaatctctgacctcagcagacgttcacgcaacattttacgctgcttgttcataaattcccctcccttgctgcccaacaaattcaacaaaaaagcccctaccggcatagccgataggggcgttaagtacgcggtaccaccctaaattatactctgaggcctttaacgcagccctgcgcttttccctacattcgccctcagaaaaagagttcctgggtgagaggacttatttccacgcttaccggctcgcatctaccgccggctttctgaaagccttccactgtccattcccagtcataacctgtaacctgatgatttgtcgaaacattgaaataagtataacaacaccttaacactatgtcaatatatttttaaaattattttatctttctgttttttcttgtacaaatgtattgtttttatactactttggcataatacaaaaaaatacagccgctttcaaaaagcggctgtattttttattgatcattctaaataaaaactaccatctcaatcaatgatccttctggccccataaaaacgttcatcccaataaggaccaaacgcttcaccttcaattacgccatttttagtaccggcataaatgaatttaccatctccgctgtaaataccgcagaaggtcgctcctgggccatcagtgctataaaataccagatctcccggaagcagatcatcttttccgattctcctgcctacgtcatattgctcatcaacagttcgcggcaacgcgataccactttcaccaaaaacatactgcacataaccggaaccatcaaatccttctgacggaaaactgccgcccattttaaaaggggttccaactaaaagatacgcattttcaataatatttccacgcaggctgctgtattcttcagcataagccaactgaggctgcattgtattccaaactgctccaaccggcaaggataacgctatacctaaagcagtacaaacagccaatcttctacacaaactaacataattcatatttttcaaaaactcctttactgaaaaccctacagcgatgacagcatgtcatccacatattttctgattttttccatctttttgcgtataccagctgctttatcaccgtcacgagcaacgatctgctcaattttagtacgatactgcaaataagaactctcaaactgccgcaaatactctctaagtgccgccacttccggaactgtcgtcacgatattcgaagtcgtaacattccattcagtaccatttatcgtgacactatccccatattgcgggatataagcagctgtacccaaacggcgctgcagctcgtcagcgaaattgctggcagcatcaaactcaccatgtgtaacgaaaaatgctttcggcggctgtttcatcttaccgtaccattcaagcagctgttccttgtccgcatgtgccgaaaaccctttcatattgtagattttggcatttaccttaatatcttcacccataatcttaacctgcttggaaccttctatcaaccgacgtcccattgttccctcagcctgatagccggcaataatgacagagcagttttcctgccagagattatgcttcaaatgatgcagtatacgtcctgcgtctgccataccactggcagaaacgataattttaggccctggcatctcattaatcatccgtgattcctgcgcagttgccgtgaaacgcagatttggaatcgctaaaagcctgttaccgtgcatttcatacaaagcccgcgcttcttcgtcatattcctgaggattagtaagcgtgatagcagtagctttgctcgccatcggactgtcgataatgattggtacctgagggatacgaccttcctgcagaagcttctggaaataataaagaagtacctgtgtacgtcctacagcaaaggcaggaataactacattaccacctttagccacagtgtcattaatgatctcagacagctccgcttctttgtcataggctttatgcacacgattgccataagtagattcggtgattataaagtctgctccggaaatttcttccggatcctcgataatcggctgattaggctgtccaatatctccggtaaaaacgagcttagttgttttgccatcttcattaacaaaaacttcaacaatcgccgaacctaaaatatgcccggcaaccttaaatttaacctgcacccccggaagaacctcaagcatttcaccaaactcgtgcgtatgaaaatgctgcaaagctttatacgcatcatcaacagtatacaaaggttctactacagatttacctgcacgcaaacctttccggttggcaaactctgcatcagattcctgaatatgagcactgtcaggcaacagaatcgtgcacagctctaaagtggttttcgtacaatgtacaggacccttatatccttgttttatcagctttggtatcaacccgctgtggtcgatatgagcatgggtcagcacaactgtgtcaagagcattaggcgcaaaaacaaaatccttttcattaaaagcagtaatcattttagaaccttgaaacataccgcagtccaacagcatttttttactgcctatttcaagtaaataacaagagcctgtaaccattcttgtggcacctaaaaaggtgattttcataacggtccctccctgcttaaattcttaattaatatattctgcattcaaaaaatattccctgcccattaacgaataagttcactgccttgtcacaaagcaccttcaattactgccgctgcaattactgcaattcccacatctgtcatttgtttcctgtccaaaatatgtcagcagatatttacgcaggcagcctctggtaaaacaatagctttctatatcacgcagcctttggtaagcatttgtcagccacagctttttgtcttccgcactgctttctctctgctcacagctatattccagcagctgccgctgctgcattatgtcacgccgttcaaaaagcagtacgcattttgccggcaagccgtcacgtccagcccttcctgcttcctgataatagccttctacatcaagcggcaaagtataatgcaagacaaaccttacatcaggtttatctatacccatcccaaacgcattagtcgccaccatcacctgcaattcatttttaatgaaagcgttctggttccgctgccgttcttccattgttaaaccagcatgataacgtcctgctggatagccccaggcattgaggtcattacatacttcttccgtctgcttctgcgttgcacaataaataataccgcagccgttttgctccggcagccagctacgcaaaaaacgtcttttcaccattggtttttccacaataaatgtaagattgcttctgtcaaaacctgtcaccagttctaacggctgctctaatcccaggcatttacttatctcacgtcttacaaccggcgtggcagtagctgtaaaagccgcaacaacaggagccttcggcaggccgtctaaaaacggctttattgccagataagccggtcggaaggattcaccccatcgtactacgcagtgtgcttcatcaacaacgaccaacgctatttgcagctcacttgcaaaagccttaaactgctcattctgcaggcgttcaggtgaaacgtacagcaatttacatttattattacgggcagcataaacggcggcaccgtactcctgcttactcatcccgctgctcaaataagccgcttctacaccatgttccgctaaactgcgtacctgatccttcatcaaggaaatcaacggtgaaacaaccagtgtcaagccctccagcatcaacgccggtaactgataacataagctttttccagctccggtcggcataacagctacaacaggacgtccgttcaaaatttgctctatcagctctgactgcccgcttctgaactcactgtaaccaaaatatttttgcaaaatcatttcttttgtctgcacggctgctccttaaacacaacaagcctgtgtgccagtcgcactacaggcttgtctgcaattttattttataaattcttttccttgtatggacacaattctaccaatacgcattcactgcataaaggtttccttgccttgcaaatcttacggccatgccagatcaaccaatgatgagcatcgctccacttattcttcggaatggctttctgcagctctttctccactgccagcggatcatcgcccttagctaaacccaaccggtgcgaaactctgaaaacatgggtatcaaccgcaatcgccggaaccttataaacaatactggcgacaacattagccgtttttttacccacacccggcagcttcatcagctcctcgacagtgtcaggaataacgctgttatattcttccgtcagcattttacaggttgccagcagatttttagccttcgatcggaacagtccacagtcacgaatctcttcttccagctgttcctgagaaagtgcgcccattttttcaggagtattatatttcgggaaaatacgtgctgtaatcttattgacacgttcgtccgtacattgcgctgacataattaccgctactaacaattcaaaaggcgtcgaatagttcagcgctgtttccgtacccatataagtttcttccagcagcgctaaaattgcctcacgttgttgtttacgcattagttggtcagactccttaccggtgcaggaatacgaccaccgcgggcaataaaggcatcggccttaaatttgctcacggcaatgatgggagcatatcccagcaaaccgccaaattctacctgttctccgacagttttacccggaaccggtatcagacgtacagcagtagttttattgttgatcattccaattgccgcttcatcagcaatgattgctgaaatagtttcagcagtcacatcacctggaatagctatcatatcaagccctacggaacaaacacaggtcatggcctctaatttctccaaagtcaggctgccgcgttcaacagccgcgatcattcccgcgtcttcactgacaggaataaaggcaccgctcaaaccgccgacataacttgaagccatcaatccaccctttttaacggcgtcattaagcatagctaaagtagcagtagtaccaggacagccacagctctccaagcctatttcttccagaatatgagcaacgctgtcgccgattgccggtgtcggagccagcgacaaatcaataataccaaactgcgtatccagacgacgggcggcttcctgtgcaaccaactggccgacacgagtaattttgaacgcagttttcttgatcgtttctgcgacagcgccaatgtcctgtccgcgcactgcctccaacgcatgttttaccacaccgggtccgctgacacctacatttatgacagtttcaggctctgtaacaccatggaaagcgccggccataaaaggattatcaggcactgcattacagaaaacaaccaattttgcacagccaatagcatcacggtctgcagtacgttctgctgccattttgattacacggcccatttccgcaactgcatccatattaatcccgcatttagtagaaccgacactgacagaggaacagacaatatcagttactgccaaagcttcgggaatagaacaaataagatttctatcacctttggtataacctttatcaaccaaggcagaaaaaccgccgataaaattaacgcctactgctttgcctgcctcatcaagcgctttagccagcggaacataatcattgctgtcgcagctttcaccaaccatcgaaacaggagttacagaaatacgtttattaatgattggaacaccgagctccatttccagttcctcgccgacctgaacaagcttttcagctttcctggtgatcttatcatataccttctgtgccgttacttttatatcaggatgaccgcagtcgcgcaaactgattcccatagtgatcgtacgcacatccaggttgttctgcgtgatcatctggttagtttccaagatatctttaatcgtgaacatagacagcctcctagatacggtgcatcgccgtaaatatttcttcgctttgtactctgatctcaacgccgatatctctgcctaaagcagtaaagatatccttaagatcctgtaattttacagcagcacccgtcatatcagcaatcaaaaccatattgaagaaaccctccataatattttgattgatattgaggatatttacgccatgctcagcgagaatattacttactttagcaataatgccgaccttgtctttgccaacgatagttaatacgatacgcatactgttgtcatcctttcccataaaacaaataataactaccatgtctaacacggtagttattattgtaccatattttcagcaaagttgtgtgtatacattgcaaattataattcaaaaaaatccttacattgtaattttacagcgccgtcaccggttcttactttttttagtctcctgcatcgctttgatcataggtttgatcccgccgctctgcagaatgttcataatataaggcgacatcggaacagctgcagctgttgctcccgtagtcaggtttttgattattccagcctcaatatcaacctctacttcatcaccctctgcaataattttcgtgatctcgctgcaggtaataacaggtacgcctaaattaatagcattacggaaaaatatcctgccaaaagattctgccagtacagctccagcaccaactgctttcaatgttattgccgcatgctcacgcgatgaaccgcagccaaaattagttccggccacaatgatatctcccggatcgaagttttttacaaagctctcatcagcgccgtacatcgcatatttttttatatcttctacatccgtatattctacaaaacgacccggataaatctgatctgtatcaatatttttcccaaaaacaaatgctttgcccctgactttcgttttcattaccatcaccgtccattcccgcagtcgccggttttcaaatatacagccggatcagtaattttcccctctaatgccgaagctgccacagcagcaggagaggccagaaatatcctgccatctacatgtcccattctcccggggaaattacggttagtagaacttatgcaaacctctcctcctgcaagcatcccctggtgtactcccaaacaggcggcacagcccggagccgttatcgcggctcctgcctgcatcaaagttttgatatacccaagctccattgcatcttccattacctttttagaagcaggcacgactatcatcctcgttgttttaggaatatgcctgccttgtaagatctgtgctgctacagccagatcctgcagacgaccgccagtacacgaacccaaataagcttcgtcaacaggagtgccggcatatttttccaattcaaaaacattatcaacacttgatggtgccgctacctgagcccttattttacttacgtcatacgtaagctccgcagcatattgaaaatcagtatctgtttcataaattttataaggtcttgccacacagttgtgcaaatattccatagtgacagcatcaggctggatatagctggttttacaacccatctccgttgacatattacacatacacattctttcggaaatactcaacccatttacaacaggtcctgcaaattctaccgctttataaacaccgtaatctgcacccagatcacctatgatatgcagaatgatatccttggcaaaaacacccggctgcagcttaccaaccagattgatcctgaaaatctccggtaccatgaaccacagcttgccagtaatcataatcgtcgccagatcagtagcgccaacaccggtcccaaaagcgccaaaagctccgtgagtcgtcgtatgcgaatcagtgacaactactatctctccaggatgtacccaacctttatcggccaaaacctgatggcagacaccctgatctatatccatcaatttttcgataccctgttcaaaacagaactttctgaactgtttatgattttcagcctgtgttatcgtagcacagggagcataatgatcaaaaaacatcacgatcttatcagcgtcaaaaaccttttcaccgcccatttcataaaaggaacgtacagtctgcaaatataaatcgttgattcctgcaatatccacgtcgcaattaactatctcgcctgttgcgacctgatgtttaccagctttttctgccaataatttttcaatagcatgcataagctacacttctttcttttcttttattagcaccgcaacaaattcaagccggatatttggctaaaaattgcagcatcgcctctaaaactacctccggctgttcttccggtacaaaatgcccgcactcatttacagcaaacccttctacattagccgccctttcctgccagccgctcataacatcccacagcttaccgacaacaccgtccttaccccacaaagccaaaacaggaacctgaatgatctgttcacgatctgctttatccatctccatatctatagtagcactggcacggtaatcttcgcaaataccatggaaagtcatcggatcgcgcagacagcgtacatattcgtctaaaatctccttagggaacctgcttttagcggccggcccgatcttcaaattcaaattataattaacaaaatactcaggatctgccgccagcactctttcagggaaccctttgccctgaatataaaagaaccagtgccaatatttagtcgcaaactcctgactggtatcacggtacatatcataagtcggcaaaatatccatcatcgtacaagacagcagccgttccggatgatccatcaccatcctgtgcagtactcttgccccgcgatcatgaccgacaccatggaatttttcaaaacccagcttgctcataactgtaaactgatcgtctcccatagcccgcttggaataattagcatgatccggaagtccttcaggcttgctgctgtcgccatatccacgcagatctgtaataactaccgtataacgcccggttagacccggcgtcaaaaaccgccagatcaaatgtgtctctggatgcccgtgcagcagtaaaatagcttcactgcccttgccgccaactaaagtgttgatcttaataccgtcacctacatcgataagttgctgtttgaattccggaaaatacttttggtcaatattcatctgccccacctccgtaaattttcacaccacatttagcattctatttctctgctttcattatccgctacgataacaataaagtaaaatacaaattttaaatataaatatagtttttaactattaaacaatgctataataaaacgagttataagctacaataaggagtactaactatgacactgacacagatgcgttatttttatgaagtctgtaaatggcgcagtatcactaaagctgccgccagtctgcatatctctcagccaactgtttccatcgccatggccgatctggaaaaagaaagcgggctgaacctttttcggcgcgaaggcaaaaaactttcgcttacagaagacggcagcctgctgttaagtaaaatcactcctattttggctaacctacagcagcttgaccgcgatatcaaagatatggcacagaataaaaacctcatccgcctggcagtacctttacaaatcggcgtacagctgctgccaactcttttccgcgatttcaaaaatctgtaccctgaaatagagctggaagtagtagaagcaggcggcatagattcactgcgtatgatagaaaatgaagaacttgatttagccgtcaccaattatgacgacagcttttcacccaatctgcattaccgtaagctttttaaaagcgaagcctgcttctgcacctatcctgaccatccgctggcgcagaaaaaatatgtcgataccaaagatattgccaacgaacctctggtactgcttaacggtggttttttcgtcaatcgcctcatctatcaaaattttcagcaggctttaacagcgcctaaggtaattctgcattcatcgcagcttcatacggtcaaaaacctcatttccagccaaatagcctcctcttttctaatgcgtcaagccattacggcctctgacaatatcattccactttcacttaaaaagccgctttttataaattccggcatcgtcaccaaacgcggccggcaaatctacggcgacgaacaaaaactcattgaatttatctgcgataatcagccgttaggctaaatttttctcttctctgtaaaatccaccatagtagtaataatatcaagtatcatatggttaaagtaagtgtgcacatatacttgatatcaaaaaagaaaagaggaataaaaatgtatattgattatcaaattttatctgtagtagaagacatgtcagctaatccccaaagtaaattcgacggaatgaattgcaccccaatcgctcttggccggtatgatgattccagtaaaatcttatgtctttctgctacgcaaactaacttcccccatttatccaacgacaaaaaatacaacattattgccagaaacaaagaaaatcaaaagactgaaagtttctccggaacatataataacgactggagcttcagcatcttccagtataacggtaccgcagtataaaaaacgctcaaagaagcaggcatgagataacttttatctcatgcctgcttctcattatttctaaaaacatcttttgtttttttatgaatttaaacttgtccgcagctgtaccgcctctgccagatgggcggccgttatgatatcactgccgtccagatcggctatcgtacgcgctactttaatgatccgatcgtggctgcgggcgctgagccccaacgccgtaaaaaacttcgccagcagcttttctgcagcagcttccatctggcagtgcttgttcagctcacgcctccccatctgcgcattgcagtacaaattagtaccctgtaaacgcagcaactgcagctgacgcgctttgatcaccctttcacgaatcacggccgagctttcaccggcttccctgctttgcagatcagcgtattccagccgcggcacatacacctgtaaatcaatacggtctaataaaggccccgacagtttacggtgataacgctcgatctcaaactgcttacacgaacattcccgctttttatcacccagatagccacagggacacgggttctgcgctgtgcacataataaaattagcaggaaaagtaagcgatgcctgtacgcggctgatcgtcacataaccatcttccagcggctgacgcagcacctccaaagcagtacgcgaaaattcaggaaactcatctaaaaataaaacaccatgatggctcaatgtcacttctccaggccgcggcacactgccgccacctataagcgcgcttgaagaaatcgtatgatgcggactgcgaaatggacgttccagcatcacccgttcctgccgctgcagcaaacctgcaatactgtagatttttgttacctccagcgcctcagcctctgtcagcggcggtaaaatagttggcagccgacgtgccagcatagttttaccgctgccgggagatcctaccatcaaaatattatgtccacctgccgctgcaatttccagtgctctttttactacctgctgcccgcgcacttccgcaaaatccacatcatagacactggttgctgccgcgcagatagcttccttatccagtacatccagaaccttttcaccccgcagatgctctaccaattcaagcagcgatgcaggtatcagcacatcaataccgtcaacaagccgtccttcagcgcagttgcctgcagggatcacaatgtttttcctgccaatgtcacgtgcatgcagaatcattggcaatacgcctgcaatctgcctgattgtcccatccagtgccagttcgcccacaaaaatagtatcatcaacctgctcctgctgtaaaacaccgctgctgactaaaataccaacagcaataggaagatcaagaccggaaccatcctttttcaaatcagccggagccagatttacagtaatcctggtcatcggaaagatcaggcccgaatttttcagtgcagcccgtacccgttcccgagattctttgactgacgtatcaggcaaccccacaatatcaaagctcggcagcccgttagaaatatccacttcgacaatgatctgttcaccattgataccgcaggttgtttctccataaactttagcgtacataaaaacgcctcctcttattttaaaaacagtgcggtaaatggtgtaatcttgccacattgccctcaactaaaatttcgatcacatcaaaactgagcatttgctgatgcctgttttcctgctgcaaataaaaaagcgccgcactcctgattttctgctgcttggcgtatgtaaccgccagacggggcagcccaaaattcaggttgcggcgtgtttttacttctacaaaactaagctcgccgcctttagcggcaataatatcgatctcgccataacggcagcggtaattacgacggcagataacgtaacctttacgttctaaataagcgcaggcagcgtcctcaccttttttccccagcctttgccgcgcttccgtcacttctctgacaccggcgaaaacagcctgttaccttcctgttcagcaggagacagatgcatacttttaatgggctcataactgcggcgatgccacttagtcgctccaaactcagcaattgcctgcatatgctccctgctgccataacccttgttaccggcaaaaccatactgaggatattgttcagccagttctatcatcatccggtcacgagtgaccttggcaataatagaagcagcagctatcgaagcactcagcgcgtcaccgtgaatcaaggaaactgtttcaatgccggccgatacgatcggcattgcatctaccagcgccacctgcggcttaatcgcaagatgttccagaacctcagtcattccctgcttcgtagcctgataaatattcagctcgtcgatattgctgatactgactacatttacagaaacagacagtgctttggcaagtacttcgtcataaagctgctcgcgctttactgccgaaagctgcttggaatcattaagtccgctgataaatacctcctgcggtaaaataacagccgctatcaccaacggccctgccaaaggtccccgtcctgcttcgtcgatcccggcaatatactgtgccccctgatcgtaatatttacgttcataggccagcatctccgtaaaacgctgctgctctaaacgcagcttttcctgccttttatgataagcggcaaccagcttctgcacaccgctgcgctcatcggcagcaagttctgccacctgatccgggtcaggctctcccgccaaaatctcctttacctcgctgatcttcattattcccacccctaattaaaaaggccgcgttgcagcggccttaattattttcactcggttcatctaaagtaaaacgccctaagcgtcctgtacgaaaatcacgcaataccagctggataaccttatcaatgtcaagcacaccgccggccttcaggcagccgcgcgcgacggctattttagccattacctcacgcacaggctcagcttctgaaaaatcaatagcgtactttacacgcagatcctccggatagatatgcatcaaacgttcaagcaacagctctactgctgtttccctgtcataaacatcctctttgatcgctcccgttactgccagacaaaagcctacttccggatcttcaaatttcggccacaaaacacctggggtatccaaaagctccagacctttggcgatagtcacccattgctgacctcgagtcacaccaggtctgtccgctgccacaactttatttttaccgaccaaacgattgatcaaagtagacttacctacattcggcacacccacgatcataacacggatcgaacgattgcgtacaccttttctcagccacttatccgtgacaggcctggccacctgctggatcgcagccaccatctgttttacgcccttaccggtgctgcaatctaccttacagacaggcaaaccgctgtttttaaaagtctgcagccatttttcagtcttttccggatcagccatatcgatcttattcaaagcaacgaccttgggtttatcccccagcatctggatcagcatcggattgctgctggaacgtgggatccgcgcatccagcatttcaaccacaacatcaaccagctttaactgctgttccatcatccgtttcgccttcgtcatatgaccgggaaaccattgtatcttaaaatccataattatctcctcgaccgcctatcaaggcagcatacgccatctttcaacaggccagaaagcaacaactgcttcgccttttacaagcttcagcggcacaaaatcaacatcggcaaaacggctgtcttcagaattattacggttatctcctaaaacgaagatatgcccctgaggcacaacagattttctgtaattagacttattcggacccttcggatcatccttgtaaatataattttcttcgatcacactgccgttgaccagaaccttaccgtcacgcatctcaatagtatcaccgccggtcgcgataacgcgtttgataaaatcgcggctttcatccttcggataacggaaaacaacgatctcaccctttttcggctcggtaaagaaatatttatacttgctgacgatcaggcgctcgtggctttccagcgtcggatacatcgacgtaccctcgaccatataaggctctaccacaaaagtacggatacaaaaagccagcgctacggctacaatgatcgaaaccagccagtcgctgatagtatcctgccaagatgttcctgattttttagtactcatatatactccctcttattccaacgcatcaactgaattggtgcggtctcttttatttttgcaaacgtactcacaacgttcgcaacaccgtttctacgttaacaaacattagtggatttgtcaatcgccaaaggcaaattgtcgaaaaaattttacattaatatagtgttttttcttgcccaaaacagtcgcttgcggtaaaatacataagtattagcttttccaaaatcatcattaaataggcaggatataacccgcctgtgtagaatattataatgttactattataacaaaattacaagtttccaagatgtaaggagagatcaccatggtcaaaatcgctgttatcggcagctgttccatcgacctcacagtagaagcaggcaaacggcctgcagccggcgaaacaataatcggcagcaggctcatagtttcaccaggaggcaaaggcgctaatcaggccgttgcctccgcacgtttaggagcccaggtacacatgataggctgcgtaggcgacgatgcttacggcaccatgatcatcaacaacctgaaaaccaacaacgtcgataccggttatgtcagcgtcctgcccggacagaacagcggtactgcccatatcacccttgccgaaggcgacaacagtattatcgtcatcaaaggcgccaatgatctggtcatgcccaaacatatcgatactgcctggaacgtcattgccgccgcagacctggtcatgctccagcacgaaataccgctgcccaccatcgattacatcatcggcaaatgtgcagcggcaggaatcagcgtacttttaaatccggctcccgtgcagcccgttccttctgaatggctggataaagtcacctatgtgacccccaatgaacacgaagccgaagccctttatcccggtaagaccagcgaagaaatcctgctgatgcaggaagaacgcttctttatgacacttggcaaagcaggcgttgcttatgctaaaaacggcaaagtacacactgttcccgcattcgtcgttaatgcccaggataccacaggcgcaggcgataccttcaacagtgcttttgccgtcgcaagatgcgaaggacgcagcctagacgacagtatacggtttgccaacgccgcagcggccctctccgttcagaagctgggcgcacaaggcggtatgccctatcttaaagatgtagaaaggatgcttggagaatgcaaaaaataggaatcctcaacagcgacatcgccaaagtcctggctgacttaggccatactgacactatcgttatcggcgactgcggccttccggttccggccggtgtccccaaaatcgatctggctctgaaaccaggtactccttcctttttagatgtccttacagaagtgctgaaatatatggaagtcgaaaaaatacatatcgcttccgaaatggaaagtaaaaatcctgctacatggcagaaaatgcaggagctttttgaaggtaaggaacagatccttagcgaccacgaagccttcaaagccgctgccaaaactgctaaagcagtgatccgcaccggcgagatcaccccctacgccaacattatcctgcacgcaggcgttattttctaaaatcgattttacagcaaaggagttttgcgactaatggaaatcaccatgaagggtatttcaaaagccttcggctccaacgaagtactcaaaggcgtcgacctgaccttaaaatcaggagagatccacgctctgatgggtgaaaacggcgccggtaaatccacccttatgaacatccttacgggtatccataaagccgacagcggcacgatctgcgtagacggacgggaaataagcttcaaaaacgcactcgaagccgaaaaatgcggcatcgctttcatccatcaggaacttaatatctggcccaatctctctattctcgaaaatctgtttttgatgcagaacgtaaccaacagtttcggaatgcttgacttcaaaaaaatgcgcaggctggccgaagaaaaatgcagtcaaatgggtattacactgccttttgacgcagaagcaggcgaatgcagcgttggtcagcagcaaatgacagaaatcatgcgtaacctgatgcttgatgccaaagtcgtcatcatggatgaacctacggccgccctgacagaacgtgaaacagaaaaactgtttgccgtaatgcacgcgcttaaaaacaaaggcgttgccatcgtctacatctcgcatcgaatggaagaagtattcgcccactgcgataccatcaccgtaatgcgcgacggctacgctatcagcagcaaacccacccgcgaaaccaatatggaacaggtagtccgcgacatggtcggccgttctattaccgaatattaccccggacgcacaaacgaacccggcgaaatagtcctggaagtcaaaaacttctgtcaagaaggactgttcaacaatatctccttcaaactgcgtaaaggcgagatcctcggcgtagcagggctgatgggagcaggcaggaccgagatcatgcgggccctgttcggcgtcgattcctgcaagcacggtgaagtttacctgcatgggaaaaaagtctgtatcaaaaaaccggaagacgccatcaaagcaggcatcggcttcatcaccgaaaaccgtaaaagtgagggcctgatcctcgacttctccatctccagaaatattgcgctgcccagtgtcgatacctttgctaaacgcagcgtgatcaacgccaaaaacgaaacagccttctccgaagcgctttctaaaaaactgggtgtcaaaaccgcatcgatcgacctggaagcaggcgcactatcaggcggcaaccagcaaaaggtcgtcattgccaaatggatcggtatgaatccatcaatcattattatggatgaaccgacacgcggtatcgatgtcggcgccaagcgcgacatctacgatctaatgaacgaactgacctctcagggcgtcgccatcatcatggtctcctccgaactgccggaagttatcggcatgagcgaccgcatcctcgttatccacgaaggtaagatcgccggagagctggaccacgaagaagcgacacaagaaaaaataatcacccttgccacaggaggacagtaaataatgaatattaaagaacgtatccgtaaaatgggcccctttattgcccttgtcgtaacctttatcgtcatagccgccttaaacgacagttttgtcgatcccaataacctgaaaaacctgctgcgtcaggtttccatcaacgcccttatttctttcggtatgacctttgtcatcctgacaggcggcatcgacctgtctgtcggcagcctgctggcactttcaagcgccctgatgggcagcctgatcgtcagcggcatgaatccgatgctggcgatccttgctgcctgcttcataggcatgggccttggcgctgtcaacggcttagtcattgcttacggcaaagtagcaccctttatcgctacgctcgccaccatgaccatttatcgcggtctgacactggtatataccaatggtaaccctatcagcggtctcagtgacgacactatgttccacgacttcggtcagggctttttcatgggattgccagtacctgcaatcatcatgctgctggcatttgccgtttcctggttcatccttaggaaaactcctttgggccgtaaaatctacgcagtcggcggcaacgaaaaagtttccttcatcgccggcatcaaaatagaacgtgtcaaaatctttgtttatgcaatcaccggtttcttctgcgctctggcaggcgcagtcctcacctcacgtctcaattcggcccagccgactgccggcaccggttatgaacttgacgccatcgccgccgtagttttaggcggaaccagtctttccggcggcaaaggttatatcacaggtacactggtcggcgtgcttatcatcggcacactcaacaacggcctcaatattctcgacgtatccagcttctatcaacaagttgtcaaaggtattgtaattttactggcggtacttatggaccgcaaaaaagcttaggaggcactcaccaatgaaaaaaatctggactcttttagtagctgccatcacagtactggcagtgctcacttccggctgcggcagcagtgacaaagctgcaaaacccgctgacggcaaaaaaacaactaccatcggcttctccatctccacactcaacaaccctttcttcgtatccgtacgtaaaggcgttgaagaagaagcaaaaaaactcggagtcaatgttaaaatcgtcgatgcgcaaaacgatcccgcaaaacaggccaatgatatttctgacctgatccagcaaaaagtagacgtactgctcatcaacccggtcgactccgcagcagtatcaacttctgtggcagctgccaacaaagccagcatccccgttctggcgctcgaccgcagcgccgataaaggcacagtagcctccttcatcgcttctgacaacgtcaaaggcggcgaaatggcagccgaatacatcatccaaaaacttggtgaaaaagtaaaagtagccgagctcgaaggcatccccggcgcctctgcgacccgcgaacgcggcgaaggcttccataaagtagccgaccaaaaacttacagttgttgccaaacaatctgctgattttgaccgcagcaaaggcctgactgtcgctgaaaatatgctgcaggccaaccctgatatccaggctattttcgctcaaaatgacgaaatggcactgggcgctatcgaagcagccaaaagtgctaacaaaaaaatctttatcgttggctttgacggcacccaagacggcctgaaagctgtagaagcaggcgctatggccgcaactattgctcaacagcccgaactgatgggacagcaggggctggatgctgctgtaaaagtagccaaaggcgaaaaagttgaagctaaaataggcgtaccgctcaaacttgtagacaaaaaataattactgccctttgacaatttggacaaacataaaaaccccggcgcaatgcgccggggttttgttttatcctgcacaggcttctgaaataaacacctgccttttagaagctgtacttcaaatcaaccaacctttatccattccccttagactcagtgtctgctcctatcagcagttcatcaatcgtacagccaagcagcttacgcaaactcaaaagcagacgtaaacttggcgacaggcgaccattttccacattacataaatgcgactgcgatacacctatctgttttgccaacttagactggctgatatcagcacgcagcctgcgaatcttgatttccatccccatttttctgtaatctattttttccatattcttcctccgctctcagcagctgtaagaagtattgtcagcatcaaattatttttctgctgccatactgcctgccaactactcaacttactgccttagaagctgtaacggaagcctacattgacgccccagtttttagttacgtcgccgctgatacgttccacatccagatacatactggagtctttgttgaatttgtggttgacgccgataccgtattcgatcgccgtgccgccaatgctgtcgctgtagccggcgcttctgccgtcagcgctgacatttgtgttgatgtcgccgtcgaagtcgtgcagtactgccgctttcagataaacgctgctgtctgccgcaaaggctttgcccagcaggaaaccgccgcgcagaacaatactgttcatgctgtcgttggtaacgctcatcctgccgtcacgagtggtaacggtataatcgtcgccgcccaaatgtacatagctggcgcgtaccatcggctcaaggaaccagtcgttttgcagttgttgacgatagccgtattccactgcgaagctcatggcattgctgctgaaatcgccgtccagtttttgggcgatcgtgccgccgtaaacagtgctttcgctgtctactttgccgactttggcaatgatgtctacatggtggcctttgtcacccgtccaggtgccgtacaaagctccggctgctgttttgatctcgccgtcgccgttagtcaaagtagtatcgcctttagcgtactgcccggccaggccgatacgccagttgctgccgatctcgtggtcgtaaccggctgcaaagccgttg

SEQ ID NO: 9997 - DNA, 8889 bp, Unknown
  gut microbiota DNA sequence
atgatatattgaacatgattatttaagcgtagacctattttttaggtttacgcttatttttttcttttgcttgccagaacacaaattcaagagcattttttaatttctgtttatcttcttcgtccaggtgatgtacttcaccatcaaacataacttcggtgttttcgagaaattttgcaaggtctttaggagttttagctgattctgttgcattatctcgaccaagtaaataatcagtggatacattaaaaaaattagctagtttcaataaagtttcgtgattagcttcacggcgtccttgttcatacattcctatagcacttggtgaaatatctgtcagtttccctaattgggactgagtaagttgttttttttcacgcaacattcgtaagcgcttcataagtttattcctccagcgtgtgtgattaaattaataatagcacacaatttgtgtgtaaaaaaccgaacacacaaaaagtgttgacactacacaaaacgtgtgttattatttagctacacaataagtgtagaaaagaggtgctatagcgtggaacatttgaaaaaatttagactatctttggggatatctggtttggatatggcagcaaagataggcgtttcattctccttatatgagaaaatcgaaagaggagagaggaatgccagcaatacctttttaaaaaaatttaagcgtacttttcctgattacgacttaaatcttttttttacccaagaagcacacgaaatgtgtagtgaagtgatttgaagtgatgaggtgattgtatgaatgaaaaaaaagaaaatatgaaaaatgccattgaagctattttaccgattgttagtaatttatctttgagtcaatgggaaaggctgtactccttgataaagatgtattacacaaataaagccgccaagactatgcttgacggcaatgatgtggaaaagctcaaaaaaatgttgcatgaagagcttttacgtttttagtggtcactggttaactatttgaataaatgtagggtttattcgatagtttgtgcctttgtaaacaatgtttatgtaatccagctgatatagagtgttctcttcatttcttttgaaaggtgcccaaatgtcagcattttcttcccaccatgttgatggggaagcaccatgaacaccaattttacaatctgaatcatcgtttaaacacacccagttaccaattaagcaagcatatattttaaccattgtttcacctccttccaaatattattttaacattttgaaggattagtaaagcaactaatttttaaaagatcgatttttgagagaaaacagcgtcaagctgaaattaaacggagaaaggagcaaggaagatggctaaatgcaattactgtggtagagaaagtgattctcacgaagttaaacaggttggtggttattacattttagagtgttgtacagactgtgaaactgaaattctatctgataaagatgctaaggaggcttaaacatgaagaagtatttgatcgcatttggcgctgttgtagttgtggctttgatgctggtcagtattgcagacgggcagaaacctttaacagatgttcaagaggttactgttacttgtgtcgtccggccaggagaaactttgtggaatatagcagaaggtttttatggacacggtattagtgtagaagattataacgcttttcagtacagaatatcgcaggataacaaagagctttttgctgatggtcgccagctacaggtaggggacaaagtgaaaattcgttactataccaaacggtgagtttatgagtttattctacagcagaagggagtggtaaatgtgctgaaagaactgcttcaagagtgccatatgacgcaagaaaccgtcgctgaacaggctgctatgcacagatcaacagtcgcacgtattatcaatgttccggaagcggcacatccgcagatgattatgcggtttgcagaaactttcggagttttgaaaaatcatgtgatgcggtggtactgtttggaagcatgcccgctgggtaaagcttgtcagagtacagaatatcgtgaggtatcactggcacagacggcctgctttatttattcgtcagttagtgcactaaatactaaactggcaatcgttttaagtattgcctcagacgaacgggtaagttgcgacgaagaaaaagacttcgccgacattttaaaaaatatcaacgaagtcaagcaggcaatatccgatatggaattatgggtttatcgcaatcaggatttattaagaaaaagagaaatcgccagtgcggtaacactgacgattaagagataaccacggtcaaatagttaactcatgtttttattatagcaaaatgaggcaggtgacgcaaatggagatttataccgtagaagatgttatgaaaattttgcattgtagcaaatcaactgcatataaaatgattcggattgtacgtgatgagttaaagcaacaaggttatattctaccgccggcaggtaaggttccgaaaagttattttgacgaacgtatatatatgcctaactatcaaagggagctggcttgatggctaaaaatgatttacagacaaaaattgatcgcttgaatgctgctgctgagattattgaaaaagaacataaatcaaaaaagatgtcggcatcttctgagcagcaagtctttgcaagtgttgatcgtattaaatcctgttaccggtgcgagtttgaattttcttgcctggatgctggtagaccttgctcaagatattcttatgtggattaggcggggagatatatgttgaatcaagcttggtttttttatgatgaatttaaagaagtaccgttagaaatatatcaaattgatcaaatggttttgatgggacatttgacagaaaaggaagcccaggaaagagctttctatgtgaatatagattattacttgcgaggtgtaaataatgtttaaaaaggcagaacgtaaaagaatttttgtgaaaatggcactgtgtggagtatcgggcagcggtaaaacttattccgcattgttactggctcagggattgggtggaaagatcgccatgatcgacacggaaaatggcagcggtgaactttactctgatctatgcgattatgatgcggcccaacttgaaccgccattttcaccaatgaaatttattaatgcgatcaaagaagcggaagccgaaggttataacgtactgataattgatagcctatctcatgcctggtccgggcaaggcggtattttggaaatggtagacaaaaaaagtgctaccagtagaagcgggaacagctttactgcttggcgagatgttacgccggaacataacaagttagtggatgcaatacttcagtgccgtatgcacgtaatcgtttgtatgcggtcaaaaacagcctacgaaatgcaggagaatgagaagggcaaaaaaacgcctgtaaaggtcggattagcgccgatacaacgtgatggaatggaatatgagtttacgattgtattcgatattgatcgtgaaaagcattatgccgtagccagtaaagaccgtactaatctttttgaaaatcaaatcgaagtcattaccccggaaactggtaagatgatccgtcaatgggttgaaggtggtattgaggttaagcggcctataagagcagataaatttgtccaagtctatagtgatgattgcatggtactaacaaaaaaaggctttgaaagtatcaagaatttacctgtcgatacattggcacagatggctgcacatcaaaattacgcccttgccgctaccgctataacagactttcttgacgctaaagccgtagcaatgacagatgatggatctgcagaagcgactgaaattgatgatttggtaaatgaattacccgatattgaagatcaggcaagtaaagtagatggtccgattggataatttgtattctaagtgtttacgttgtgggcgagatataaaacgtccggagagtattatgcatggctatggcccttcctgcaataaaaaaatgttagaagaaaaagcgcagaaagagcttatttatgacgatgataaagtcgatatagagccctttagaggctctatatacgacttgaaaaatatctaatgaaaaatcaaggcggtatatcatgggcgggtattttaagttgtatagggagctattcaaaaaaccaatatggcttaatagctcaaatgagcagagggtgatattgataactttattagctatggcgaactggaaggaaactgaatgggattattttggtgaaaaaataattttaaagcctgggcaatttgttacaagccttcaaaaaatcgttgaacagtgtaaagctgaaggcgtagaggctaacaagcagattacggttcaaaatgtaagaacaatgttacaaaagtgtgaaaggctcaatttcttaacagtaaggctaacaggaaaatcaacaaagagcggtaggctcataaccatagtaaattggcgggtttatcaaggtgaagaacctactgttaacaaagagattaacaaagaacctaacagccagctaacaaacaaccaacaaagagctaacaaagaacctaacaagcacataaaagaagaatataaagaactagaagaagataaagaaagtataagaaatggggaagaaaaaaatgcgcccaacatcccccaaaaaaacagctcggaattggcaaaaggtgctcaatatttttcggcaaaaataatgccgatcttgaatcgtaaccaggcagagcagattaatgatttagttgccgagtatggtgctgatagttttattttagcttgtgatcgagctgtggtggataaaaacaggtcaataacacatattgccaatttacttgaaaaagcacgcaggtcaaggaatagcgggcagtcggtgaatgttgaaagtattttagacgaattgattgagcgggcaggtcaatcttagagaaaggttgtggtttaaatgcctcagagagcacttgcattaaccgatatttataagggatttaagttttttcagatgtgcggtcggaatccgccggttaataaaaacttgttcggaagcgagtttacgacaagtgagcagcaaattaaggacgctttggcaacaaaagcggatatttggattgatattttcaaacgggttgaggttcctgttttcgagatggctataaaaaaagtgattcagcagacaaagttttggccaaacgagcaggagtttgctgccgcagttgattgggcacaggaagaaataaggacagaagcttatcagttgtcgcttgcgaatgatcgtgaagccagggaacagttcagcaagtctttttcaaaagaacagcgagataaaaataaaaaagtcattgcgtatattatttctcggattgggaagaaagagcgattgaaggtcccctataacgaaaaagttattgagtttggacgattgctttatccggatgcatccgatgaatggctgaaagaaaattacaacgatattgcaaatttcaagaaacaaaaacaattttgtgataactattgcaaaggtcgtgaaaattgccctaatagtggccgacagccagggcttagggtagataaacagtatggttacatcagacccgtgtattacaccgggacctgtagcaatttttaaataaaggagcgatgaacatggcaagaaggttcaggaaaattcgttatgacgagaagaaagggcaggtaacgcttatctgggaagatggtaaggcacacgaggataaatattctcttgagtgcatggaatcaccacgcccggagtttgttcaagcattcaaagaattagcaaagcatgttgctgaattgtgtgagttgccggcagattatgcggaccgcattaccactcgtagcgtatctttgaattatgggggggtacaggaaacgatgggagctgtgctatctgctgttatggagcttgaacaaagtaatggcgtgctggtattgaataccccgcataaaactgtagaaatgcttacagaaacggcggagcctaacgctaagatgttacttacagcagagtgcattgaaacgctggaaatgctaattgacgaagctcatgagtatgtaaagggtgttcgggcgcagggtgatctattcaccccggcggttggcgaaagtgcttaaaaataaaatttaggagtgttgaaaaatggcaaataacaaagttagtaaaggcagcaaaggcagtaaaggaagtacagcagtaccgccaaggaaagagaaaaatatgtcggttgatcaaattttagatgcgttgagaagtcagtctggagatacgataacaatttctgtaaaacgcttagaagctttatgcaaggaaattaagtcgttacgctctgaggtgaaaactttaaccgctgataagaatcagaatgatgaacaggagaccccagatgcaaattagtccgatttacagttatcaagatgatcgcccagagatacagtttggacgagtgaattttgaacttgaaaaagttgatgaagcgttaaaggcctatactgctaatacaaatgaacaaacttcagatgctttatgtatggcgatctatcaagctgaaataatgcttgaaactatggccctgcaggtagaaccggattacagcaaaagacacgttaattttctaaagactgttcaaaaaaattgtgagaaagctctttatagcggcagtcctaaaggttagtaaaacaaaaagaaaaagcaccgctttttacacggtgctttttcaaaaaagatttgagagtgggttggagagaaaatcagacgtccgccgaagtcatgagtttcacattgcagaactcacaaataaattttagcaaagttgctggtcggacgcaaaaaaagtgaggtagctatgagtgtaaattggtcggttagaggacgaaaaagcagggcatatggcgagcattttgaaaaaatgatattagcttcgtgtgaccattatttagcggctcaaatcgcaaaaatagaaaaaacaccggagccgatgaagattataaaaccttttggaacaggtcagtttatcgcctgtttcgcatcaaaagcccagcctgattttaagggaactttaaaaaatggcaggtcagtagtgtttgaagctaaacatacggatagtgatcgaatgaagtatgaagcactgcttgaatggcaaagaaaagctttgtgtgaacatgttggatttggcgctgccgcttttattctttgcagttttgagctggaacggttttaccgggtgccgcttttagtatggctggatatgaaaagaatatttgggcgtaaatatatgcttgaaactgaactgtcaaaatacaaacttagatcctttggtttaaaaatagcttttcttgaaaagttagggggttcggataatgcatcggaaaacgtggaaaaaatggactcagcaggagattgaacggttagaaaaaatgtggccaacaactacgacggcagaattggctcaaaaatttaaacggtcagaaaaggcaataactaaaatggcctatttactccaacttggtccaaaaacagcagcaacagattatatgtcattacgtgcattgttgaacactattttaggttacaggagctatggcaagatgcagacttgtatttctgccggcatacctgcagtattgatgtcgatgcataataatcgtccggtaatgatgatccggattgatgatttttggaaatgggcggaaaagcaccaggacttattagatttctcaaattttgagcttaatatgctgggggctgaaccgagttgggttccagttaagaggcgccgagattttagagcgaagttagaaaaggtggcttgttgatatggcattcccttgtaaaaactgtattgaacgtcatacagattgttggtcagcttgtcctaagtatcaagctgagaaagaaaaatcacaggcagttttagatgccaggaaaaaatattacggtgaagtcaacgattttattgttgatatagccagagcaaaaaaacgtatgagaaagaggaaataattatggaaattaaagcaacaacaccatgttataaatttagagatgttaaaccagaagaacagattgccaagcttaaagaggaattagcagaggtagaagaagcgtatcagcgtttaaaacaaaatccgaatgaatatcaaaaattagttgatttgcatatggaaattatagacttaaaggcttgttgtaacacgtttgtttttcaactgcgttatcgttacagaggtgtgtctatgagccatgagtttgatgctccacaagaggctatacgccgtgttatagctaaaaatatgaccagaggatattatttgttcccggaagattttgagaatctgaacactaataaatcataaccgttttaggagacgatatagatgggcaaaatgaaaccgagtaaggaaaatcaaatagagtttgttgcgtcagaaatagtcaaagagttagagcgatgggaatatctcaggaagtatggtggttgtgatcctttttggccggatggcgtgaatatgaatcttataagaaatcacataatttcttataaaaggcaacttgaagaactgtgtgagacagatgttttgccggatgaatattatttgtcgataccgccggaagtagatgatcaatatcttgctaaaaatggccaatattttgcagtcaggaaaaagcgagtagaagaatatggagacaaaattacaacaactatgcctaagtttactaaacgcagtcagcaagagttatttagtggtgggttatgcgaataggacttgttgatgtggataatcataattggcctaaccttgcgttgcgaaaatatcgacaaagcagaaataatccgaatg

SEQ ID NO: 9998 - DNA, 28541 bp, Unknown
  gut microbiota DNA sequence
aaggctacggttcgtttgaatatccgtttggtactatgtatcatgataatctgtatactgatggtcactatatctattatagaaacctgcagaatggggaaggttctgatcatgcgtttagtgactatgaaattgtaaaaacagcagaagatggttctttagatactatcaaagttattgcggttactcctgatatttttccggaagctgaaccagtaccagcaggtgtatgcgaaatttgtggaagtaaaaacgatgttagggactttcaatcaagctcggattttataaggcattatatttgcggttcctgtgtttcaatgtcggaggaaaagcgaaaaactctaaagaaagatcaacagagtgtggtattttttgcaaaaatactttttgctgattcagaggaataaaaaaagaacctgccagtgacggcaagcccaaagaatgatgatatacaattcgcaaaattattatatcatcattcaggagggcttagcaaatgacaaataatgatgttcagaagattattagtgaaacagcagaagctacagcaaaagccatatataataaaattcagttggaggccaaaaaagctaaagcagaagctgttagtaaaaaactttataatacaaggctgcttctgcagaattatcgtctgtttaagcagtatgtagaaaatgctgtttttgatttggttagattagatgaggagcaggaaactccattagaaattttagatgcaatgtggcagtcatatggtcccggtaaaagcgagattgctgttgagagcattaaaatgtcgatgaccaggacaaaaatcattatggctcacgtagacgagatgataggtctttatgaggcttattgctatcgcagtgggaaggacgaaaatatgcggagacttgatgttctaaagtcaatgtatattactgaaacggataaaacagctggtgagattgctgctgacctggctgataaatattatatggatgtaaggagtatctacagagatgtaaatgctgctatagatgttatgaccgcacttatttttggtattgatggtgttcaggttaaggaaaaaagaaaataagacgaaaaggtgtttactgtttggtaaacatcttttctgttataattaaataaaaaattggagagaatgctaatgattgaaaaagcttttgaaagtatagttgaatttataaccaaaacatattctatagaaacttttcatgtttatttgatgtttcttttatttacaattttaaacataatattaagttttttgattaagtggaagcaatctaaagaattagaatcttacaaagcaaaatttgcaaaatcgacggctatagaaatagaaaattttatgatagaaaacaaaactaaaagatcaacaagaaggctagtgtttactttggaaacatttgctatagaatgtagtatgatatattttgatgtggatttatttctgagttctggaggactagatgaagataataatggtaatttcatgggaagatactattcacgattacctgtactaactgataatttagcaaatattaatttggaaaatttagaaattgattatgtggatgagatacactatatatcaatacatacgataatggcacaatcaataattgattttcatcggacagagttaatggaagaatcggctgctttaaatgagtataaaaaacaaatttgttttattggatttaaggcacttaaagtaagtgaaaaaataagatctcgttataatatgggagaacaaaagttaaaaaaagttcacagcattaaagcatttattaatgaatataataaatggaattcagatggagcgtacaaagacttttaaaaatcgtgataaaatataggagtgttttatggataataatgaatttccagaaaaactttatcactactgtaatatttctgcatttatgagcattataaaaaataaatgtttttggttatctgacactaaatatactaatgataaagaggaaatatgtgcatttaaggatgctgtatgggcagctctcaatgagctagtatgtaataaaaaaattaatgaagaaatggctaataaaatatggataacatatgtttataatacattgccaggatatatatcgtgtttttctgaggaagatgatttgttaagtcagtggcgaagttatggtgatgatggtaacggtgttgccataggtgttgattttaacagcttgtctatagaacgtggtgggccgtttagaatgtgtactaatgaaaaaaaatgttatggtcgccaagtgctttatattaatgaactttggaaaaatgaaataaaaaatatttttaaaaaaattttagatgggaaaaaaaatatagaagaagtaagtccagatgatttatctggaatatttaatttgagttattatactaaaaatgatggatttaaagaggaagctgaatggagaataacgtatttaccatttttaatgtttgaaaaagaaactatggaagttgtagatgatttacctgcttttaaagaaatcaagtttagatctactcgagataagattatttcttattttgagttttcttttaaacctgaaagtgttaaagaaattattttagggccaaaaaataattttgatgttgaaacattgaggatgttcttgggagctaatggatttaaaggagtgaatattaaaaagtctaaaattccgtatatttaaaaatagcatgtcaaaaagttgtcactgacacgtcagtaagtcctgtgatatgattaaggtgcaaaaattggatatcaggaaaaccgcttgtgagcatcagcacaggcggttttttattaccatttttgtaattgttttataaaggaggttgataaagtgactggctttatcgtattggtggcgtatacgctgctgatgttgggcgtgagttatctgcttacacgccgacaaacaaccttgcaggggtttcttgtagggaataggcgaatggggacaatcaaatccgcaatgagtattgcagctacgtggatctgggcacccgccttattcgtcagtgctgaaaaagcatattctaatgggtggccagggctattttggtttttggtcccgaatattttatgccttttgttctttattccgtatgcggagcgaataagaaagcaaatgccggatggaataacgatatcgggctatatgggaacgatataccgaagtgtgaaggtcaagagggtgtatttggcgcagctgagtatattggcagttttatcaacggctgttcaacttcttgccggcggtaaaatattatccagtgtcctgggaatagatttttttacgacgacagtaattttgtcgatgatagcctattcctattctcagttctccgggataatggcttctgtgattaccgatgcaatgcagatggtgcttattttagggtgctgcctgctattggtaccatgggcgttatctatgccaggtggatattcagcattggtaaatggcctgcatggtattaacggcaattatcaaagcttagtatctgatagtgggatagcgttgttcttaggctttggattgccggcagctttgggacttatggctggacctttcggcgatcaatgtttttggcagagagcgttttctatcaaagaagggaagattgcaaaggcttttactttggggaccgggttattcgctatagtgcctttgtccatgggtattttaggttttattgcggctgggtatggatattcggcaacagataaaggaatagtgaactatgagcttgtggcgcagttgtttcctgaatgggtgacactgccttttttatttatggttatttctggattactgagcactattgacagtaatctgtgtgctgcagcgtctttggtaactgatgcaaaaaaagacgttgaaatgtggcatacaaaagcggcaatggcagtgctgcttttggcaggtgttttaattgcaagtgtaccaggtatcaccgtaacacatctttttctcatttatgggacgttgagatcaacaacaatgttacctacgatgttgacgttgttgggaaaaaggcttccggagaaggggatatgttacggggtggggcttgcaattattgttggcttgcctgtatttgccttaggaacggttttaaacctatctacaataaagattattgggtgcttggttgcaacgctgacaggtactattgtggctttgacgtggggattatttaatcgtatttaaggcagtgaatcgcttttggcaggagcgttattaaaaaaatgacactatggaggtagtgaattatgaaagtaacagaggtatctattgataaagtaattttggcagaaaaaagtgttcgtatgcatacggagatccaggtaaaagaatttgcccggtccctggaaatgttcgggcagatcagaccgattgtcgtagatggaaaatataacattgtttgcggcaacggtttatacttggcagctcaaagccttggctgggctaaagttaaggttttagttatgaataaccttagcgaaaaagataagaaaaagctaatgatcgctgataatcgtatttttgagctaggtgtaagcaaccttgaaattttagatgagttttttaaggaactgcaagacgatcttgttatccctggctatgatgaaagtactttgcagatgctcgttggcgatcttgacgctgttaatgcccagttggatgattacggcatcattgataaagaaaaagtcgaagaaattaaatcacagcaggcagcagtagagcagaaaattgagcgtgttgccgctgaagaacacaccgatacagaggattatgataacagcgaaggatttgaaagcaactcagttgttgaagatgataatggtcgttatgttatttgtcctaagtgtggtgaaaaggtatggctataattaagctggaaggagcaaggaatgttgttgaagcagcagaaaaaagaattataaacgtatttaacaatggactgccggtatattttgctttttcgggtggtaaggatagcctgtgtttgtcacagttgattgttaaccttattcaacgtgggcaaatagaccccaagcagttaattgtatattttttagatgaagaggctatttatccatgcattgaaaaaacagtattagactggagaagaaagtttatcctgcttggagcaaaatttgattggtactgcatcgagtgccgtcattataattgctttaacgagttggcaaatgatgaaagctttatttgctttgacagtacaaagcgggatttatggattcgcattcctccttcatttgctatccggacgcacccgctgctaaaagcaaggcaagatacatatcaagacttctttgcacgggtgctgaagggtggcattcatattcttggtgtaagagctgcagaaagtatacagcgttctcagaatttatcgaggactactgcggcgaaaaaacaattaaatagtaaaaatcatattttccctatttatgattggaaaaataacgacgtatggctttatttatttaacgaaaaggttgaaatacctgacatttatttatacctttatcaagctggtaccggcaaaaataatttgcgggtatcgcagtttttcagtattgatacggctcgaagcctggtaaaaatgaatgaatattatccggatcttatggaacggataatcaggagagaaccaaatgcttatttagcagctttatattgggattctgaaatgtttggacgttcttcaaagaataggagagcgattgaaaaaaatcagaaggttaaagattaccggaaactattggaaaacatcttcagtaatttatcgaaatggttttttactgaagcaaagttgaaaattgctcaacgttatcggcatctatatgtgaagtctgcgatattaatgtcaaataaagattgccaaaatatgtatgaggcgcttttgaaaggtgatccaaaaatgagatcgtatagggcgctttatttagatatttataatggttatttaagaaatgcgaaaggcgggaaaatatgatggatttaaaagcacctttaaaatcgttacaatgggtaccgattaataaattaaaacctaataactataaccctaatgtggttactaaagaaaaccttgaactgcttactcagtctattttaaccaacggctggacgctgcctatagtggttaagcctgactatacgattattgatggattccatcggtggacggtagcacagcgagagccgctgaaaaataagttagcgggtatggtccctgtggttatcgttgaccataaaagtcacagtgaggatatttacggtacgatcacacataatcgtgcgagaggaacccatgtaatagggccaatgaaagctattgttagggaattggttaatgccggtacaccgatgaaagagattgagaagcaaactggtatgaagaaagaagaaatttttaggttgtcagacttttcaagagaggattttttagacatgatgagtacctcaaagtcatacagtcaagcaacgctgttaacaaaaatctaggttcaaacaaaaagttttatcttaggaggtgacagccatgacacgggcgagaagccccgacagagaaaaagcccggttgatgtggctgagaagcggcaaaactctaaagttaaaagagattgccgaaaaattgagtaaaccagtcgatactatttcgaggtggaagcgtgaagaccactggggcgataaaaaatcgacgaaaaaccaaacaaaaaagaaggaccagcgaggagcacctctcggcaatcaaaatgctgccgggcatggtgctcctcttggtaattctaataggcttgtccatggccgttattctaaaatgtattgggatactgttagccaagaggaattagaaatggctgaggatatgccgtttgatacagaagatatgctaaaggatcagttgcggctgtattcaataagagagcggcgttatatgcagctgatagctaaatataaagggcttgaagaaaaagcacggtcgtctgtaactactgacagtacatcaacttttttatgccccgagaaagataacagtggcaaaattatcactgatgaaagtggtaaatttaaaagaattgaacagaatagtgttattcgcactgtacctattgacagcgttattcagagtttggaagcagaacttacaaaactgcaagagaaaaaattgaaatgtattttggctctgcaggatattcaggataagaagaaaggtgatcaggataaaggtccgaaagttttgaaagttgaggttgaatatgtttagtattacctcacgattaagattcaatcggatttttaagccggtaaatgaaacacattgccggtatagagttgttttaggttctgctggttcgggaaaatctgttaatgttgctcaagattttatattaaaactcagtgatacaaaatatactggtgcaaatttacttgttattcgtaagtcagaaggcacgaaccgctatagtacatttgctgaacttcaggctgtaatttttcgtatgtgtggcgaatactgggaagatttttggataatcaacagtagtagacttatgatcacgtctaaaattactggaaacagtattatttttcgtggtgttaatgataagaaacagcgtgaaaagttaaagtctatcacttttcctaaaggcaaacttgtgtgggtatggatcgaagaagctacagagctggaagaagctgatatcgatattattgatgaccgtttgcgtggtgaattgtcaaatccgtatttatactatcaaattacaatgacatttaatcctgtatccgctttgcattggataaagcgtaaatattgggatgttgttgatcctgatgtttttacgcatcggtcgacgtacttggataataagtttattgatgctgcatattattctcgtatggagcgtcgtaggaatgatgatccagaaggttttaaagtttatggccttggggaatggggcgaaacatctggtatgattttgtccaactatgtcgtcgaagattttgatacagatatcggtaattttgacgctgcaagatatggacaggattttggttataaccatgccaatgcgattttggatgttcgttttaaggatgatgttatttacattgcttctgaaatttattgttatgaaaaacttgttgacgaaattattcgtatggcggaacagagaaattatgatcgaagtcgtataatgcattgcgatagtgcatccccggaacctattaaaaaatggatagcctgcggctggaatgctcatggtgtattcaaggacagtggctgtgtaatgtcgcagatagactatcttaaacagcataaaatcatagtccatccgtcctgtaccaatactttaaaagaaatgtcgcaatggagatggaagaaagatgaaaaaacaggcctctatacggataatccgatagaattctttgatgatgcgatggcagcgttaaggtattcggtcgaggacttccgcaggataaaaacgatcaataaacctaatcaagttaaagctaggagggcgtgattttaatatgtcatcacaagttgtaaaaatagaaaaaagtattagtgttttaggtcatagtttgttgaaaagcgaatccaggcaagttgctgatccgcagaaggaaacaggacagtcagaaggtcgtgttattgaaccgccatatgatccggaaaagatagcggagctggtgcagctatcttcgatactgccgcagtgtattagtgccatggttattggttgtgagcgcaaatatatgcttgaacagcgagaggatggcgtaaaaaccagcgatgaagaatggtcgaaagtcgatacatttttcagtaatgttgatccggaaggtcgtgacgattttcttggattgcggaaaaaattacgtactgatcgtgaaacctttggttatgcttgtatggaattgattagaaatataactggagagatgataggtttacgtcatataccggcggctacaatgaaaatgacaccaataggaagcgaacttgttgaatgtactgtaaaaaaagttgttaaaggtaaaataatcgaagaaaaatgcacacgtcgtttccgaaaattcatgcaagaagttgctggtgaaaaagtatggtttaaagaatggggagatccccggactatggattacacgtctggcgattttttgaaagataatacgaaatcggaaacggcagcaactgaagttatttggcttggtaattacaatccagcgtctgtttatgggcggccacgttgggtagggtgtgaatatgaggttgcaggcgttcgagctgcttctgaatgtaattattcgtactttgataataatgccattccagcggcagttattacggtgtcaggcggtactgtagcagatgaaacgattgattcaatccgaagttttatgactgatgtcacacaacagcgtggcggtgcgaattctgtgctaatcattgaggctgtaccggcgggtactgataatacttatggcggagtaccagatgcacgcccagcacaaacgaaaattgaaataaaatctttgcgtgatgtccagcagaatgatgctcagtttttagagtataacaaagatgcaaaatcaactatacgcagtgcgtttaggctaccgccgttgctgattggattatctgacgattacactcttgctactgctaaagaatctttgaaacaggctgaggaaaatgtttttgccccggaacgggaagaatttgacaagcagatgaacaggattcttgtttatgagttgggcgtggccacatggtcatttaaaacggtaggcatagatgtaaatgatccggaagaagtttcagctttgattacagttgctgatgcgacaggtgcgcttaaagtaaacgagattcgtgataagattggcacattgttgggcatggatttagagaagcttcctgatgaatttggtgaattgcctaggctattttcgcagtatgttgataatagtaatgatcttaataatttgaataaatcacagctttttaaagctttatggaaaatcagagagggcttgaaaaaatgaggtttagtgaaaatgaaaagtctgaattgctatttttgatcaagtccatttgctcattagaaaaaaagaaagaaaatgatttaggagatgccgaacttgcggcagagcttaggaaactctggcgagagagttactcagaacatctgaaaaatgctattgaattactggaagatattgcaccagaagcaagggaattcgctttaaaggaactggaagaatatttgttaaatgctttggggcatgagtttgccgaaagcaaggctgttaggtcgataatacataaaaaagttgctggcatatatgctaaggcaaagagcaaatgggccgaagataagccgaaggtcgttgacaatacgatcattgacaaacgagcgatatcattcattgagagtaatggaatttactggttaggtgaacattacagtagtgctatttcggaaaaagttgtagaaacaggtaaagcagttttggatatgggcctcagtacaaaagactttactaagatgcttgaaagtcaactgagtaatgttcttgatatgactgattataaatactgggatattacagctgaaagtttgttggttagatctaaggcatttggtaatgtttttggcatggaagaggtaggtgttaaagaatatactatctttgccatgggcgacgaaaggacctgtccggtatgtcaagaattggatggtcgcagtttcagcgttactgctgctgcagatgtatgtcggaatgttcttgagttaacagacccggaagatgtaaaaaatgctttaccgtggacaagtactccaccgataggtgtttcaagtgcgaagttgatttcccagggaagaatgttgccgccgatacatgggcactgccgctgtgatgttgttatatctgagaaaacaacgaaaaggcaggtaacaaaacaaatcttgaaaacactcaaaggtacaaaacaaaatccagcaaaagttatttcgcttgatatggatacaagaatagctttagtatccgctcatggcgcttcacgacaaggcgtaccgggttggaagtatgatttgatatcatctaaggacaatggtaaaataaaagcaaggaacgtatatgacggcatggggcgacttactacagcgtttcattttgaatcacatgctggctctgggccacatagtacaaatccccatgtacatcgaacaatttaccatagcaatgaaccgaacgaagttgggaaacgctctgacgtaccccaggctttatggtcttgggaaaaagaagttatagcggcaatgccgcaggaaatgattaaaggtggaggcgtattatggcagatcaaaaaagctattacgcagataaaacagattttaaaaacgatttgacaggtgccgatggcatggctccgtatgatggaccagtaatatataaaggtgtaatttatacggttagcagtgatcctggcacaggtttttttattgggcgtgattgctctggtaacgatcgtagcatggatgcttattttgatagtgtagatgatatgctagattcatatagacttcatgatggcgctatacttggtgatgtcattaataaagttgagatagtataaagcactttgcaaacagcagagtgctttttattataaccggctataatagccggtttttttatggctattttactgaaagggggtgaaaatgtatggacttaaaacgtgtggtagctggctttaatgtcgaatggatttctttggttgggtctcctgcaaatcaaaaaaagatcatcttaaagtctgctaatgcaaagccttctgatcagacagaaaaacaatgggattttccgttgacgaaagtagatgttgaaaaacgcattgtatacggcctggtggctgtgccgaatgaagttgatactgatggtgatatgtatactccggcagctgtagaaaaagctatggaaaactttatggcttgcggttatacgcagtatattgacagggaacatgattataataaacgtgattgcttcgtccgagaaagctggattgtcaaagaaaatgatccgatgtttacggaagtcggtgcctgggctgttggtatcaaagtcatgtctgatgatctttgggatgttgttaagtcaggtggcgtaaatggtttatctttagctggttgggcttatgaaagtttagatcctgaatctgctgctgagattaacgtaacaaaggctggtaaaaccattagcgaaaaaaccaaaaatactttggaagcggccaagaatgctttggttgatgctcttgagatgattaggaatttaatgcctgaaaaaaatcaaaaaaataatgaaatggaggatgtattaaacatgaaaaaagaagaattagaagctttgatcaaaagtactgttactgaagctgtaaaacctattcaggaagaaattgaaacattgaagaaatctgaaaatgatgataatgcgggtaaaggtgctgcgggcgatactggaactggtgaagctgatcaaaatgatggtactggaactggtgatgataccggcgaaggtgatttgactggtgaacaaattgccgaagttatcaaaagtactgttgccgaagtagtaaaacctattcaggcagatattcagatgcttaaatctgttggtatcatgcgagctaatacagaaccaggtattagtaaaatcgaaaaagaacaaagcccgtttgacggtagctttgtacctggctctttagattaataacaaaaataatgaatggagtgtgaataatcatggtaaaacctttaaacaaagcaagtggagttactagcggcacgactttagctggcggtggtaaacttactcctgaacagtctgataagtttattactacggtagttgaaaattctacatttttgaaaaaagtacaacattacaaaatggcatctcctgaaagatatattgaaatgttgaatattggcaagcggatgcttagaaaagccggagaaggtgaagaacctgcttcttctgcatctatttctactgctcgtcgtaaattgtctacggttgagattattctgcctatcgatatttcatattcgtttttagaagataatattgagaaaacaaaggctgagcagactattttagacgctattgcaaagcagtttgcaaatgataccgaggatttgggctggaacggtgatgatactaagagtgatgagtttattaaaattaataacggatggttggctctttctcgtgctgattctaagacaaataaagtcgacttaactgctgtcaccgattctcctatgaaaatcatgaaagctatgcttgatgcaatgcctgaaaagtttaaaacgaaggatattgaatttgtatgttcttctgaatttaaagatgcttatatcgaagaattgacttccagaaacaccgcacttggtgataaagctcttacagaagccgccgatattcgttataaaggctatttgctcaatccgcgcccgtatctttctatgtatgatattatgctggctaatcctttgaatatcgcttatggcgtgcagcgtgatatttctattgaatttgttaaaaatccccgtaagcgtatgatcgaatatactattaccgcacgtactgactatgaatatgctgttgccgaagcgattgttgtaacaactggtactcctacaagtggtacggtggaaagttctgaggagccggtagtgtcttaatgcgttactcagatgcaacagctgaacagttaaattcattgatgtatgcaacggtggacgacgttcgtgctgagggggttggtgatgatgtttcgagtgataggattacaaaagccattaatcaggcttctgtgcgaatatcggcgctgacaggcaccgtatttttaaaacctatccctgttctcataactcgtgcctgcgtgttgatggcgattcgtttctacgttccgactgctgcagaactggtagaattggaacaggaaagaaagatcgtcaaagaaactacagacgggcatagttacgaaatgcgggacgacgagtacagttatagtaaagggcctacaggtgatatggaggtcgacgagatcattatgctttacatgaaaaagccgacggttgtcggcattggaacaaaggtggtgaatcctatcatatgaagcctaaacttattcacccggtatccattgaacttatgcgccgggataacgataatacaaccaaacatccagtttatgatgaggccgttgagcaaaaatatttgccaacggtcttttttgctggtcaggtaagttataaagtctacaacgcttatgttgcttccggtcttggtaatactccagatgccgaggggtatattttatgtatggctgatgattgggatttgcataatggtaccgaaggtgatttattgattatccccggtggtacaaaagttactgttgttgaggctagaccagcggctcactaccacggcaaacattggttttataaagtttatttcaaaagggagcgtggcgaagttgggtagccgtttaattggcgactgggacaaactcgaaaacgctttgcgaaatgccggtaataaaattgatgaagctgcaacaaaggccgcagggcaagccggttttcttttggtcaaaagaataaaagaaggtataaaaagtcaagctccggccggtcaaaagtttgaaccgatcggagctttaactgcttggaaaaagggcagtacaaaggctttgattgaaaaaggtggtaatggtggtctaattagtacaattacttggaaacgtgttcgtggtggagtatggattggcacaaactatcgcagtaaaaagggcgttaatattgcccgagtacatgaaaagggcgcaactattgaagttacagacgccatgcgtaaagggtttgttgcagtaatcggtcgcaggataaagaaaactacaaagtatattcggattcctgcccgtccgtttatttctccgataatgaatgataaaaaaactatccaagaagcgaaaatactgtactgtaaggcaatcaaggaggtgtttagaaaatgattgcacaggccgtcgaaaatgttattttatggcttcgagattgtgtgactaatactaaatattctcctggtgacattattacagaactcgaaaaattgccgggccttgtagttgaaggaccgatatggaaagaggttgctgagttagatgattcggcagtgtatgaatattatattgatgagcaaaatcgtcggtataaaaggacttggggaccgaagtattatgatttgatttttacattaacatacgcaacaaaaaagccatcggaaatgatgaaaggagtaaccatactcagtgcctatatcaacgatcaaaaagagttgaagtgtggtatagatccgaacggcaatcctgtgttttgcggtatacgttttgaaaatgatttttcaagcacaggaaacagtaatttatcttcgctgtgtgaaagccaggctaagattaaattagaggatgttccattattctctaggcgtgctgcggttgaaggtgtattgaaagaaaaattaaatatagacttggctattcaagatgaaaaggctgattctatcaatatcgaaaggagtgaatgattatgggacttggttttagcaaagtctttgtaaacgaaaatgatatttcgttttatgtggacagtttgcaaaaaggtttatcctgtgttgaaggaaaaacagaaagaggcccggttaataaagcaatctatatttcttcttggccgaagtttgttgagaatttcggcggattgcttacagatagcgatttcccgctgttgtgtcagcgtgctttagcaagaggcgcctgcctatgggttggccgtgtagtacatcacagtgatgtgacagatccgtctagcattactgcaaaatactctgaggtaaaagccggagatgttctttttagagcaccgtctccaggtgcttggggcgatagtatgaaggttgttgtttctgttaatgatgataacagcgataattttgatattgtcgtatacgaagatgataaatctgtaacaagctttgaaaattacactaaagatcaggttttaacgattaaatctgattacttgacagtggaagctatcgaagccgaagaagaagcaattttttcaactggaacttatattttgactggtggcagtgatggtgacgctcttactgattctgactatatcggcgacgaagcagctggaacaggctttcatatgttcgatgaaattgacgatgcatctttgcaggtatctgctgctgatactacgtcttatgcagtagccattgctggtcatgcatattgtgaaaatcggggagatttgatgtatgtatctgcgtgccccaaaggtatcaaacctcagcaggctgttaattatcgtaaaggtaagggcgttgacggaactggaagcaatgctgcattcagcacaagctatggtgctttgtattatccgcatataaaagttctggacatcttaacggatgatacaagactgatcaatccaacaggcgatgtgctcggcgcatatgcatataacgataatactggtgcggaatggtttgcccctgcaggtattacacgtggcaagatcaataattgcctgggtgttgaatataactgcggtgctacggctagagagggcgaaggtagtctgctcgtcaataatcagatcaatccgatagtttctttcgatgatagcggtgttgtattatggggaaatgaaactctgcagcaggatgcatctgcattacgtgaaatccatatccgccgacttttgttggtaatgaaaaaaggtctacgtaaatcttgccgcattaatctgtttgagcctaacgatccgcaactgtggcgcagcacttacagaatgttgaatccgtacctaaacgaattgaaagataaacgtgcattttatgattataggttgaattgtgatcaggatgcacaaagtgttgatgaagtgaaaataaatactgctgaaggtattgatcgtggcgaattctgtgtaagaatttggattaaaccgacacgggccgcaaaatggattatcgtggatgttacgattatgaaaactggtactgcttttgctgatgttgttggcgaagtggcgtaaggaaggtgaattaatatggcggataaaccaagaaccactggcgtaactcagcggtggcaatatcgtgtacgccttggggctatggagatagcatatttccaaaaaggaaatttgccgtctaaagaaattgaagaaagtacattcaagccagcaggtttgatttttgatgaaaagtatccaggccggataaaatacaatgacattactcttgaaaaagggcagcgtattggtagtgatcttgaagctgacgaatggtttaattcggcggcagatgggcctaacaatgaacttggttcggcttacacaaaacaggttgagcttgaacggcttgatcgtcgtggaaatgttattgacaggtttattttgcatgaagcctggtgcaagaagattgaatatgacgactttggtgatggctcgtctgatgcaaatatggagaaacttactatttgctatacatattacgaaagagtttaatttcaaaaggcggtttaaggtgaattaataaccttaaatccgcctttgtttttaggaggaataaatatggagttagtactgccggtatctggtatcagtgttgagttaagcccgatgaaatataaagacgaaaaaatttttacagatgaaaaactggttaaacagggtaagaactatgattatgtcattatgtcttgtgcaaagtttaatggagaatctccgagtgagcgagaagttttaaatttgcactctggcgatcgtaattatattttagtacatttgaggattttatcttatggcgacgagtttgaatttgaggtaaaatgccctcactgtggcaaaaagaataattacatagtgaatttgtcagaactgcttgaaaatggcggtattcaaattattcccaaaggtgaaagcgatactattgatgtttcattagttgatggtggaattgctactattggtgttccaaacgggcaccgtgaacgtagattgataaataaagctgtcgataaggggaaagttggtaaaactgatatgacggtagttttgattgatcagatcaacggtaaagatgttactgcgtcagctttagaaaaccttactgccaaagatttactgaatataagaaaacggtctaatgaattgatttggggattaaagccaattataaaactgccttgtgatagatgtgacgaaacttttgagcatattattacttctgatcaaaattttttcaaccagtaagtgacctatatggtgacctttgtgatcctgacgaagaaatatttttactttgttataaggctatgtcatggtcatttactgatgttgcagagatgccccgcttactcagaagaaaatttgttgatcgtttattaaaacagtatgaagccgaagaaaaggctttggaaagtaggtgatactgtggaggcgatggaatccgctatgggcttggggttcgtcttagaattcaaggatatggccagtagtggaattgaaaaagcaaaagtcaaaattgatgaattgaagcaacatactgctgaccttacatctgtatttgataagaacttaacacgtataaaaaatggcgccgctcaaatggctgttggttttactatcatgggatctatgctaattccaacgatgaatgctgctctggggcagtataagatggccgaagttagtactttgcttgctaaaaatcaaatggggctggtgagtcagttaagcgatacagcaaatgctgcagctatgaagttcgggaaaaagactgatgaaatggcgagtgcagaatataatttaatttctgccggcattgatgcggcaaaagtaaattacgctttagatgcttctgcaaaattggctatcggcggtataacggatatgggaactgcctcaaatggattaacctctgttcttaacgcatataaccttgcagctgaacaatctgaagaagttacagacgctatgtttgtggcaatgaagcgtggtaaaactacaatcggagaattatctggtgtaattggcagagttgcgccgttggcttccaatgtaggcgtatcaataaatgagatgtttggttccattgcaacggcgacattgtccggacagaaaactgaggaagctgcaactggtttgaaagccgcattgtcaaatattatgaaaccaacttctgagggagcgaaattagctgacagtttgggcttggcatttgatgctgaagcattgaaagcaaaaggcttaagaggcgtacttgatgatgtttatgcatcaacaaaaggcgatgtcggtatgatgacacagctgttcggatctgttgaagcgttaaactttgtctttgcaattatgaaaaataatggcgatacctttacctctgtcatgaacgacatgaatagaaaaggtggatctactgaggaagcctacaggaaaatggctgatacagtcattatgcaaggacgtaggatcggtgcttctttcgctgttggcatgaagcgttttggaacaatatttttgcctgtattaagtttaattcttcgccctttagaattaattatgaaaggctttgctagccttcctaaacctattctgggcgtaataggggcaggattagggtttgtttctttgttttttataatgcgtggtgcaatgatggctagttatggagcatcaaaattgctttctgctgggattggtggtcaatttgttgcaagtttaaagaaaggtacgttaggacttttaaactttaacagcggttttgctaaaacatcacttagaatgtttgggcacatggctgtactttatgcgctttacaaagcatatgattataattttcttggtatcaaaacagcggtttcgaggttgtctgcagcgtgggatattgccagcaatgctgctgacgatggtactgtgaaaattaaaaagtcactgattaaggatttagggttcagtaatgtagagtatggcgccgatgtattagaaaggttaggggctatattttttagagtacaacaatttgcgaaaagttttggccaaggtgttggaaatgaatttgcatggcttggtaaacaactggataagttaaagcaagatggagggccaattgctgatttgcttagcgggttactcaatattgaccgcagtaaattaagcgattggaaagagattggctttatgtttggtaagttggccacttatattgtaccttttctaatgctgcaattagcattttccgcaattagtactgttgtaggtggtattattgcgccgttttctgcgttatttggtgtacttggttctttatatgggattataatggcaaatcctattgcattgatcattgccggtattgcgattgctgcctggttaatttatgaaaactgggatgctgtatgtgcgtattgtaccgatttatggaacagttttagtttatttatgacaagtacctgggatggtatcgtttcgtatggtaatgagctttggaccgggttttgtacattcctgcaagatatgtggaatggagtagtaaacttttttagtgcttatgggcaaatattattcgggactatgttatggccatttagtatgatcgttgcatttttcacaagttttcggactactttctttacttctggcgccagtctttgggacgcattttgcgccggtataaaaagtgctgttaatggacctatcgatgcagtacgtgaaggacttgcccggatacggagaatgctaccgttttcggatgcgaaggaaggtccgctatctacgttaactctttcaggcagtaggttaatgactacgctggcaactggtgttaatgctggaagtccagctttgcatagtgcggtagaaaaagggttttcgtcgatacttccgcagaaagcaaaggttgacgtattgcctgcttatatggctactaagttcccggttatgcctaagcgttttgcaaaagttgtaaaaggaaatgatgatgatgatcctgtgagcggcagacctgattttattaggaatatcactaatcgttttgtatctgaaaagaaaacagttgttgatcatatgctgccggcagaaaaacaacaggaaaaaccgtttattgttgaaagcatagtatatcttgatggcgaacaaatttatcgtgcggtaaaaagagtagataaatttgagcgatttaaggatggtgatgatcgtgcagtttaacgatataatgcggtcttttaatgctcttgctggttctgctccaaagcctgtaactgggtgtttggttgatgtggaaaatggatcaagattagagttttgctttaatccaggagaaattgatgatgatattccggtaaattatgcttttattaatataccggggcaagggcatagtgttgctcaatggagtagtaatagtagcagaaaactggcgtattctttagatttctaccggaagaattctgatgataattatgtccgtagaaaaatacaatggttggaaagagtaaagacaccgacatatgatgcagaaggttatttatcggcagctccgcatagggtattatttctttttggaaatctttttaacggtagtaaaaaatggttgataactcaagcgaaagtacgttataacaatttgtggacgaaaagtttagatccgctttgggcaactgttgatattgaacttacagaatggcatgacgataataatttcggtaggaggtcataaatatggataaaacatctcgacatagatttgcggttcgatattatgatcaaaccgataaggttggttatcgtggaacacgtccattcatagaatttcctttaaaagaaactgatcaataccatactgtggctgattacgatcgcattgatttacttgcctataaatattatggcgattgtagttattggtggattattgcggaagcaaacgatattagtaatcctctgcatcttgaaactggtaaacggcttcgtatccctgcaaaatctactgtatataggttggtgatggaagtatgactgtatatggtaaacgtggggcatatgagccgttttttgctatatttgcgaatggagaagaattaccggataaaattatgaataacataactaaagcagtacttgaagataatgaggaaaaactcgatgaattatcttttactgttttagataaagatctgactttgcaggattcgccggagctggctaaaaatgtggaactgctttttgtttttggttatgttggcaatttgcaaagacgattatgtaaaattgaacaggtcgaatataatctgcctgaaaatggtgttcctaccattgaggtaaaagcattggataaaggaattgacttggttaaaaataagcctagagcctgttatggtcaagtatatggtgctgatgtcctaaaggacattgctgcccgtaataaattgaagtgtgatttgtctattcctgatgatttttatatggagaatgtttcccagggtggcaaaactgatatggattttgccaaagagattgctattgaacgtggttgtagtgtttgggtagagaataatactttagttgtaatgccgtatgtactttctgaatcaagcgtgcaattggcctatcgtaaaaatttattatctgttagggctacatataatggtggacagggagaagcagaaagaaaagatactacagttgttggtattgatcccgatagtaaagaattagttaatgaaaaaaatactcaaaaccaagaacaacaaaatcaggaggacgatgaggttattagaaatgtaggtgattgaatgtctgtaaatgatgatagtgccggtcgtataattagcactaatagaaatagtgcgagaagtcgcagaaaagctgataatgaaagtaaaagatctcaaatgaaaggttgggaagcgactgccaggataattggtgaccctgcaataaagtcaaagaaaacctgcactttagaacactgtggatctaaactgaacggagattggagaatatcatctgtgcgacatgaatttatggggaatcgttatattagttctctaaaattagttcgtccagaagctgggcaacaagctgccaatacttctaaaactgataatggtaatactgataacagaacttctgataatggcgtagctgttccggaatctgataatgatactgttgaaataaatgtggggtgattttttgaaaaatcagctttggggaacgcatagagggacggttatggagaataatgacccgcaaaaattaggacgtatcaaagtttatgtgcaagcagcttatggaacgtccagtatagcggaacttccgtgggcttatccgaaatttgcaaaaccaggtgatttttatgttcctgaaattggagaagccgtttatgttgagtttttatgtaccgatggtgaaccggattctaataatccaatttggactggtgcgtggatttctttaaaagagattccaagttgtgttgtcggtgacgatatggcgaatgcacattattatcgtgttgagcgtactgctgggggacattgtattgaacagtgtgataaaccaggcggggagtatataaaaataacttcggctgctggtgcaactatcttgatggattcttcaggaaatataaaaataaatggcaagattatttatttgaattaggaggtagttgaatatgccgggggctgtgagattaagcgatatgagtacagggcatccgcattgttatcctgctactcctgcggttggagcaagtcaaaatgttattgtaaatggtaggggacaaaatagggttggtgatgcatggcaaacgcatggtgcttgtgaagatcacagcccgcatagtgggacatcgtcgtcaggcagtcaaaatgttattgtaaatgggaaatctgcctgccgcattggtgattctatatcttgtggcgatactatggccacaggtagtagtgatgtaattattaatggttaggtgattgatatggataaaggtatatcaagtccgttcgtccgtggtgctcaggggtattttaaagttgatgttggtgctgatttaataaaaagtaatattgctcaaattttaggaacaatccccggtgaaagggtgatgttaccggaatttggttgcaaacttcgtaatcttctttttgagccaatggatactgccacatattatttagcaaaaacctatattgtagatgcgattattttatgggaaaaaaggatttacttgaatgatgtggagcttgaaaaggatgaggataaaggaatattcttagttagtttgagttggatatacaatgaaaccggaacagaagaaagcagtatgtttttagttggaaatatgggggtgaaaatcaatgagtgatttggtgcgaataaattatattgacaaggaccatgacagtattgtttcagatgttatcgcacaaatcaaagctaagtatcctgatacttggacagatttcgagcatgataatgccggcagaatgttacttgaggttcacgcttatataatagacctgttactgttttatcttgatcggcaagcaaatgagtgttttttagttacggcaagggaacgtcaaaaagctataaattgctgcaaagcgattgggtatgtattgagtagtgcggtgccctcaaaagttactgtaaaaattaccttgaaacaaactgtgccaagtaatgtaacgatcaatgctggtacagaactaactacctcagaaaaaattgtgtttgaattggatgccgatgtaattattttagctggtgagttaaatggattcggtactgcgacacaagggaaaacttatacagaaatacttggtatctctgatggttctgccaatcagagttttttaatatctaaaacaggtgtcattgatataaaacaaatctctgttggatatgagaaatggacagaggttgaaagctttgcttttgccagtgctttatcaaaaaactatactgtagaaattgatgcgttgggacgtggcaaaattatttttggcgataaccgcaatggattgattccgacggcaggaagcatggttaaaatcgtttatcgtgttggcggcgggctaaaaggaaacattgtcaagaatacgcttatcaaagtgaatggtactggttatgatgcaaatggacagcctgttgcagttaccgtcacaaatgaagaagctgctacgggtggcgaagatgaagaaactattgctcatgctcggaagtgggcaccggttacttattcccagcaaaatagattagtaaccgaagaagattatactgctgcagctaacagttttgctgataaaggattaggcagatttgctaaagcaaaagcaattatacatgagcgatcaggagaggcgaatgttatccgtatttatgctttgtgcagagatgctgatggaggatttattgcaccatcaaaggcgttaggagatgcgtttgtatcagctattgatgatacaaagatgattactgatcatgtggaagttacagcagggacatatcagtctgtcgatatatctgggactgtaaaaatgcagccgggatatttaaaagaagaagtacttgctaacctcaatgagaatatcgaaattttgtttgatatggaaaatcgtgagatggggcaaagtttacgtattagtgatttatataaagctttggatagtgcgccaggtgtagactgggtggagcttacaacaccacaaagtacagtaacaccagtatctgaatatgatcttttgacacttggaaatgttaattttgaggtgagttgattatgaatgaaaatgagatattaccaaaacttgtccctaggatttaccatactgatgaatttgtaccatttttagaggcgttagatgcatcttttcaatatctggaaaaatctgttaagaatctaccggatatagttgatgttgataattgtgatgataaatatttgccttatttagctgcaggtattaattgccctttatatggctataatactaaattgtggcgaaagcaaattaaaaactggccgtatgtatgccgtatgaaaggaacaaagcgggctattaggtattttctgaatgcgtttggtattgttgccgagagcatacctacatattggcgagatcagtatggtaattatactgaaaaaaaacctgaaggtgatcctttttttgatgaaacatcgggactttggaaaaatagcaaaacacattattttgacgtaatattatcagcaaatgatgatgatactggaaatattgaatttggtagtcttactgaagctggtagcattatacgtcagtatttggacaaggtaaaaccgtttcatgcagagctgctaagattggcctggatttttaatgcaaatatgccagtgaagataaagcataaaaattcttctattggatatattaatgccagacatcgattttggaatcagggaatatcaagatcaacatattgggacggagaattttgttttgacggtactatcaggtttgacgggatctatccagatgaaaattacaaggaacgccaagctcataaatttaagcttgaacaatcaatttcaagttacggtcacgtgaatataaaaaataaatatgcttctaaaatcaaaataacgccgttacaggcgtttttttattgccacaaagctactatcaaaaatcaaattaattcgtcttataagcacattgccgctcatggaatggctaataatacagaaatgtctactatgcaaaatgggacggtgataacaaagaatacttttgatgggtcgttttgttttgatggtacgcatgattgcggtggaagctatgaatttagaggttgttatgagcatctatgtacttgtgtgattacaaaaaataatcaaattgtagaagggagttttgaaagattatgagtgatgtaaatgttagacatactttaaatgtgaatggtgaagatatcgatgttttggcaatggataacagttcgttcctggcgtcaaataaaaaaactacggctgattacagagcgttatttgctcaggctattggtacaacggggacaattcccaaaattgtaaaaatggcgtttggaacaggtggagaggttgacgaacaaggaaatccagctccgcctagtgataatggtccgttgaataatgttgttttgacgaaagctataacagcagtaacttatcctgttgatactacagtacaatttactgctgaaatactggccggtgatgttactgcaataatcaatgaaattgctctgattgatgaaaacgaaaatacggcagccaagatgcgacttttaacaccaaaaggtgttgacgacgaaagcggatttatttctaattggtccgtggaattttaagggggaataaggtatgaatgttgaagaacttgcaaaagaaagagataatttgttccctaaagagattgcaggatataaacgtccggatgcttttttggataaaagtaatgacttttttgacgaactgccgcaatttatacagaaggatccggtttattttaaaatcttgaactatattttttctgttttaatatcaaatgatgtcagggtaaaaagttgggtcgattcgctttcgtctgatatgaatgaacaggattttagagttgtaactgaacttgttaagggtgtgatgacacctgaaatgttaaaaaaattaaatggtatcgaggttggggctcaggttaataaaaacgcatttggcaaaatccaagtaaacggaaaaatttataatgcaatgattttacaagatgcgattgagctgattgaggggaacaatgttactctaagcattgacactgctactggtgctgttactcttaatgccaaagatactacatatgcgatcgtatcgacaactgcagatggtttagtacctaagcgtgatggtagtgcgaataaatatctttgtgctgacggtacgtggaagcaggtaactcagtatatacatcctgatagcgggataactgctggaacatataaaagcgttactgtaaatgcacaggggcacgttactgctggcagtaatccgactaccttggctggttatggtattactgacgctgcaccattagatcatggtattcacgtaccgagcggcggcagtgatggtacgtttttgcgtggcgatttgacgtggcaagctattagcggtttaggcggcatagtagcatattcgctaaatcaaaatggttatataaaattcggctgtgggttaattctacagtggggatattatgttgagtcacaaaatccaacagat

SEQ ID NO: 9999 - DNA, 4858 bp, Unknown
  gut microbiota DNA sequence
ttgtccaaaatatgcaacattgttatacccatcaagtatttcctttgcaaaaggagtatcggctgctattataggacaaccagttaatctggcttctaacaacggtaaacccaaagtttcaatatatgacggaaatatcaaaaccgacttagcatattgttcatatacacactcacgcgtcataacacccgcaaaaacaacaggcaactcatacttatcaacaaaagtctttaactcccctaccagcttgttttctgtaccattgaaggtaaagataaccttataatcatttattccctgattttttaatgctttacaggcttccagtatcaccctatgatttttatataatagcggcgttgccgggtaaaaaaacgtgcgtctgctttctgttgtatccgcccacttctttaattgcgttttatctaattcaggcatctctaccacaattttatctggatttacaccgcacttttctacacaggcatctttaatccatttggtttgcactatgaccttttgcgcatctttcacagcgtcaaatataaaactgcttattacattctggtatatccaaaaaattttattttcaaaaaatgaaaacttatattttgcaaaaggaagtccctgatgcaaatacactgtttgaggtattcctatacgtggcaacaaagtattttgcagcgaaaaaactgtatcaatttttaatttttttacaagctcaggcgccacaacataatcaaaccacagtctatgaaaccagctttttttaatccacggatagcgcagtatcgttatatcagcagtacttgccagttcaggtgtactaattacaaaataataatggttaccatcgctattggctgcgtaactgttataataatcctttaacacagataaagctccgccagaactagccgctacatcatagactaatacattcataaactattttctccaaaccatcttgttaattatacctgtatagctttggatcagttttaccaccttagtgcttacgttttcatctacataattaggcacatcaacgctcaaatcgccatctttgttcatgcctgcggccaggtcaactgcttgcagaacctgttcagcagttatgctgccaatagtaaagacacctttatcaagtgcctcggggcgttccgtacttgtacgtactgatactgcagggaatttgaaataagccgcttcttcaggaacagtaccactgtccgaaacaacgcaaaatgcattttgctgcaagtgattataatcacaaaaaccaaaaggctgcaaagttctgaccaagggattaaacttaaattttctaagctcaataaactttttgctgcgggggtgtgtactgtaaattacaggcacgttataagtttctgccatagtattcacggcattcataagagccataaaattttgctcattatcaatgttttcttctcgatgagccgataataaaatatattttcctttttcaagttttaaagtatctaacactttgctattattaatcttatcaatatttttacttagtacttcagccatcggcgagccaacaacataggtacgctctttaggtacggcagcggcattaagatatcttcttgcatgttctgtgtaacacaggttcacgtcacttgttacatctacaatacgacgaataacctcttccggcaggttctcatcaaaacatctgttaccggcttctagatggaaaattggtattttaaggcgtttagccgaaattacacacaagcaggaattagtatcaccaagtacgataatagcatccgggtttacttctgacatcagttcataagattttgcaataacattgcccatcgtctgccccaggttatcaccaacaacaccaaggtaataatcaggcgctcttaatcccagttcttcaaaaaacacttcgttaagtgtgtaatcataattttgacctgtatgtaccaaaatgttatcgaagtatttatcacatttcttgatgatctcagacatcttaatgatttccggcctggtaccaactatagtcataagttttaactttttcattttccgcctcttttattaaaaatagtgtgggtacagttctttgtgactaatgatccattcatgcatttcctgaaccataatttcataactcggtactataaaaggaaaatccttgcggttattaacaagggatttatcacagataaaatcaggattttcattaatttgcaatttaccgtctttaaagtacttgttgaacaatcccagtaactcatatttgctgatggtgtcattattaaccagattgtataatccacttaaattggtttccagcgctgcatccatggctttcgccagagttaatgtggttactccagtccagacggctttagtgtaaccgccaataggtgcgttttgtttcatgaaccagttaaagagaccaataccattttcgtacatatccggtcccacaatagagtttctaaaggtcaggtttctactgtcattcacttctcctaacgccttagttcgatcataataagtttcaccgtcaggaatacttgcttcattataagtaccccgtctccccgaaaatacgcagtcagtgctcatttgaataagtttggtttttatatttttaataattttagctaaaaagtgtggtaaataggcatttagtaaaatagcctgatccggattattttcagcaaattggtttaaaataccaacgcagttgataattgcatcaaatttaccatcttttataattctttccagtgttgcaaagtcagttacgtcacaggtgatattttttagaaaatcaaaaggttttcttgttaaagcagtcacatcatggcctgtctcatgcagatacaaggcaatggtgtgcccggccataccgctggctcccaatactaatatttgcatttttcattctcccttgccgccaactcatcttttatatattgtaaagttaaaagtttagcttttatttcttcaacatttaagagttcggtgttactactgttaaattcagttagcgtattgcgttctttattgcctttgctaaagtatttatcgtaattcagatctctgttatcagccggcacctggtaaaaatctcctctgtcaatggctctgctgcactcttcatttgtgagcaacgtttcgtacattttttcaccatgacggatgccgataattttaatttcgttatctgcacggaacagttcttttaccgccaacgccaggtcaccgattgtactggccggcgctttttgtaccatgatatcgccattatgcgcattctcaaaagcaaacattaccagttcaacggcttctttaagactcatgataaagcgtgtcattttaggttcagttacagttaacggtaaaccttgcttaatttgctcaataaaaagcggaataacgctgcctcggctgcacattacgttgccgtaacgagtgccacaaataagcgttttatcagggtcaacggttctggatttagctacaaaaactttttccatcatggctttactggtccccatagcattaatcgggtaggctgccttatctgtagataaacatattactttcttcacgccctcttcgatagcagctgttaagacattttcagttcccagcacattggtttttaccgcttctacaggaaaaaattcacaggacggtacctgttttaaagctgctgcatgaaagacatagtcaacaccatgcattgcattcttaaccgacagcaaatcccggacattaccaatataatatttaattttattgcttaattcaggatatttaacctgatattcatgacgcatatcatcttgctttttttcatctcgtgaaaaaatacgaatttcacaaatatctgttgccaaaaatcgtttaagtacagcgttaccaaaactacctgtacctcctgtaatcaatagtgttttgcttgtaaacatattttatgcgcctccactaatgagtcaagtatattgactgtattatttatatatctttcttttgtaaaattttttaaaaaatattcgcgtccgtttttaccatagctaacaagtttctctttttcatctatcatttttaccatggccattgccaacgctctataatcgccggcctcaactgatattccacattcagaatcttttataatttcttttgcactgccattaattgcggctagcaccggttttccagcagccatatatccttgcaatttagaagggatagtcattccaacattactatcaccttttaatgtcaataaacaaacatcagcaatttgataatatatcggcatatcctttaccggttttcttccataaaagacaaaatattcatctaatcctttatccgtcaccatttttttcaatgtacttaaaaagcttccatcaccgacgatatgtactttaaatattcgttgatcttttattgaagcaaccgctttaacgacacactctaaatcctgaatcaaaccgacattacctaaaaacacaaaattgaatccttcatgtaacatatttgaataatcacttgaatattcatctgttgcaaattgtggtatatataccatacgtgttttatcaataaaatgtactcttttaaaataatcttgaaatgctccggactgaacgccaataatatcagcacttctataaatatattttgacactttatctataattttataaatgatactttcttcttttacacctaatatttttatagaatctggccacaagtcgcaacaataaagatacatctttttattattttttagtttgtatattataccaggtattgctattaacactggagataa

SEQ ID NO: 10000 - DNA, 9047 bp, Unknown
  gut microbiota DNA sequence
tgcccttcagcgtagtcttatcggctacagtaagggttgacaggttatcggtcaggttcatagtcgtaccggtgatcttcaaagaacctgcactatcagttcctgctttaacttcagtatttgattttaaagtcagagtactatctgctgtaccgtgttttacaacctctacatcgccgttaaatataatatctgcagctttggcatcaaaggtaacattactgtcgtaagtccagacagaatattcgtgagtcaggttacctgcatcaccattaccgccagcagcggtcactgtaatgccgccagcatcactgacgaactccaggtcattgttattgccttctatgccctgagcaccctgccaagcaccagctgcagcggtcgctgtaatattaatagcgtctgtcgtgtgtactctgacagcagtattgtcaaacgccataccctgagcaaaattctttgcttcacctttatcggcagttgctgcaatggtcaatttaccagcaacatcaacaagcatggaaccgccatttactgtaaatgctgttgccgtagaggtagttgccgtagcatcagccttgtaatcaaacgccggctctgaacctgaagcaggtgtttgtaaatcaacatcacctgttgctgcagcattcactgtaaagttgcctgtaacagcataaatattattggaatctgtagcttcaacagcgacagcgttattggtaaccgctgcaccttttgcttctgcgctgatagccaggccagcgtcagaaaccacgttcaaagtgccgtttgtagtaacaaggccagctgcaattgctttctcgccgttgcctgtttgcgcaatcgttcccgtcggcgtgatgccgctgccacctgcgccgccgttagtagttgcattgacagcgccattttgtccaacagcagttgttcctgcgctacccgctgtaccggtgttatttaaattagctatgccgcctgctgcctcataagcttcactgctctcgaaactgcctacgcctttaccggctatagcagtagctttaatagcagtcgtttgcagattgacctgcgattgcgtaaaggtcaaagctgtggaagttgcactgccgccaacttgacttataccagcattacctgcgttgccaccagtaccaccggtgccgccctggcctgcattgccgcctgtgcctacagtaccgttagcagcagcggcaccttcaccgccctgaacaccttgcgaaccctgaacagcaatgtttccatttaataaaataccgccctggccgccagcaccaccagcgccgccatgtccacctttaccagcgtcgccatagtcgccgccgtcaccgccaacgcctccgttgccaccaaaaccgccattgccacctgcgccgccgatacctgctttagcgccgtcgccaccggttgcagtaactgcaatgccattgcctgctacagcaagattgataatactgtcagtcccggcaaaccccagcgcagttgcattaccgccaacaccgccattaccaccgtggccaccagttccgccagttccaccaacgccgccgataccaccaacaccgccgataccgccattgccgcctattccggccgcaccaccctggccgccgttaccaccgttaccaccgacagtaccttgtacatcattatcgccagcacctgtactatgatgggcattactgccaccagcaccctgagcaccttgaccgccctgagcaccgtcgccgccatcaccgccatcgccaccgttcccgccgataccaccggttccgcctacgccgccgataccaccggcgccacctgcaccaccagctccgccattaccagccgcagcttcaacaacaagcccgcctaagctgatcgtagtcgccgtgccgctgcccgcaattttcagtcctgtcgcttcagcgttactaccgctgccgccattactaccgttaccaccaatgccgcctgtaaggccaacagctcccacagtgccagcagtaccgccagcaccagccaggccatcaccgccagcaccgcctatagtaccattagcgccgggagtactaggagttgtgcccgaagtagtactgtcagctccatcattgccttgcgcgccattacctgctttagcaggaacagttgttattgctgccgcagtaccgccagcgccgccgtaaccgccgtgaccgccgtcactgcctgtagcagtcacagtcaacacgccgccggtgacagtattattgctgcctgtaatgtcaacaccggtagctatggcaagtccgccgttgccgccattagcaccggcgccgccatttaagtttttatcacttgccccatcgacacccgctttaccttcatgggtatatttgccggaagtgatttcctgggaataagtattgccgccaatggctttaattgcaatatcaccaaaggtaatattggcgtttaagatattagtagaataaatacctacagcagaaccgataccgccatttttgcctgcggtactttcttcaactggcaatccagccgcagcgcctttgccgtcagcaccgataataccttctacagtcatacttttaagagttatagttttaccgcccatatcgtccttggcacgaaaggccagatcagcaaaattctcatggtattgggcggcgtacatatcttcaccggttttttgctctctcgcaatcgcaatagcacgatcactatcagctgtatagctggaatattgtctcggatgatcctggctgccgccatcggctgcccacacctgtcctggcacagccacccacgccgtccccattacagccagcgttactgctgctgccagctgttttttattacttgtttttaaatacactaaaatcaactcctcaaaatttgttgaacaatatatttcttcggctgacgccgcaggaaccaaagcttttacctgacttcaagaggctgttttaaaataaatattttaaaacaaaaaccgtatttaacttgttttagattgtattttttaactattttatataattctttagttattttatcacagatgtcccccccgacaagacacgagaaggttatttttaaatttttttctgcgccgcgttattacgctccgcggcacttgcgctgcggcgcaagtgcgtgtgcgtacttcacccgcagccaggcgaaaacatcgaaaaaaaatagcctgccaaagcagactattttttgatcattatggacacttcaaattccagcacctgctgcaaacgtgtcagtacggctacagtggtgctgacctcgccgcgttcgatacagccatagtgcttggccgataaacctactgcttcagcgatctgttcctgggtcagctttttatttagccgcgctgttttcagctgccggcctatatatttttgcatgctatccctcccgccattattttaagcagtaaaggcataaaattaacacctgattgtacagggtgttaattttcgtcgaaaaagtttagactgtttgttgttgcgcgcgacgttttacagtatagccgggtatcataaaattatagagagaactgatcgttataaaaaatttacctgaacaggcagagagattgaaagcattgataaccgccgcccaggctggtgataaagcagcactgctgcagttatgcacggattttaagccgcttttaaaaagcgaggcccgccgtgagatgttttacaggtcgctgggaaaagacgcagaaggtatcgccgttctggcctttatcgagctggttttgcagtataagggcgctgattttgaaaactggcccggactggcacgctgtaaggtgcattttgctgtttttgacgcgatgcagaagcagggccgaatttgggaaaacgaagcccagacagatacggacagcgaagccggaatcgccctgctggagacaggctgtgcagcaggtgagcgtctggacgagctggcacgttttttactttcactggaactgcaggaagcgctgcggcagttaagtgcagaacagaggaaaatactgacgctgctgtttttagatgacctgaagccgaccgaggtggcaggacgtcttggctgcactgtacgcaacgttactaagcaccggctaaaagcacttgataaaatgcggcagcttttggcacattaaggatcaggcaaataaaaaaacagacattcacgaaacgtgaatgtctgtttttttattgatacaactgcaaattgctcaattattgcggtaatgctattgatatttcagccgctacttttcaataactattaagtaagatgcgcatttttacttacctatatggtaatgctgtttttatccattatggtagaatttatcttgattaaaatacaaaaagaccctttcagctgaactgaaagggtcttttgatttacaatctgtaattggataccgattatctgcgttcgcgaatacgagcagctttaccggtaaggctgcgcagatagtagagttttgctctgcgaacgataccacgacgggaaacttcgattttctccaaacgtgggctgtggatcgggaatgttctttcaacgcctacgccgtaagaaatacgacgaacggtgaacatttcacgaacgccggcgccgctgcgtgcaattactacaccttcgtacatctgtacgcgttcacgagtaccttcgactacttttacataaacttttacggtgtcgcctgcacggaagtcagggatgtcggaacgaagctgttcttgttccaatacttcaataatattcataatttcctcctcgaatcatagacgttcatgtgcgaacacaccacagcggaccgtccgttttacacaaatgacattatatcatactgttcaattagttgcaattattttttaagcattttgacagttatttttcccaccaggcctcaccggccagccggtctaaaataatcgcagccgcagagcgcacacacaggtgattatagtcgcagggaccataaacaggttcaagtacataatcaaaactgttcattgtttcctgttccataccaaagccggtgccaaaaagcagcagcagaggtttatcaccgctgtgcagcaactttcgtacaaagccataggtcactgtattaggataggtgcgggcatcggtagtaatcgtaaccggcgcctgcccctctatttcagtaaccgcggcaatagccgactcaatgctggacgtataggttacacgttccagcgcgttgctgcggtcaggattataggttttgccgtaaccatgctgccaatagtcagttatccttttgatgatttcagactgtacctccagcggatggatcaaaaaatattttttgacatcataggtgcgagcggtacgcgaaatatcgtggatatcgaagttagtgacggcagtagcaatgacctgcatatttttattgtaaataggataatgcaccagccccagataaaggttagccattattatcacctgcgagttcctgtttgatttcgttaagcagcaacacatcctctttgccaagctctgcaagcagatcaggcctgtgcagataagtcgctttaagggcttctttacggcgccagcgattgatcagagcgtgattgccgttacgcagcacttccggtacttccagtccttcaaattccaccggccgggtgtactgaggatattccagcagtcccgtactgaaagagtcttcaacggcactggccatttttccaagcacgcccggtataaagcgcgctacagcgtccataactatcagtgccggcagttcgccgccggtaagtacatagtcgccaatggaaagtttttcatcgacccagttgaagatccgttcatcgaagccttcataatgaccgcagaccagaatgagatcctggccgctgcgggcatattcttcaacgatatcctgctttaatgtgcgcccgcccgggcacatggcaataacccgcgctgcaggcagctgctgtttggccatgcggatagccgctaccatcggctctggcttcaaaaccatgccggcaccgccgccaaagggcgtatcgtccactgtacggtgcctgtcagttgcaaaatcgcgcggattgatgcagctgacttctacaagtcccgcatcggcggcgcgtttgataatgctgtgaccggccgcttgttcaatttgttcaggaaataaggtaataaagagaaatctcacggtgcatctgtccattcaggtaattcgaccacgatcttacggtctgtaatattgatttccttaacgtgctttttgagggccgggacgaggatatccttgccttccggtacagcaataacgtaaacgtcgttgctgccggtgctgagcacgtctttcaatgtgccgagctgtgttcctgccgtatcgaatacgggcagtccgagcaggtcggctacataatattcgccttctccaagctgaggcagatcttcactgttgattaaaacctttttgccgcgcagcagttcggcatcgttcattgtttccacacccctgcatttcatcagtaccatacgtttatggaaccgggcagaggtgatctgaagcgaacggccgtcttcgagcagcaaagaggaaagctctaaaaattgttcaggatgatctgtctgcggcagaatacgaatatcgccccgcacaccgtgcggagcgataatagtgccaataactacttgtttttccatatcattcgcggaaagcaatgatcttgccatcctcagtgaggatctcggcgcccatcagagcgtcgatatcagtgcctatggtgatctcgacagtacgttcaagtgtaccgtgaccgatctccgcaccgatctccaaggcttcagcgcgtttaagtttatcttcggcttctgctttagcggcattgatcttgtttctttccatttcaatctgctcacgcagtgaaggaagtacgctcaggtcgctggcggcctgagaaagagcttttttggcttggaattcgaagtgctcgatatccagattaatcgtttttatggtgttttggacatctccaataattttcaacttgagatcttctgttacttttgcttttattgcaaccggaacacgtacaaacattttatccatatcgtttaccatccttatacgtcttagacaatctctacgacaacttttacattctcacgggttgcaacagctttcatgacagttctgattgctttagcaatgcggccctgttttccaataactttacccatatcttcaggagcaacatggaggcgaagcaccgttgatgttccggtggtttcctcctccacgactactgcagacggattactcactagagacttggccatgacttctaccaattctttcatgcaaatcacgcctcatttcttattttgctttagattcagcatattttttcatgatgccgtctttgctgaaaaggtttttaacggtatcagtaggttgtgcacctttagccatccaggaaagagctttctcttcgtcgatctttacggtagcgggttgtacagtggaatcatagaaaccgatgctttcgatgatgcggccgtcacgcggagagcgggagtcagcaacaacgatacggtaaaaaggagcttttttagagcccatacgttttaaacggattttaactgccatgtctatttcacctccttaaaccagatgttgatttaaatttatttgttcataaaaggcattttgaaaccgccttttgaagcaaacttagccataccctgcatctttttcatcatctttttgctttcttcaaagtttttgagaagcttgttgacatcctgcacgcgcataccgcagcctgcggcgatacgtttacggcggctgccgttgatgatatcgggatgacggcgttctttcggggtcatggaacggatgatggcttcaacgcggtcgaattctttttcgtcaacgttggcttctttcagcttttggctgatgccgctcataccggggataagccccaaaatagtttccagcgagcccatttttttgacctgctgcatttgttccaggaactgctcgagcgtgaattcgtctttgcgcagtttcttttccatttccaaagctttggcaaggtcggtagtggactggatcttttcgatcagagacaggatatcgcccatgcccaggatacgggatgccatacggtcgggatggaaaggttccaaagcgtcaagcttttcacccataccgacaaatttgaccgggcgtccggtaactgcttttactgacaatacagcaccgcctctggcgtcgccgtcgagcttggtaacgataagtccgtctatgcccagctcgccgttgaagctttcggctacagtgactgcgtcctggcctgtcatcgcatcgacaaccagcaatatttcatgcggattgacggcagctttgatattgcgcagttcgtccatcagttcttcgttgatatgtaagcggcccgcggtatcgatgattaccgtgtcgcaagccagtgagaatgctttatccattgccttgcgcgctatctcgaccggagatacctgatcgccaagagcaaagacaggcagtgagagctgttcgcccagaacctgtaattgtttgatagccgcaggacggtaaacgtcgcccgctacaagcaacggctttttgccttttttccgcagcaggctgccaagcttgccggcggtagtagttttaccagcgccctgcagacctaccagcataatgactgtaggcggtttgtccgctacggtgagcttactttgtgtgccgcccaaaagctgggtcagttcgtcgttgacgatcttgatgatctgctgaccgggagtcaggctttgctgaactgtttcgcccagcgcgcgttctttgatattggcaacaaaatctttaacgactttaaagttgacgtcggcttcaagcagagccatccgcacttcgcgcagaggcgctttaagatcgtcttctgttattttgccgctgccgcggaacatttttatcgcattttgcagtctttcagataaattttcaaaag

SEQ ID NO: 10001 - DNA, 219 bp, Unknown
  gut microbiota DNA sequence
cgtcaaattcatggaacgctcccagtttaaaataatagctgctttccgggctaatcttccgtccaacttcaaaaccgatacggccaatagcactggttaaaccatctacatcgatcttggttcctcgttcggtcgtaaaatcaacactgttcattctgcctaaagtaatttgtgcctgcggtgtaaagaaccagcctttttcgtaattcttctgcctgc

SEQ ID NO: 10002 - DNA, 1986 bp, Unknown
  gut microbiota DNA sequence
aatgttttcagcgacgaaaggagagttacccatatagaactggcgcagtttggttaagcgcatcactgctttggaaacgaatgtgatattattactcaactgtccgatttgcgtatctttcaatgtgatacggctgctttttttgatacttttctgctgcggatcgctgttgatgcaatctttgataaggtcggagaaatcttcgcgcgggtcgtagtcaacgaatgttttttggtagtgcatacgcattttttgcttctgctcgtcactcatattcgctgaaatgcctttgggaccgaacaatctctcgtttactttctccccatgcgagcctaatgccagaacttccagttctgtgagttgtccgatagcgtccggcactcttccgctggcgccaaagccttctaaggaaagccctgttacacgaccattgctgttgagcgatacaccgggttgggccccccacatatccagttccttattgaaattccagttggcgcccggttgagtaccaaagccttgttggctccagtttttgccgttcagcgcatcccagatttctttcagtgcaaggtaatccttgatgtattcggcggtgcgggacagtttaatggggacaatggcgtcgtcagtgagtgcattgtcttttacggtgaactgttcgccttttacggcttgcgtttccagtgtctttaccagatttccgtttttagaatatgtagtgtaagaagtcacctgatagtttccggcgggcaaccatacggcagagtcgcactttgcagtggcgatgtccatatacttgtcattatcgttgtcggggttttggtgctctttggactcttccttgtaagtcactttgaagcctttaatcgttgtcggttttttggtgaacaaattgattacggttatgtctgccagctttatttggctgaacaggtattctcccggtgcgcgggtgctaagtccgtctttaatcagcttaaacttaaccataccgcgtgttacagtatttacggtcaatgctttttcttgcaggccgtcttgaactacggtaaattcatcatcttcttctaccgaacctgccagcaattcttcatcgagtttgtcgtacaggtagtatcctactattttgtaagtaccggtcagtagttgcagtttatcactgcgcaggccgaactctgcattctctgcgttatatgaattgagaaccaatgtttgcgacagtgttacaccgtctcgcagcatcactacgtttatcttttttgcatccgacagcagttccagtttatcggtggcgcgggtagccgcaccttctcctgtgcttttgtagagtttgaactgcacatagccgtattgacctgtttgcagtgcatcttcttcatcggaacatcccgttaccgccaccatcgccagcaagctgacgatgaggggtaaaaagaatatagagcgtatctttaatttatgtagattcatttaatctattgttcgttattctattgaaagttatttttattgagcaggtttgttaaccactaataaatatttctcatcagtatttgttgttatgagtaaagctatggaatagttaatatatgtaccctgtccgtagtatacgtatatagtgccactatctatagatacatcactagcttcagtgtcgttaagattaaaatcagaagatgtttccgtcaattcttctgcatcgaaattataacattgcaatttttttatagtattttctgaggatgcaaatttaatcatataaagtataggagaagtaggcgttacctcccaaatgttattgccatctacaccatattgagtggaagcccagttgctgttactatactgtgtacaattaaagctgtttagcgcgttgtctgttacagtaaatacatcagcagtaaattgaaccattaaaattttcttgtttaccccatttttatctttgaagacaatataaatgggattttcaggtacatcaat

SEQ ID NO: 10003 - DNA, 5839 bp, Unknown
  gut microbiota DNA sequence
ataccgtcactctctactttagtatctcgataattatgcagatcgcccaaacgcttacgtaaagtatcgccagtattacgccaaagcgcataattaccatccccactttctaacaaaactttggtatcattgttgacctgtttggcaagcttcgttaaataccaatcatttttggttccctgcaagccatttgtcaacgtaacattttcaccattttcaagcgtcggtgtcacgtcccacaagccgccggcattaaagtttttacctacaaaatttgcactttggctggcatcggttattaaaagtaaattcttagcatcggtaaccgtatgcccattgaccagactggcatctttgacctgtatataagtagttccagctgctgcgttagtgatattcaccttatcgccggtttcagctgcaaggtcggtatccattataaagttactgccggtgccgctgtaatcagtaatagctaattctgttgcagctgtatcgtcaaaagtcatatctactgtcgcgccattgtttaccataagactagcaactgaattgccgaaatcaaattttgatactcgccaaagcgcactattatccaagttcacgacagcattgccactattttgcgaaaaaataaaaccttctaaaacagaatctgctctatctaaagtcaggttcagattaccattgtctacagtaatgccgccttttatgaccacctgcttgccgccggactgattgatattgatcataccattatcttttataccaatggccttattatgctcataagtatccttggtattatccttattgataaaaacatcattttcaaagtttacatttgcaccatcttttgcaacaactgcattgcctgcagttcctgttgcaaaagatatatctgccacaccttttatctcagccgatgaacctgcccgctgaacccacaacccacctttggaatttgtacctgacacatttattttcaatgaatcctccatttcaatttttccgcccgaagaaaccataataccgatattagacccggtatcgccgctcactttgacagacaaagccccttcaaacaaggcactgctgttttgctggatcagtatcccattattcacagtctgcatatttccgccaactgtttcgatagatactctatccttagcatggaacagactattatttccagtcgtatatattccaaaaaccttattatgagttgcgctggcataaatatccaccgcatggtcaaaattcacaacgccggcagctacacaggttattgcagcatgagtagcatttgcatctaagtccgtactcgtacaggtcagtttagtatagttatttttaaaatttatcgtactgccagtattagctccgttagccaatatcccctctaccttatctccatctgctacagatcctgaaaaaattatatcgttaccagtaaaatctaaggtagcacccacataagcgtaggcaatagcattgccttggctagatggtttaccgctgccaagtatattcagggttccctgcgcattgattgtaacatttttgttttgatcaatagtaatagccggctgcttatccatattctgattgatcgtatgattgtcagtaaaatttaacgtggtaccatcagctacatcctgtccatccactatagcggcctctgccatcgggagcacggatgtcccccccagatatacacacgatattgtcagcaacgatatcattacctttttgcttaaaactttcttattcatcttctttcacttccctttcatcttttttctttaggattaggcctttatttataacaggaataactgcagtaatactgccgttttcttcctaccaaagcagtatagacatgatatgttttattgcagccaaattcacggccgcagatcgggcaggtaacagttaatcctctaaatactgttttattatctttgtatgcagcatcttcataaatctcgctatacatctgaagcagctcctttaaaattactcgctgcagcgtacgagcttatatcttttgactttttctttctttttacccaactcatcgtaattttcaggatcaacgagttcatccagtgtgcagtcaaagatcctttttagctttaataatgcctttaaactcagcatcactctgccattttcggcgttgcttaaatgtgtttgcgatatacccagctgctcggccaacttcgtctgatgtatacgccgcttgatccttctgatttttattgcttcaccaatttttaataaatccaagccttccattttccacctcttccactatatatatttcttcttttgcaaaagttattttgctgttttctgcaattttttcaattatttaatattttcttttatcatacaaatattaccatattcgtcccccccgcaagacatttttgttcgcttttttaaaaaatttgttcaatggtcttgcaactggtaattttcaggtgtataatacaaaaacaccggatagactatctatccggtgttttttataatttaattgattccctttattgcaattttgcttttaatgtttcgatttcacggctttgcgcttctaatttcatcaataacagctggattttttcttcctgagcttttaaggaagtatcgacttcacggcgtgtgtaaataatatcacgttttggtacttcgccttttttagtgcggtctaaagcaaagtttacaccaatattacccatttttttaccgccctgggttatacccatccccagcgaaaacattacttcctgatttggtgcataaaatccgccgacggccaaagcgtttttgccatcatatgaccccattgccatcgccagttcacctttgttaccatcctggaagcgtgggtgcagacctgccattgccgctgataatgcgccaacgctgtctatttcttctccaaaacggctgatatcgttactgagtccctggatatcctgttttacctgatataactggctgccgtttacagcgtctgttgaggtcgcatcgacacgtcctggagcaacattactgatcgttttgttattggcattgataccgttgctgtcgatgtaggtttcgttgccgaccttatattctttggcttcgatgctgtttaagcttatatcatcttttaaagatactttataatcgttgttgcccagtttatctatctggatattttcaccggcgcttaaatctacactgccaacagttccaagagtatccatgactgattttaactgttcttcagttgcagcacgaccagttgttgcaaaatcagcgctgttcaaagtcgtattggtaagacctgttatttcaccgattttattgccgttatcagtgctcccttctatagtgacattaccaacttgtactttgtcttctaaacttactttgtattttacaggatcaccgtcctgagcaacattttctaccttcacaccgctgttgctgtcgccttcaacagtaactttattggctgcgatctggtcattgatatcaccaaatttgacctccagattatcaaccctgttattcaggttagtgatagaggtattattactgatgtcaagagtttctccaagcttagcgttaggcgcaatagttattttagctccttctgcagtagtttcaacgctgacatcgattttatctttggctccgataaatttgatatctgttttgttttcgccgccaagtctgatatctgttttagtaccaatttcgttacttacagtaaatccgccctgcagctttgtgatattttcgttgttagttgtctggtctgtattaagttcatctaccagattttttacacttttaagctgcgctacattgactgcgtcagtatcttctgtacctgccgccaaattggtgatctggcgtgtattagcggcatggaacttaccgttctcatctgtatatgctgccgaacctacgcttattgcgccatcactgctgcgccatgctgaaagggcattatttttttcttctaaagcatttaaaaaatccttattttggcttaaccatgcatttttttgtttagtagcttctaacatacgagttgacagatcagcttttttggccaaggcagtctcataagctttttgtttttccgcatccgtactgccttttgtattgcgcaggatatcgtcgttcttttgcgcttcatcataaaggctgtaatagtttttcataacctctgtatattcgttatttttttcagaccatttattattgaattgatttacaacatcagctttaccaatagatgcggcaagctccatctctgttgcaggctgaccagcagcagtcgctacaaaaccaattttcccagcagccgtatcggcaactgcatcagggccaagcgcaacaccgccgtttgccaaaaccgatgcactatcgcccagcgcgctgccacgccatgctacataagtcctgtcacccagggcaacaccataagcttctgcagaagcgctgtcccccaccgcaacgccgcctctggcaaacgcattattgccaatagctgtgccgctgtaggaagaaaataattccccaggcagatttttgtaaaaatcaccggcagttgcgttatagcctatggcaacgccgttagtactttgcgtattattaccaacagaagtgcctttgttcgttgcatatgcattaacaccgacagcagccgagttactagtggcataactggcagcgcccaaactcgtagagctgataacagacgttgcattataaccgaccgcagtactgtatccatgcgacgcaaatgcacccatacccgctgccaaagcgccataattatttttatctaaggcgttaggccctgcgccttctccattctcattattattttgagacttttggctggccttcttataatcaataattccttttttggacaaatcttcaagagtaggttctgtacctacgccaaaataatatctactgccctgattagttacccctgtagcatctgctgcaaaactattactgacatatacagactgcatcaaagctaaggcaatgcaaaggctcaattttttatttatttttttcatgaaaaatcagcttccttccaacaatggaagtatttatcttcagcctttctgtaaaactttcattatttctatggctttagacaaatcttccagtctaaagttattttcttcgactatagtttttattttttggcattcgtttttttctgcttcgttttcagagagtgttttttcttcaaaaaaatattctatcggacattcaaacaattcttttatttttattaagtgcaacaaagtcacaccaactctgccattttcgatattgcttaaatgtgtttgcgatatacacagttttttagccagcaccttttgtgatattttattttcaatgcgcagaagctttattctgtgtccaattttttgaagctctttttccattatcaagcacctccgaaaacaaatagtaacaaacatttttgccggcaaaattattttcttgggtttggccgtttattaaaacaagaataactgcaataatattgcctttttctggcaagcaaagccgtataaacatgatatgttttgttacagctgaattcacggccacaaatagggcatttcatcattaatgattcaatgcctgatctacgtgatgtcatttcactgtcatggcagaattttgaattcatagaatcgcattccttctttatttttataatttttatgaataaatttcactgcagtaaaaggaaagtagactttctagggttactttaactccaaaaaaa

SEQ ID NO: 10004 - DNA, 2280 bp, Unknown
  gut microbiota DNA sequence
agctttccatgcctcccacctatcctgtacgtaatgtatcaaaacccaatgtcaggttacagtaaagctccatggggtctttctgtccagtcgcgggtaacctgcatcttcacaggtatttcaatttcaccgggtccctcgttgagacagtgcccaaatcgttacacctttcgtgcgggtcggaacttacccgacaaggaatttcgctaccttaggaccgttatagttacggccgccgttcaccggggcttcagtcgaatgctttggactaatccgaacatccttccttaaccttccggcactgggcaggtgtcagcacctatacgtcagctttcgctttagcaggcacctgtgtttatggtaaacagtcgcttgggcctcttctctgcgaccactctatgctccatccgcatgggacttcacaacagtggctacccttatcccgaagttacgggtacattttgccgagttccttaacgagggttctcccgcgcaccttaggattctctccccgcatacctgtgtcggtttacggtacgggcggtagctctctcactagaagcttttctcgacagtgtggggtcaacaacttcgctcgcatctctgctcactccgcatcacgcctcaggctttcagtgcacggatttgcctatgcaccaccctacacgcttacacatgctcttccattcgcatgcttgcctgcccttctgtgtcactccattgctcaaacaattactaccggtactggaatatcaaccagttgtccatctcctacgctctctgcctcggattaggtcccgacttaccctgagacgacgatcgttgctcaggaatccttatgctttcggtggaaaggattctcacctttcttttcgctactcataccaacattctcacttcccacaagtccaccgaaccttccagttcgacttctaccctatgggaacgctcccctaccccgtatactttacgtatacagccacagcttcggtttcgtactttagccccgggaatcttcggcgcagggtctctcgaccagtgagctattacgcactctttaaatggtggctgcttctgagccaacatcctggttgtttatgaaaccccacatccttttccacttagtacgacattggggaccttagctggtggtctgggctgtttcccttttgaccacggatcttatcactcgtagtctgactccaaggctctacagtatatccattcggagtttgacagggttcggtaacctttacggcccctagcccgatcagtgctctaccgcctatacttactacctcaggctagccctaaagctatttcggggagaaccagctatctccgcgttcgattggaatttcacccctacccacatctcatccgaaagcttttcaacgctcaccggttcggtcctccacgcaattttacctgcgcttcaacctggacatgggtagatcactgcggtttcgggtctacctacactaactagcgccctcttaagactcgctttcgctgcggctccgtgtcttccacttaacctcgctagtgcagataactcgttggttcattcttcaataggcacgccgtcgctttcgcttcgactgcttgtagacatacggtttcaggtactatttcactcccctcccggggttcttttcacctttccctcacggtactatgcgctatcggtcgccaagtagtttttagccttggagggtggtcccccctgcttcccacaaaattcctcgtgcttcgtggtactctggatctcggcctctctgctctgcctttcgtctacggggcttttaccctctctcgcttacctttccaggtaattcaactaggcctgacttcgattctgccggtcctcaaccccgaaaagccggagcttctcggtttgggctctgccctcttcgctcgccgctactgtgggcatctcgtttgatttctcttcctccgggtacttagatgtttcagttccccaggttccctcccttgcgggtgaccatccatgacgatggccgggtttccccattcggatatccacggatcaatacttgcttgcagttccccgtggcttttcgcagcttaccgcgtccttcttcggctcttggcgcctaggcatccaccgtatgcccttagtagcttgacttttcagctgctaagaaacttacgttcctagacttttttctcgttaactctcatcaaatatagcattttgattagaggtttgtgtctattactactcactcatcattttcgtaataaactgtttgtctc

SEQ ID NO: 10005 - DNA, 13180 bp, Unknown
  gut microbiota DNA sequence
caatagcataaggtaaaataatactgacatgcggccagctgcgggcagccaatccgccaaccatccacattaaagctccatgtacacggtcactataaaaaatcatcaatccagaaataccagcgcttaaaaacgcagatacggcaacaccagctaaaataatccgtacaggcttgataccatttttccaggccaaaatataaatacaaacagccgcaagcatcgcaccaataaatgcagccggtgtaatcaggtattccagggtaggaaataaaatcataatcgtaacaccagccaaaccagcaccactggaaataccaataatatgcggatcagccagaggatttcgcattaccgcctgcaatacggcacctgcaattgcaagatttacacccactaacgcaccaactattgtacgcggcatcctgatattccagataatctgactttgcggttctaatgttggattagataaaatattaatgatctgcgctaaactaatatcggccgaaccttttgttaagcttaaaaaagcacctaaaaatgccagcatggcaaaagcagccatgacgataagccgccaggctgtacgtgaaatgccaaatttttcaattctttccaaagtatccgcctgattatttgtcatccttaaaaacctctggatatacagttttagccatgtattttacagcatccggatagtgcaaaccaggattgagcaaaaataatctttcaggcagtaaatatactttgttattccgtactgcttctaaagatgcccaggccggattacttttcacatcagcacgcagcctgttttctatctcttcactgtcgcccataaaagtaataaaaataatttccggattcttttctactaaagcttccatactatacggagtcttctccggttttcctttaataggcgttgcccctacagcaacattttgaaatcccagcattttggcaacgcagccggcaatgctgttttccagctcaactgtcacattagaaggagttgcatgcataataacaatacgttttccatccttcggtaacttttccgtcacagctttaacctgctgatccagtttcgcagcagcagcttcacctttttctggtacaccatagatttttcccattaaaataagtttatcttttacctcatcatatgtttttggattgattgcaataacaggtattttattagactccaaaagcggaagaaatttctcatgttgatttttattagcaataaccagatcaggctttaagccgataagactctccatattaatattataaacaaaaccgacctcaggtacatttttcatggcttccggcatttctcctatttttgacgacgcacgtccaacgatcttaccgcctacagcatcaatcatattcaggtatgaagttgccaagcttacaactcgttcaggtttttcaggcagtactacagtacgccctgtatcgtcagtaatagttaaaaatgctttatcatcactggcaggtttagtattttcagcgtttggaccacaaccgctaaaaacagtcagacacaatgcagcagcaagcactgccctaaaaattttcattattgctctctccctgcaaaattaagaaagcctcccaacgtcagttatcgtcagaggcactcgtaacgtcttattgattaccgtttcataatagcatagattcctaccagcgtcaaggaagttcgcttgttctgggcctctaactttgctataatgcatagaggaaacggaggtattttaagtaatggaaattaatgagatgattgcccgcattaacattttagcccggaaaaaacgcagtgagggtttgacagaagaagaacagtgcgaacaaaaagcattatataaagaatatttaggctttatccgcggacaggtcaagcaacagctcgataaaatagaaatagtcgatgaactgccgtcacagcactgatatggagtttaatttttcatatactgttttttacgaagacgaatatctgctgatcgtcaataaaccagccggaatgctggtccatccgacagtaaaggaagatggcagtactctgtataactatgttgcacattactataaacaacagggattattacacaatatccatcctgtctcacgtttagaccgcaatacttcaggtcttgtcatttttgcaaaagaaccacgaatccagtttctgctttcccagcaggaggtcataaaaaaatatttaggaatcgttacaggaacattaccagctgacaggggcataatagaagctccaatttccagaaaggaaggcagcattattgagcgctgtgtttctccaaacggaaaatatgcccgtactgattataaacttatcagccgccggaaacatctcagtttgctggaactgcagctgcacactggccgtacccaccagatacgcgtacatatggcacatatcggctgcccgctttataatgataacctttacggaacaccaggaccgcaaagccgccacgctctgcatgcttattacctgggctttaaccatcctgcaaccggtatttttttagaaatatcctgcgccttacccaacgatcttttcaaaattatatactattaaagtatagagtatgctataattaattacaacaaaagacaaaaaggaggctgtcctatgccactagtaacatctgctgaaatgttcaaaaaagcttatgaaggccattatgctgtaggtgctttcaacgtcaacaacatggaaataattcaaggtatcgtcgaagctgcacgtgaagaaaaatcacctttgattttacaggtttcggccggtgcccgcaaatatgctaaccacatttatctgatgaaactggttgaagccgctatcgaagatactggtttgcccatttgcctgcatcttgaccatggtgaagattttgaaatctgcaaagcatgcgtagacggaggttttacctctgttatgatcgatggttccaaacatccatttgaagaaaatattgaacttactaaacgcgttgtagagtatgctcataataaaggcgttgtcgttgaagccgagctgggacgcttagcaggcgtcgaagatgcggttaaagtaaacacaaaggacgctacatatacagatcccgatcaagctgtagaatttgttgaacgtactggcgttgactctttagcaatagcaataggaaccagccacggtgcctataaatttaaaggtaatcctgaacttgattttgcccggttggaaaaaatcactaaattactgccaggcttccctctggttctgcatggcgcctctaccgttatcccctcctttgttgaagagtgcaataaatacggcggtaaacttgacggcgcacaaggtgttcctgaagatatgctcttgaaagccggtacttttggtgtctgcaagatcaatattgataccgatttgcgtttggctatgactgcctctattcgcaaacatcttgctactaatccagctgatttcgatccgcgtcaatatttaaaaccagcacgcgaagcaatcaaacaaatggtagctcacaagatgcgtgatgttctcaacagttctaacagactgtaaatatagccgttatctacccctgcagaaaatctgcaggggtttcttttttagtaaaacaaaatcccgctcttttttagagcgggattttatctattgttaatcgatcattggaacagtatttgcagcatgctgcataatattgactgtataatccttgagtccgcgttcagccagttgtttttgggccagtgaccaggcttcttctaaagtttctaccggtatctgaccagtctttttcactgtatcaaagttttcctttctcgttacgatataaaccgtgctgttttgacataacaggaacaaacgatatgcaataaaaaaaggaatcgtaaatttattccttacagctttttccatctcaattacatcattgaaatgaaagctctgcatatattcaggcggatcattgatttcacgagcttccaaaagggaaataacgataccgccaggtttaagtgccatttctgccgtatcataggttttagagccctgataaagatttatatccttcggaaatcctcctggagaagcaataactacatcagcctgtcccttaaccttaactccctggatcttcataacctctttcgtgccttccagccaagcatcataccaatgaccggcaacaatacgagcgaaatcaccattcgtatccattacagaattcacaagaaaacaaggatttaccaaagctgctgcttcgcacatatcatcgttcaaccgattatgatcgattaaagtcgtccttgtttcctgactgataccggaacctacctcatcagccaacgccaaagcatgatttttctgtattgtttcatcaccagcaactccaggaagtatactctttcgtccaccgccaaaacctgccatcagatgtacagtgataccaccggtaataattactttatctgcatcagcaacatgtttatctatccacactggtgtaccacggctcgtatcacctacatgcaccaggtcctccgccagacagtcgtgctgatatattttgatacggtctgcaacttccttaccgcagactgcaatatcctcttctctggtttgagcacgatgtgtaccttgtgcaataacgatgcaaatatcttcatcaggcacgccgcctaaattaatttcgtctattacatattttaaaaattcaggagtacgaatccagccgcgtgtaatatcactgacaatgacagcgactttttcgcctttgctgacaacctcctgcaaaggcttgctgttgatcggattacgcagtgcttcaatagttgctgcctgaacatcatccagtttaggaacttcattcccttcaattacctgcaaaatatgttcttccggcaaggaaatttcctgataaccctcaccgataccaaatttaaatgttttcaatgccatttcttttccctcacttgtttttatttgaacattggcacggtatttactccgtgcggcataatgttgactgtataagtttctgccttgccctgtgccattaattttttctgtgccagcgtccatgcttccgccaaagttgctgcaggaatctgacctgttctgcgcactgcgtcaaagttttctggcctggtaaccataataacagtaaactgcttcgacatacaatacatatagaaagcaatataaaatggtatcgtaaaaccagcccgcagttctttttccatacttaattcatcattaaaccgaaagcaatcaaaaaaagaaggcggttcataaatatcaggacaatccaaaagagcgataaaaataccatttggctgcattgccatttgtgccggtgcataagatttcattccctgatacaggttgatatccataggataaccgccagaagaaccaataacgacatcagctttggcttttgcttccactccctgcaatttcatcacttcctgagtaccggcataccaggcatcataccagtggccggcaacgatacggacaaaatctccttcagcatccataatcgaatttaccaaaaaacaggggtttaagaaagcgcagacctcacacatatcttcactgacacgatttccttctattttagtcagataggtttcctgattcacaccgccgccaacttcatccgtcaaagccagcaaatgattatgtttgatagtttccacaccggcaagccccggcataacactcttgcgcccgccgccaaagcctgcaaacagatgcgttgtaataccacctgttaaaataaccttgtctgcttccacagctctcttatcgatatacaccggcgttcctctgcttgtagttcctaaaaaaacgtttgcctcagcgccatacgcatcatggtcaaaaacctgtagccttgcaaataaagcatcacctaaaattaaacgtttctcttcatcgtcgttgttcctgtgtgtgccagtagcaataattacaaaaatatctgcatcaggaataccactgttatttagctcttctacaacggccggcagataatctttagtccgagaccaggtgcgcgtaatatcactgacgataagcgctaccttatctccctcatgcacaagtttgcttaatgcctgtgtcccgataggattgcgcactgcctccagcgtagcctgtttgatatcggtaatcttagaaacgctgcctccgtcaatgacctgtactacatgctcttccggcaattcaatgctttccatacgcttaccgatgtttaaatcgtatctttttaaagccatatatgctctccctcaaaaacggttacgcttccaatacaggcattgtcgccgaagcatgtcccataatcgtaattttataatcatccttaccctgtttggcaagttcctgttgagcaagcagccacgcttcttccaggctggcaacaggtatttgaccggtttgccttacaaactcaaaattttccggtttggtaactaaatatgtagttaatgaatttacgatacagcgtgttttaaaagcaacaaaagcaggtatagaaaaatctgcccgtacatctttttcaaactgcaacacatctgattttgaaaaccaatctgtaaaaatagccggttctttaatgtcagggcattccagtgtcagtatcatgataccgcctttttttacagcaaaaacagcattcatatgagctttgcagctctggtataaattcatatccttaggactgccacctgccgaagcaaagacaacatcggccagctccttaataggtacgccagccatagcaacaagatccttacagcctttttcccatgccttataccagtgtcctgcaactacttcatgcagcttgccttcaggtgtgaaaaccatattcaccaaaaatgcagggtctaattttttcgttacctctaccatatcttcatgtaagggattaccctccaatagacctgtctcgcaaagaggattacaaccatcgccaactttaggagccagcgcaatagcatgattgtgcataatagtagcatgcccggaaacacctggcataacagccttacggccgccgccaaagcctgccatcgggtgcagtgaaactgcacctgtaataattaccttatctgcttcagccacataagaatcgatcaggatcggtgtgccaaagctggtcacccccaaatctgtcaactcttcgttgttcctgctgtcatgctgatggattttgatcctttttacgatatctttaccgcaaacagcgatatcttcatcatgtgtatgtgcacgatgagtaccagtggcaacaataatagtaatatcttcgtccgggacacccgcagcattaatttcgctgataattacaggcaaaaactcagctgtgcgaacaagtcttgtaacatcactgacgatgacagcaaccttatcacctttccggacaactttttgcaacggctggctggcaattggacagcgcacagcggccaaagttgcagcagcgatatcctcctgtacatctgccttgttgccatgtatatcatacagtactttttcttcaggtaatgtaacttcttgaaatccatttccataagggagttgatatttcttcacttcaattttcctcctctatttttacactagtaaatttattatactcctatttaagtaaaaataaaagacagatgtttacaaaacatccgccttttaccagtttctattgctgctccaaaactccgatcgcagcaatgccagcattgtaaataattccaaccgtccaagcagcatcgttacacaaagcacaagtttaccaaaccagttaatatcagcataattaccggttgcccctactgttccaaaagcagggccaacactgctcaggcaggatgcgacggcaaaaattgattcttcgattccaagtccagttgaaaccaccagaagcgacataacggctatcgtcattatatatacaaagaagaatctgctgattgctgcgactactgcaatcggcatcactctgccgttaaaattgactgttaaaagcatctgcgggtgaatagctctgcgcaattctgccgcaatggcccggctcattactacaaagcgtcctactttaataccacctgccgtagaccctgcacaggctccgaccagatacaacagacacagcagcagcttagaaaaagttggccaggtatcataatcataagacacataacctgttgtagtcgcaaatgaaactacctggaaaaatgcgcagcgcaaaccttcaaaaaactgcagcccaccgctgaaaaacagattcagagtaatcaaaagtgttaaaacagcgatgatcatcatataagacttaaattcactgtcacgccacagtgttttaatccctctctgtgtaacagcataatacagagcaaagttaccgccgcctaaaaacatgatcatcgctaatactacttcaatcgacacactattgtaatgcatggcactgttatcataagtagaaaatccacctgtggctattgccgacatcgaatgattgatcgcgtcaaaattagtcattccgcaaataaccaaaaagccagtaccaataacggtaaataaacaataaataaaaaataatgctcccgctgttgttctgatacgcggcagcagccgttcttgcccaaagccgcttacctctgcattaaaaagatgtacagatccgcctgctacctgaggcagtaaagcaataaacagtacaatgataccaataccacccaaccaatgcgtaaaactgcgccaaaataaaactgtttttggtacggctgccagattagtaatagctgtagctccagtagtagtgagaccagacatactttcaaaaacagctgagatagggtccaggatctgcaaaaacgcatatggcagagcacagataatacaagtcagaatccaggaaaacacaactgtcgcaaaaccttcacgcagtgatatattttctttttcatcaaactttccatattggacaaagcccaaccctacaaaaaaagctgtaaaagaagtaatagcaaattccacaaaagaaccgtcttcataaaaaatcgccagtcccacaggaagcaacaatatagcactcagcgccaagctgagcctgcccaataaaaaagctatcagactgaaattcataaaaaatacagcctccaaggacctgcctttaccagttgcgttttacacgccagaaatcaggtctcataataatgagtaatgtaaaaatctctaaacgccctaaaatcattgctgcaataactactaatctgccaaaagtagatacatctgcataagtagccgtagggccaacgataccaaaagccgggccgacactgctcatacaggcagcaataatacccatagaatcaagcatcgaaagtccagtcaaagaaatcagcagtgtcaatgtcgaaaaaactatcatatacaaataaaaaaatcttgtaacattgcctacaaccacaggcggaacattgcgtccacccatttttatactgtaaaccagtcgtggatggatcgtcctgcgcagttctgcccatgttaccttcagcaaaatcacaaagcgggaaactttcataccgcctgcagtagaaccggagcagcctccgacaaacattaaaagtaacagtacataacggctgaaatcaggccataaattaaagtcactggaagcaaaaccagttgtactggctattgatacggtttgaaataacgcatgtctaaaactggtagctgcatcaaaataaccggtataatacaaattccaggttatcaaaaatgtggcgataccaataatccaaaagtatgccttacgttctgtatcaatccaaaaaaccttaaaattgtgctgatatatcttataataaagagcaaaattcaaactagcggcgaccatagcaataataacgatcatttcgacataaacagtttcaaattccatcagactttcgtactgatatgaaaatcctcctgtagctacagatgccagcgccaaattcattgccataaaccagctcatacctgctacctttaaggcgactgttgtaataatagtaaaaaatatataaacagtaaaaataacgaaagccgattccttgattttcggaagtgtacgttctgcagccggaccgggaatttcagcgttaaataaataattagcgccgctgcctacctgaggcataatcgtaataaataacataataacaccgataccgccagtccaatgcgtcatactgcgccataccagcaggctgtcaggaaagttgctcaacgatgataaagtagttacaccagtagtcgtaaatcctgaagtgctttcaaaaattgcacctacagggctgacaagtccagacagataataaggaatagcccctaaaaaacagaccagcagccagccgcagcccactgttgccaaagcctcgcgcaaattaagatgagcacgtttgttcttttcaccattacctatcagcgcaccaccaataaatgcacagatcataaaagaaaagataaagcccaggaacatgtattcccctaacaacagggccgttatcatcggcacgaccattgctacggcacaggcgatgctcagcttacccagcagatacatcacaagcctgatattcattgattatcctctactttcaaaaaacggcataacgcgttttacaaattcactcttgacgaaaataataattctatctccggcatataataccgtattaccattaggaactacggcttcattatcgtgaactactgcacagaccagacaagcccgcggcagcttgatatccttcaaacttttacctatgacctcacagtcatcaggtagaataatttccaacgcttctgcttttgcaccttccagcagtgaaacagaaacaataccgcctttgcgcacaaaacgcagcacttcgccggaactcagcaaacgtgacgaaagtacgatatcgacaccgaccttctccatcagctccacatattcgttacgggcaacacggacgatagttttttttgcacccaggtgctttgccatcagtgccaacagtaaattcagcttatcatcttcagtaatgcagataacgacatcagcctcggcaatgccttcttctgtcaataaatcaatatctgtgccatcaccacacaaaacaataccattttccagcttttgcgcaatcagctgacagcggtctttattcttctcaataactttaacgaacagtccctgctcttccagcataggagccaaaaatctgccggtgcgtccagcacctatgatcataacccgttctattttttcataagtattaacgaaagtttcctcaaattccttaatagcactttgctgtccaacaaaataaacattatcaccaggctccagcatatcatcgccatgaggaataatcatcttatgccggcgaaacagcatagcaatcagtatctgcttgggaatttccaaatctttcagaggtacacctacatacggagaagcgtcgctcatccgcgcctcaaacatccttaccttgccctcggcaaaatcatctacatccaaagcagaaggagtcattaaaatatgatttatttcagtagcagtaatgcgttccggatttaagatcaaatcaatattcattccctgattaagtaaatccttcgcagtcaaagcatactccgtatttctgatacgggcaacggtgtgcttgacgccatagtttttagccatcatacaggtaaccatattgacttcatcactatccgtagatgcgatcagcacatcggcgtctctgatatccggatcgtccaatgtattaggactgcatccattgccgccaatagtcaatacatccaaggaattttttactacctcgcgacgtttttcatcaatttcaacgactaccacatcatactgatcttcggccagtaactgagcaatactgtaccccagtttgccagctccgactattactatacgcatataaattcacccttatttccgacattcatataactagagcaattatatcacaagtttgtcaaaaaaacacctaaattacctatacataccagtgctgaaagtcttagacacgaagaaatccctgaattcagcaatagaattcagggatctttcatttattatattccactatctgcttattattttgcactaaagcttgtcataatattttgataggctggaatgtattttccaagtaaagcagccagcccttccatatcgttacgccaatcgcgatgtaactcacaggcgacgctaaagaagtttaccagctgtacgcccgcagcttccatacgtctccacgcagcatcacgtacttctgcattaaaggtaccggaagcatctgttactacaaaaacttcataacctgcttcaacagctgataaagctgcaaaggccacacagacatcagttacgatacccgctataatcaattgttttttaccagtctttttgactgccgcaacaaactcttcattgtcccaggcattaatctgtcccggacgtctgataagtggagcttcaggaaacatttctataatttcaggaagtaatggaccattatggccattatcaaaactagtagtgagaatagtaggaagattaaagaatttagcactgtccgcaagcgctaaaacattattcttaaattgaatcggttcaaaatcccgaaccagattaaacaatccggtctgatgatcaatgagcaaaacagcagcatcatttttatctaatcttttgtatttaaatgacatataaatcactccttaacggtcttattaatatttttatttctttcaaagatcttttactacagcgaagggatcctcttgctaagattaagataacatatcctgataaaatgtacaaacgaccatagttaaattaatatgtcatttaagaacttatcgataacaataagtttttaaagtataagtaagggttaaacaataaagtttctccataaaaataaatattccgtttattcaatttcagtagttataacataaaaaaaataaccataccgtatggtatggttattttttaaccggcagctttctatcctcccaggccgcttccagccaagtactttcgacgtttaa

SEQ ID NO: 10006 - DNA, 3469 bp, Unknown
  gut microbiota DNA sequence
ggccgctgggcaaagcacgatttgattggtcgtaaacctgtaatggagtttttagggcctgacgttgaaaaagttagcatgaagatccagctgcgcactgatcacggcataaatcccgaaagcgaactggggaggctgaggaaaatgagggacacaggcgcagtttttccgtttattttaggtggcgcgccggtatctgataattattggttgctggaggatataggggaaaacgtaagctattggcgggcaggcggtaaaatactttccgttagcgtcgatattacattgactgaatattctacagaggaggtgcgctgatggattttgaacttactgcgggagaaagagttgacgtagattttgccccaaaaaatgtgcaaatggaaattttacaaaattgcagtacaatacttagcacgtctaagtttagcgtaccgttagaccgtgactttggcattgatgcaaactatgtagatgctccgctgttatcggctaaagcgaaagcagaaagtgaaatatttgctgcattaaaaaaatatgagccgcgagttacggtaaaacaaattacatggcgctctaatgcggagggcgttttaagggcgaaagtgaaggtggtcataaatgaaacttagtgatctgccggacattgaatttgttagtgcagacgaacaagaaatattatcggatatcataaagctttatacggaaataaccgggagaacccttgcacaaggtgatcctgtccggttatttttatgcgtgattgcggccattatcctgatgctgtgcaataagatcaactacaccggcaaacaaaatctattgcgatattcggcaggtgccaacctggatcacttgggcgtacttgtcggggcagaacgtattggcgccaaggcctctgttacgacaattaaaataaccctgtcggatgtgcggtccgttgcgacaaacattccagcaggtacgcgggcgacagctggagataatgtgttttttgctattgatcaggatgcaacggtcatagctggacagttggatgtttctgtagcggctacctgtactgtggctggtgttctcggtaatggctatctgccgggagaaatcaataagattgttgatccaattccgtacgtcgctggaatggtcaataccacaacgtcggagggaggttcagatgtcgagagtgacgattctttgcgtgaggctattcgcgaggctccggagggattttcggtagctggaccagtgggcgaatacattaaaattgccaaacgagcttcgtctttgattgttgatgtatcggtaatatcaccggagccggggcaagtactgataacaccgctacttgtaggcggtggaataccgggaaaagaaatgctggatatcgtagaggcagcgtgcagtgatagatctgtaaggccgctcactgaccatgtgcgtgtggctgctccggaggttgtcaattatgatcttacactcacgtattacattgaccgggcaaatgaagctaaatctgttgccgttcaaagcgcggtagcgaaagcggtggaggattatatcgattggcaaaaatctaagcttggccgtgatatcaatccggacgagttaatctgtcttattaaaaatgctggcgccaagcgagcggttatatcttcgcctacttttcggatcgttgctgataaccatgtagcgatagctgaaaatgttaatgttacatttggggggctagaaaatgaatgatctgcaaaatctgaatttaatcgagttgctacccactagcattgcaagcgacgaaacgataagaaatatctgtaatgccattgcagaaaaattacaaacgattaatgaaaaagctgaattagttttgttgctgccacgattggatcagttgccggaaacattggtggatgaactagcttggcaatatcatgttgatttttatgattatgcggcagatatcaataaaaaaagggcattagtgcgcaaggccattgactggcatcggagaaaaggcactcctgctgcagtagaggaagtatgtacagctgtttttaaatcagcaaaagtttatgagaattgggaatatggtgggaaaccatatcattttcaggtaagaatgatttcagaaggcattccagataaatctgttttggacaatttgtatagggcaattaaagaaagtaagaatgttaggagttggcttgacgctttaagttttgatcgtcaaatagctggctccttatttgttggaggggtctattcttcaatgagaaaagtggaaattttcccatcacagataaaaccacagattttaaatatcaataattattttggagctgcaatctatgtacacaaaggagttgaagtaacatgccaaactgggcaaatttaatgttgactaaacaaggaaaggtattacaggcaaaagctattgctggtagtacattaacgatcactaagatgaaattgggttctggtattattccagatggagtatctccagaagatcttactgatttgattcaacccaaacaagctttaggattaacggcaatcagtgttaatggtggattagctaaaattcaaagtattgttactaatgctgaactttcagaagggtactatattcgtgaatgtggtgtatttgcaaatgatcctgatgttggggaaataatgtatgcaataatgacagatacctcccctgattttctgccttccgcatcaagctctgttgtgatttcagaagaatttagtattaatgtagtaacggaaaacatggcgaatataacagcaattattgatcctgaaggtatagtaacagtggctaatgcaagaaaaattgcagaggataaagttactgagcataatgaagatacagaggctcatccaaatgactttaatttaaaaggcattactattggcaaagatagtgttattgcaactaaaaagggagatttactaactcttttggcaggtaaaggaattaatttacttagtgatattaaaaataagataatcacgatcgttggaaaaagtaagaatgcatggaatccgaatgaggaaattatagctggagatataagatataccgaagacggtaatggtccaagctgggcttatttgttatgtaaaactgcaggaactacaagttccgttgaaccgattttagaagctaatgctgttgtaggacaggagataaatgacggcagtgttgtatggacggtacaaaatattaggcctactgctttagattcatatcctgtaggcagtatatatatgtctgtaaattcgacatcgcctgcagatctttttggcggtacgtgggaggcaatgccggcaggacgtgttttgctggcacagggcacatcagaatggggcgtagaataccaagctggcagtaccggtggcgaacacgaacatcagttatctgtcggagaacttcctgcacataaccacaatgtaacgg

SEQ ID NO: 10007 - DNA, 1096 bp, Unknown
  gut microbiota DNA sequence
gctgtatacagcccggcactgactgacttcatttacatggtaaagaacacttctaaaatgttcattaccggccccgcagtagtaaaatctgttactggtgaagacgtaacccaagaacaactgggtggcgctatgacccacaacagcacttccggcgttgcacattttgctgcagaaaacgacgaagactgcttgcaacagatccgttacctgctgagcttcctgccttccaacaacatggaatgcgctcctatcgtagaaaccggtgacgacccgatgcgtattgatgactccttgaatacattgcttccggataactccaaccaagcatatgatatgaaagacgtaatcaaatccatcgtagacaacggtgaattctatgaatcccaacaatattgggcaaccaatattatcacttgctttgcacgtatggatggtcaaaccgtaggtatcatagcaaaccaacctaaagtaatggctggctgcctggatatcaacgcatccgacaaatcctctcgttttattcgcttctgcgatgccttcaacattcctttgctgaacttggtagacgtacctggcttcctgcctggctgtaaccaagaatacggcggtattatccgtcacggcgcaaaaatgctgtatgcatattccgaagcaactgtacctaaaattactgtagtaacccgtaaagcatacggtggttcctacctggcaatgtgttcccaagatttgggcgcagaccaagtaattgcatggccgactgcagaaatcgcagtaatgggacctgcaggtgcagctaacatcatcttcaaaaatgatcctgatgtaaaagcaaaaacggaagaatatatcgataactttgcaactccgtaccaagcagcaatgcgcggcatggtagacatcgtaatcgagccgaaaaacacccgtcccaccatcatcaacgctttgcaaatgttgcagtccaaacgtgaaactcgcccggcaaaacgccatggcaatattcctttgtaatttgcagcttgcagtatagtgcttaattaattaagaagaatgaggtgaaataatgggtcctgtaactactaatccttggttgatt

SEQ ID NO: 10008 - DNA, 89717 bp, Unknown
  gut microbiota DNA sequence
tcatcatccatcatatgagcttcatcatcgccggcagcgcggtcttccacctgtttctggaagcgttcacgctggtcgataggatcgttgagctcggagaagccattgcagatctctcgcgcataaatgaagccttcaaaacggtctgtaatttcaggatctgcttcactgcttttggccagcggtgaaatttctttcggatgtcctgtgataaacgtaggttggatcagtttctcttctacgtgttcttcaaagcaggcattgatgattttaccgatgccgaaagttttttcgtaaggcacgttgatagcatctgccattttacgcgcttcgtcgaggtctttgataccggaaaaatcctgtccggtatatttagctacggcctcgatcatagtcattctattccagggaggagtcagatcgatctcctggccttcgtaactgatcttcatcgtgccgagcactttctgtgcagtctgcgaaacaatggtttcagtcaaatgcatcagatcattatagtcagcataggcctggtagatctcgaccatggtaaactcaggattatgtttgatatcaataccttcattgcggaatacgcgccctaattcataaacacgttccatcccgccgacgatcagacgcttcagatacagttccggcgcgatacgcatataaagctgcatatccagcgcgttatgataggtgataaacggacgtgcggctgcgccgccggcaatagaatgcatgatcggcgtttcgacttccaggaagtctctgccgtctaaaatctcgcgaacgcttttaatgatctggctgcgcagaacaaaagtgcggcggacttcaggattaacgatcaggtcaacataacgctgacgataacgcatttcgacatctttcaagccatgccatttttccggcagaggccgcagagatttggaaagcagttccaaagcaaccgctttaacagacaattcgcccatgtgcgtacggaaaactgtgccggctacaccgataatatcgccgatatccatcagtttgatcaaggtatagttttcttcgcccaaggcatccttacgtacataaagctgaatacggcctgttttatccatcagatcgataaagcaggttttgccatgaccgcggatagccataacgcggccggacagacggacaacagtttcattagccgttaattcttcaaattggtcggcaatatcctgagcatggtgggtccattcaaatttatggccgaaaggtttccagcctttttcttcgatttggtgcattttattgatgcgcacctgcatttgttcattgatttctgtttctgttaaagcttccggttcggcagcttgttgatttttaatttcttccgacatatttctcgctcctaaaaaatcagatctatttaatttttactattttatatgaaagctcgcctacaggagtatgcacctgtacgacagtgtttactttctgtcccaaaatcgcagcgccgaccggtgattcattggagatacggttctgcgaaggatcggcttcagtagtgccgacaacagtataggtttcttcgtctccaaattccatatctttaacgataacggtagaaccgagaataactgtgccttttttctttttcgcagtttcgtcaatgagcgtagccgtgctgatcatctgctccagctcgataatacgcccttcgataaaggcctgctcatttttggcatcgtcatattcggaattctcgcttatatcgccataagaaatggcaactttaatacgctcggcaacttcctgacgttttacagaacgaagattttctaattcgtcctccagttttcttaaaccttcggccgttaaaatagtttctttagcacccatggtattactcctttaaaatcatatttttccgccgcctcacaatacaaacagtgccaagcagcaatgcctgacactgggatcaacggataaataatataatgtactaggttaaattataattttttgttggtttattgtcaacctcagatattacgcattgccagttcctgttcgacaaaaccctggatatgcgcgatttcttcatctgtaacggcccgttcaaaattgcggaagccagccagactgaaatcgtgtttacgggctaattgcgagatcgtatcgatctgtttgatagtcagtttccgtcccagagtaaaattttcataacgcttttccagtgccaaaatcattgtttctgccatacaggcaaaagaagtctgcggcgggaagccaaaatcgaaatggaaatcgacattacccggcaccttgatcacaccgccttctatgaccagcacatctttgcgtttggaagctacctcacgcgaaacgttacgcggtcttgccacatcgcagacgatggccccggccttgagatcctcaggttcgatcagaaaatctacggcgctggtaactgcgatcacaacatcggcatccttcaggctgtgtttgatgtcgttggaaaccgtcaatttgccggcaacactgcccgaaagctcttgcgccagttcttccaacggctgcagatgccttgcgaccattgtaatatcctttgcttcgcgtgccagaatccttgtacaggccgcaccgatcgaaccgctggcaccgacaatagtcacatgcgcagttgccagatcttttcccatcagccttactgcttcacgggttccctccagtgctgttgcaactgtgtagctgttgcccgatgtcacagctatatctaaatttttcgccactgtgatgcctgcatcgccaacgatagaggtgaatgcgcccaggcctaccactttagcgcccagttcctgagcgatcttccctgattctatgatcctgtccataacaaattcttccggcagttcaaccatttgcttcgatgtcaggggacagccgataaaccagccttccgcttctgcgtaagggctcttgatacctgtgatatgtgaaacctgaaaaggttttttcagcttcagagcactttccagccagctgtcaggaataaatttcaaaacaggcgatacgtgagccatatcatgaatcgacagcggatgtatgataaatgcaaacttttccattaaatgtgctcctcctctccgttcagatattctaacccggattctatcttatattcttccagtaatttttcgtagacagccgcatcaagctgtttatcagcaccgctggctgccaccagcaggccttccatcacattggtaccatagctgcgtccgtccaaagacggcgtcgttgtgatcagacagcgtactccggcattgcgcagcagcttgcggtcaccggctgtaacagtattggtaataatagtcttgcctgccagcttatccggcataaaccgcctgataaaatgaaaatcaccggcaataatatcgttctctaaaaaatagccctggtgctgcggttttctctggctttgtttggcgcccatcggatagaaccaccttacgggcagctttgtcagaagcggcgccagcaattttgcaaaactatccagagtctgcagcgatttgatcggatgatcccagttcagcccaaaaatcaaatcaccaaaagtaacgtcagcgccattggctaccaacgcttcggccataccaaaacgatctacaccgcagaccataagcacttttttcccttgaaagtctatgattttatcagcagcaaggcgattgatcagaatacgttccaaagaatttttcaacccgctgccatccagcacaggggtgtttttgacattttcgatcagcttggccgattcacgaaaagtataccgccgaccgccggcatatacataaagatcggtccctcccaatcccagcgcgtctacccggccatccagctcttccagaagctgccgggctttctgcagatttccgtcagtgcccagccgttctattataaaggtctgccccttaagctgcaaagtacttttagcattgcgctcagaagatcccaaacttacacttacgatatgtttacagctgcattcagttgtctgagaggcaatcattgttctacttctttctctaaaaaacttgtccctgatgacatatcattttagcatatttaaagtgttcctacaatatttgctattagatttagtattatcttatttattttaaccgttttcaggcgccgaatttttctgcggcctcgatatattctgccagcagttttttaaaatcggcgtaggtttctgtctgatggaacctgccgcgatattcggcagctttaggcatacccttaagataggcgccgatatgccgacgcatctctttaacagcaacagattcatttttatattctatcagcatctccagatgccgcaatgccagagcaagtttttcttttaagggcggttcctgcggcacaggcagtcccgacaaggcggcctgcaatctgctgaacagccagggattgccgtcggcaccgcgccccagcatcaatccgtcgcagcctgtttctgcaagcatcctctgtccgtcagctactgtcaagatatcaccgttaccgatgaccggtatttttacagccgctttgactctggcgataacctgccagtctgccctgccattataaaactgttcccttgtcctgccgtgtactgctacggctgctacgcccgccttttctgccagtacagctatttcttccgcattgatatgttcagaatcccagccggcacgaaatttcacagtaaccggaacagatacagcgtctgtcatccgcgccagaatttcgtaggccagctgcggatttttcatcaaagccgagccttcgccattattgacgaccttaggcaccgggcagcccatattaaagtcgatcacatctgcaccgttcccggcgactatccttgcggcttcagccagttctgccggaacagaaccaaaaagctggatcgccgtaggtctttcacccggatcgatgcgcagcatatcaaaagttttgacatttttataaagcagccccttggcgctgaccatttccgaaacagtcataccgcagccaagttctctgcaaatgacccgaaagggcagatctgtgattccggccataggcgccagcaacaaaggtacatctaattttaaagtgccgatctgcataatccactcccaattttgaaatactatagaaataagacccgccagacagcgggtctttgcttatttagaatttttctcgtgcagaatccgtaatccgtctaaggttaaaaacggctctactacgtcaatagaatcggactcggccgccatcgtattggcaaacccgccagtagcgacaacaaaagcattaccgcctaattcttccttcatatgtctgacaatgccgtccatctgaccgacaaaaccgtaaataacgcccgcctgcattgcatttacagtattgcgcgagataacgtttttaggtttgataagctcgatacgcggcagttttgccgttctctggaacaaagcctccgtagaaataccgataccaggggcgatagcgccgcctaaatattcgcctgtcggcagcagggcgcaaaatgtagtcgcggtgccgaaatcaacgatgatcatcggcataccttttttgctgtatttgtcaaacgcggcaaccgcattaactatacggtctgcaccgacttctctggggttgtcgtagcgcagtgagataccgcttttaataccggggcctacgaccataggcgtcagctcaaaataacgctcgcacatatggcagagcggtacgatcagcggcggtacaacgctggaaataatgattgccttaatctgatccataggcatccgcgtataattgaacatactgcgtaataaaataccatattcgtcggcagttttactgcgatctgtggaaaagcgccaatggcagaccagttctttatcgtcaaaaacacctgctacaatgttggtattacctacatcaattactaataacattcatgttcctcctcaaggagcttatttagtccgctcaagcagacctgccaggagtaaagccttgcgcactttagcgccaataagcgcagccgctgcagcctttattatatcaaatggaagaaatggcgcaactgctaaaagtatggcattgtcccaactcatgggcttttgcagaaagtactggaagctgagcttgaagccgatgaggcctatcgcatagcataccagcattcccacgcacatatacataagattttttaaataacttgcttccaggtcacgttctgtaagataaccaacaagccaggccgtaataataaatgcaatgataaagcctccggtaggtccgaccagcatcacagctccgccctgtccctgattgaatacaggcagtcccacacagccgagcatcacccacacgcatatgctgacagcgcttaagcggcttcccagaagcataccggccaaaagcactaccaaaggctgcatcgtaatgggaacaggcccaataggaactatgatatatgcactgatgatcatcatcgtgacaaaggttccggccagaagcatctctctgatcttcattacgcgtattccccctgcttggcctgggcaggccggatcgaaacatcaccggcaatgactttttcgattctgccgtcttcgcgttttaccattaaaagaccatcttcgtctatatcgacagcttcaccgaaataagtctggtcaggtgcaataactttgacctgctgacctaaagtcgaagaatattttttccattcctcaagcaccggtttaaaaccttcatgcaaaactttttcatacagttcttccatatagcccaacacatcagccagcagttcgactctgctgataggctcacgggcaacatcagcgagcgatacagctgttgctcgcagttcttccggcaccatctctttgggtacgttgacgttgataccggtaccgataacgatataatttatccgtccaaattcagcgctcatttctgtcaaaatgcccaccagttttttaccgtccagtaaaacgtcgttaggccatttgatcgatgcctgtacgcctttatacttatttacggctttcacgacggcaatcgctgccagcagcgtacacttcgacgcttcctgcggcatgaacggcggctttaagacaaccgaaaaccatactccacgggcaaacggagaaaaccagccgcgtgacaaacgccccttgccggagttctgctcttccgcgatcaccaccaggccatcttcgcagccttcaccggcaagacgtttagccagttcgtttgtagacgtcgtcagctcacagtagtgtatatgatgtccgagccatttcgttttcagattagcgacaacttctgcaggcttcaatctgtcaggtacttctttcaggatgtagccttttttaggtacggattctatagtatagccttcattttttaaagcctggatatgcttccaaatcgccgtacgcgatactgccagttcctgagaaagcacttcccctgaaacaggagcaggcattttactgcgcaatatttctaaaatgcgttcccgcatatcatcacactcccacacaatgttacccttagattagcactgggttaaccaaaagtcaagtcacagaaaaaccgtccccgaaattcaagggacggtcttagattacagactattgctcgctgggagctgcagaagattctgcgggctgcacctctgccggctccggagttccgatctcagaagtattctcttctttagataaaattttaccgtatttcatcaactgatcgatttcttcgccttccaaagtttctctttcaataagtgcatccgcaatcaaatgcagtttatccatattttcattcagcagactttccgttttctggtaagcctcatcaataaatttacggatttctttatcgatcttggcagcgacttcttcactgtagtctttatctctgccaatatcacgtcccaggaaaacctggtcctgacgatgaccaaacgtcatcggacccaattcagggctcataccgtattcacagatcatctgacgggccagagatgtagcacgctgcaggtcattgctggcaccgctggaaatttctttcagtaccagagcttcagcaacacggccgcctaaaagcaccttcaattcgtccagcatttcactgcgggtcgcatagtaacggtcctctttcggcaggctcaatgtataaccgccggcacgcccacgcggaataatagttactttatgaaccggatcagtattatcgagcagcatacctaccagagtatggccgccttcatgataggcagtcagacgtttttctttatcactgatcacgcggctgcggcgctcgggacccataataacacgctccgccgcttcttccatttccggcatatcgattttattcttatttttacgggcagccatcaacgcagcttcattgaccagattgctcagatccgcgccggtaaaaccaggagttctgcgggcaataacgccaagctcgacttcaggactgataggcttacctttaacatggacttttaaaatttcctgacggcctttgatatcaggacgatcaacgacgatctgtctgtcaaaacgtcccgggcgcagaagtgccggatcaaggatatcgggacggttggttgcagcaatcataatgatgccttcattagctccgaaaccatccatttcgaccagcagctggttcaaggtctgttctcgctcatcatgaccgccgcctaagcctgcaccacgctgacggccgacagcgtcgatctcatcaatgaaaacgatacagggagcgctctttttagcctgttcaaacaaatctcggacacgggaagcgcccacgccgacaaacatttctacgaaatctgaaccggaaatactgaaaaacggtacgccagcttcaccagcgacagccttggccagaagtgtcttgcctgtaccaggcggcccgtagagtaaaacacctttcggtattttggcaccgagatcattatatttcttcggatgcttcaggaactcgacaacttcttccagttcctgcttcgcttcatcagcaccagcaacatctttaaaagtaatcttaatattgtcttcgtcataacgacgggcacggcttttgccgaaattcataacccggcctccgcccccctggctttgctgcataagcataaaccaaataccgacgatcaaaagcatcggcaaaagcgagcttaagatagtcgtccaccaaggcggctgcggcggcagctcggctttaatttcaatatcacgggcacgtaaagtcgggatcaggctgtcatcactgggagccacagttgagaaatctttaccatctttcagcttaccgctgatgacattatcaactatcgttacctgtttgacctcatcttgctgcacgtgcttcataaacgcactataagtgatgtctgttttgctgaccgtgctggccgaataataatcgatcatccagattgccacgatgataatcagcaaatagaacgtcacgttcttaaaaaatctattcaaggaattgctcctccttccactgcgatcgtctaccaaattacagtaacgtcatttttttattataatatagatgcggaaattctacaaccattagtcgataaaatcatgtacgcgcataaacacaaggctttaaaacaccgatataaggtaagttacgatagttaccggcgtaatccaatccatagcctacagcaaactcgtcaggaatacagaagcctacataatccgcacttttaccattgacgcgcctgtcggccttatcgcacattaccgctgttttgatagaagccggcttgtgctgctgcagcatacagcaaacagcttcaagggtcagccctgtgtcaatgatatcatcgaccagaatcacatgccgtcccgccagttcctcagccacatcaagcttaacgctgacattaccgcagctattagtgctgttgccataagaagacgcgaccataaaatcgatcttgacaggcatatccattgccaaagtcagatcagtagcaaaataagcggcgccttttaaaagtgctattactactacttctttgcctgcataatcttgtttcagctgggctcccaattcccggacccgcgcttttatttcttcctctgtcagtaagattttaccaatatcttcatgcatatccactacttgtcatctcccagactgaaatatttaatatccaacgtcagccatgcttcgcagccctgctcctgttcatgccagcctgcagctttccctcccaccagccataggacctgtttaccgcaggttactaaaagctgactttttctctgttccggaggtactttaatgtcgttaaaatacttttttaattttttacttcccaaagacccggccggaaaaaatatgtcgccgtcctgcctctgcctcacttccagctgcctgtcctgcagcaaatgccagggatatattgctgcatgccacaagggacttgctgatcccttaaagtaacccaaacttaaaataccgtttgggagctcaacttgcagcctgccagctttctgcagctcagccaaatcaaaaacataattctgcgctgctatcgctgacggtgtttcagctgcagcaactgtaagcttaccatagctgtatacagcacaggtcccgccaggcagcataagccttttattgctgctgcctttatgcaccaagccgatcacatgctgcgtctgctgaaaggtaagcagacctgcagctccaagctttttccacatcatcctgatgatacgcgaacacagcgcggcaggcagcgaaagcagccaggctgtatcacagctgcaggaatgatcgtcctgcagcacatactgcaaaaacttctcttctgccagcgcattcaagcaatcagcatcctcagcaatcaacgtcgcagtctgtgctaaagcctgtttgatattaggattgaattcccgttccagcaaaggcagcaatatatgccgcactttattccgcgtatagtacaaatccatattactgctgtcagtacgataatccaagctacgcattgcgcaatatgcttccaacatccgacggctcacctgcaaaaagggccgtacgatactgttattgtgacagcgcattcccccaagcccttccgcaccgctgcctcgcagcaaatgcagcagcagggtttctgcctgatcgtcacggtggtgtgctgtcacaatatactcagacttgtgtttactgagaatctcaaataaaacagtatagcgtaatttacgagccgcgtcctctacagaaagtttactctccgcagcaaattttttagcgtcaacacgcagaacttcacaggcaacctgacgcatccggcagaattccacaacaaaatcagcatcagccaaagcttcgctgccacgcaaaccatgctctacatgacaaactaccagctgatacttccgtttttcctgcagcagcagcagtgcatcagccaaagcaattgaatcggccccaccgctgcaggcaacaattattttactgccgacaggcagatgttcctctacctgatcgagaatttcagtaatttgcctgtgttctttcatcgtttcaccttattatcctacaacccaaataaaaaaggcacctctgctggaagtgcctttttagacattatctgtcgcggctggcgccacggccgccgcgcttagactccgtattgcgtttcagatctaataatctgtcatcgctgtcttttaaaaagcgcgataatttatcttcaaaggaaacaggaggtgccactttaggtgcacgacgttcctgacttaccggacgctgcggtttcggaggtgccggaggcggcggtgtcagctgcttaatggacagacctatcttaccgcgttcgtcaatagacaacactttgaccttgaccttatctttttcctttaaaaaatcatgtacatcttttacatatacattggagacttcggaaatatgtataagaccaacttttccttcaggcaattgcacaaacgctccaaaatttgtgataccagtaacttcaccttcaacgattgcaccaacttcgagtgacataaagcggataatcccccttaaaaaatctttatacagtaagtattatacccttcttttaaaatcagtgtcaactgcattgtacaaatatatgaaaaaagataaaaaataacagctgtacgccagtaaaatcgactgtacagctgttattttttcttttcctcagcttctgtttcctgtttttgctgcttttcctgttcatcaactataaacagcggtacttcgttcttgccaaccatattatggtcttcacgcgccagtttttcaatatatttcaaatcgtccaaacgtttgcgttcagcttcaagctcagcctgaactttttttaattcgtcgacacgctgctgagtggctgacatttccttattgatctggtagatcttgtactcctgcctgcccaatacgcccaagcagatgatcagtaaaataatcaggacccataaaaagtcattagagctgcggcgtttttttctgcgcatctcagccattttgagctccttcctgttaattaatcagacaaaaataccgggctgtttggcccggcattcttgaaacccaagattattttttgtgtttttttgcaggagcagcgttaacagcgtctttgaaagctttaccagctttgaaagcgggaacggttgctgccggaattttgatgggttcgttggtacgaggatttttaccggtacgagcgttacgagtacgagcttcaaaagtaccgaaaccaatcagttgtactttgccctttttagcaacttcaccttttacggtttcgagtaaagcagctactgctttctctacatcttttttggtgaggccagctttttctgctactgcagcaataagttcagttttgttcacaataaatcccccttaaattttgtatgcgccagtttaggcgaaaaccgcttaaacacaacgactaaggttattcactaaaactctaattcgctatcaaaagcaatattcctgctaacatttcatcttttttttatttttttcttaatttttgtgtaaaaaacgcctttttttaattatttttctcaaaatcctttgccaactcccaaaaagcgtctaattcagccaatgaaaagtcctgccatgttttctttgaaacctgtacttttttctctacataaccgaatctttttatgaaacggttattcgcagcattcaaagctgtttccggttccaatccgatatgtctggcataaccggacaaaataaacagcaaatctcccagctcatgctccatttccttcaggctgcctccggctactgcctcttcaagttcgtgcagttcttccagaaccttctcccagacgcctgcggtatccggccagtcaaaacctactttggaagccttgctgtgcagcttgtaagcacgcatcagcgccggcagtcccggagaaattccatcaagaacatgcgtccgttcctttttttcttccaatttaatggcttcccagttttttattacttcatcactgcctgaaactttacgtgaaccaaatacatgcgggtgcctgcgggtaagcttctcagtcactccatcaataacatcctgcaaagagaacaggtttgcgtcagctgccatatgcgcatggaaaacaacctgcatcagaatatcgccaagttcttcttccatacctttaaaatcgtgattatcaacagcttctaaaaattcatagacttcttcgatcatattacggcgaatactgctgtgcgtttgttcgcgatcccagggacagccgcctggctcacgcagcttacgcataacttctgtcagcggaagcagttcagcatcatagcggaaatcctcgatatcacagtaaaaatcatcatcgtcatcaaaacacagcgttttttcttcctgcaaagcattgacatgctgcacaacagtctgctcctgtgccggaataaagacactggtaagatgatcgatatgcggctgccggtccagctcatagagcttcagcggcagacattcttcatcaggcaggcctaaattacgtaaaaagtacagctgcgcttcatcagcgagtacttccatcaaattgattttcacatccgacgccaccagctgactatagacctgcgtgatcatcagcggatatttaccagcatctgccagcgcatcaaaatcatgggcatcaacaatacgcaacccggcaataggatcaatgcctaaatcgacatatgcaagatccaaaaagctcatcgccggtaaaattttcagaggcactccggccgctgcagcctgttccctcagcagcaccacagttcgttcagcaaccaaaggactgcctggaacagcataaactacctcctgctctttcgcatcctgtaaaatggaagcaacaattttttgatagacgtcttcaaaagacgcttcctgttcataaacagcgtcgcaggacgtaaattttataccagaccgctcaagttcctttacagttgggtgtacagccgtacgcagaataaccttgccgccgcttttcagcactgccattgtttccagcgacaaatgccctgcgctgccaggccccaatcctacaacagtaattcctttttccatcttaccatccctttacttgaatctggaacctatcacaggcagtttctgcaattctttcctgccgatcgttccgcttgctatcaaagtcaatagataaacgatgccagctgcaaaaatcgttaccgccgtcgcaaaagtattgccccaataaactattaaataattgtataaaagcatactgactgctgccatcaaaactgccgccagtaatattttccccaaagcatacactttaaaagtgatgccgctgcgaatcaaaaagaagatgtttagagcagctgccaagccaaaattaatgttagaggcccaggcggcaccgacaatattgcatggcagcgccgtaagataccaaacagcagcagctttgaccaatgcgctgagcagcatattccacataggaataatagtctgtcccattccctgcagcatacctgtggttatctggtggataccaagcaggcaaatagagggagcaaggtttctgatcgcctcgcccgcaagaggcgtgccatacagtaattttgaaataggctgagccaaagcccacattcctgcagcggcaggaaaagtcagtaaacagcataatttcatggccatatttgttttctgatcgatactgttcctatcgcccagagtaaatgcttctgaaacagcaggcaccaggcttgctgtaagtgaaagcgtcggaatagtagccatcatgaccaaaggcatacccatccctgtaaggtaaccgaacagggtcgtagcctcttcgaccgaaaaacctgattccactaagcgattaggcaccagcagcatgtcaatactgctcgtcacaggcaccataatattagcgcaggaaacaggcagcgccagcaataccagccgtttggctatcttcctgatactttcgggttcttcagtgatctgcctgctgatttcctgctgccagcgcaatttgttcttcagataaaaaaagctcagtacgataagtccggtaatagaacccggcacagcaccgaaagcagccccggccgccgcatattccaatccgtacggaagcagataataggccagtacgaccatcgtcacaacacgtacaaactgctccagaatctgtgagaccgcaggcggagtcatcatttgatacccctgaaaataaccacggaagctggccaggatcgtagcaaaaaacaccgccggagttaaggctaccaatccataataagcccgcggatcgcgtaccagtccgctatcgaccagccagccggccgcacaatatagcccggcagcaaacacgagccccgttgcggccatcagccccagcgagaccctgaataccctgccggcgctggcaaaatctccttttgccactttttcggctacaatgatcgaaatcgcaatcgggataccggccgaagatacggacagcatcaaaagataaatgggatatgccatttgataaagcccgataccttcgccgccaagcagtctggataacagtattctgttgaccgagccaatgatcttgaccatcagcccagccagcgtcaatatcatggcgccacgtaaaaacttatccttggtcataccctcgtccttcccttgatttcttcatttaattaattataatcaactttattgtctctgtatagcttaatcaaaagccagccgcggcagatttttttccagccaggtcaaactgtcagtttttaatttgactgtgcggaaaataagctgggcctgcgcgccgcttttgaaattcatatattgctgctgctcactgataagctgcatcagggcagtcggatcgatagcagcattttcagcaaaggtaatacgcagctcgcccggtttgacactgataccgcgaatatgcagcagccggcacaaagcccgcagacaggccacacgccataaaacttccacctcttccggaggttctccaaaccggtcgataatttcgtcaagcagatcgtctttttctccatagtccaagccggcaaagcgtctgtaaagctcaagcttgtaacgagggtcagctatatagtcatcgggaatatatccgtcaacgctgatctcaagaaccggatccggttcagggataccgtcttcaacgccatccttcagcttacggatcgtacgctccagcatatcgcaataggcagcaaaacccacacctgcaatatgtccatgctgctgcgcccccagcagattaccggcaccacggatctccagatcacgcatcgcgatcttaaacccggcgcccagctctgtaaaatcacgaatcgcctgcaaacgtttttctgcgacctcgctcaaagcacgattacgtttatagacgaaataggcataagccagacgagaggagcgccctacccggccgcgcatctgatacagctgcgataaaccaaaattttcggctccgtcgataataatagtattggccaagggtacatccaaaccattttcgatgatcgaagtcgacagcagcacatcacagctgccttcataaaaagcaatcattgcatcttccagcatatcctctgacatctgaccgtgagcgatcctgatattgatccccggcaccagactgcgcagatcggcagcaatattttcgagaccaagaaccctgttatgcacataataaatcctgccgccgcggcgcatttcacgttccagcgcttctttgatcattccaggattatattcggccacataagtttctaccggcagccgttcctccggcggtgattcgatcacactcatatcgcgtccgttgacaagcgccaaatgtaaagtacgcggaatcggtgtcgccgacaaggtcaacacatcaacacctgttttccaacgtttgattttttctttctgagccacaccaaaacgctgttcttcgtcgatgacaagtaatcccagatcgggaaacagcacatcctgctgtaataaacggtgtgtcccaatcagaacatccacctgaccattttccagatcattcaggattcgtttttgttccctgggagtgcagaagcggcttaccatctctactttgaccccaaaaggctgcattcgttctttgaaggtcataaaatgctgctgcgccaaaacagtcgtcggcaccattactgctacctgtttaccatccataactgccttaaaagcagcgcggatagcaacttctgttttaccataaccgacatcaccgcacaacaatctgtccatcggctcaggtttttccatatcagccttgatctccgcgattgctttaagctgatccggagtttcttcataagggaagcgctcttcaaagtcacgctgccattcggtatcctcagcaaaagcatgaccagggatgatcttacgctgcgcgtataatcgcagcagttcttcagccagctcggtaatcgcggcacgggctttactctgcacacgtttccagtcggctccgcccattttagaaagccttggagcctgcccttcgttaccgacatatttatgcagcatgccaacctgttccacgggtacatacagtttgtcgtcaccggcatacgccagcagcagataatcacgatgcacgccgtcaacaaggacattctcaacgccgatataacgtccaataccgtgaactgaatggactacataatctccagccttgatttccgagaaatactgcagctgagcaccgctgtttttggtatgcagccgtctttttttctgcataccaaaaatatcattttctgtcagcagcagccagttttcattccagaaccgaaaacctgccgtcagctcgccgctgatgacagtgatgcgtcccggtctaagcagtgcgccctcttttacaaaagcagcgtttaaattacggctttgcagactgtcagcaagcccgcgcgctttaatatcgctgctcatcatcaccacaggcacctgcccgtcagccagccagccctgcagatcgcctgtcagcaattccagatttctattatacggcgctacagaccgcacaggcacattgatatccttaaacagctgcaaacggctgtgtcccagcgctgctacgacccaggctcttttctgagcgcaaaaaccttccagctcggcaggcgaccataattcatcggcataaccagaactttcagtgtacagtttctgtaaaagttcaaataaacgtgacggctcatctactaccaagcgcgtcgaagcagctaaataatcaaataccgaagctgaaaaatcttcgccggactcaatttgcagcggcacgattttaacagcactcaaagattcaatactgcgctgattatccaggtcaaaactgcgcatcgcatcaatagtatcatcaaaccattcgatcctggcaggatactgactattgatcgggaaaatatcaagaatatcaccgcgcagacaaaactgaccgatggcatctacctgagtagtacgctcgtatcccagttcgatcagacgttccagcagctcctgttgctcaagctgctgccccaatgttacgacaacgccgcttcccaaaaccttctgcagtatcggcagcttctgcagcaatgcttccgcagtcacaaaaacgataccccgttcttccccctgcaagatacgcatcgccgccacgcgcccagcctgaatctcacgattccgcgaatcagcctgcaccatcggcagatcgacaggatacaattcctgcatcagcaaatccgaataaaaacaattcaaagtcctgcggtattcacgaatatcgtccctgccgctaagcagaaacactaaagagccctgttccggcaaaagccggtccagagctgccaaaaatactgtttttgaggctccgctgagaccagtcagcgaacacccctgaccctgctgccacaacccggcagcggtacgggcttccgttatttcaccaatagcgtccaataattgcaatttcatcagtttacccttgaaaacaaaagggttctagcctgagctaaaacccttgaagattgtaaaacttacagtttaacggcaaaatctttgcggtcaaagctgtgtactgcgtcaacaaaacgtactgtaccggttttataacgcatggaaacagtatgtgtacgtacaccgccgccgaaataacgcagaccgctgagcaaattgctttcggtgatagccgtcgcagtgaacatgcagtcgtcgcctttgaccatatcgtccaagctcaaaacctgctggcaatcgcagatgcccatttccaggcagcgtttgacctgttcatcatcttcagggcacaaccgtgcctgcatatcaccgccgagacatttgatagcggcagcagccagtacgccttcaggagcaccgcccttaccgatatacatatgcacgccggtaccttcaatgccggcattgacgatcgggttaacgtcgccgtcagtaatcaactgaatacgtgctccggcacggcgaatctcatccataataccatagtgacgttcacggtccagcaatacgacggtcaggtcagaaaccttacgttctaaggctttagcaacgcgttccaggttttcactgaccggcgcatcaatatcgatgcagcctttagctcgaggaccgacagcgatcttatccatatacatgtcaggagcatgcagcaggcagcctttcggtgcgatggcaataaccgcgattgcgccaggctgacctttagctaccagattcgtaccttcaacagggtcaacggcaatatcgacttcggcaccgccgccgccgactttctcaccgatatacagcatcggcgcttcatccatctcaccttcaccgataactactgtaccgctgatatttaccgtatcgaatgccttgcgcatagcgtcgaccgccagctgatcggcaccgtttttatcaccacgtcctacactgcggccgcaggcaattgctgcagcttcggtaacacgtacgaactccatggataattctctgttcattcctcaaccatctcctttattgatacgatcatataaaatcatattaattatatcactttctgccgtaacttgcagagtaaaataaaaattactttattttaagttaaatttatcaacttatcttaagcatcagcaattcaaacacgatctgcagcggcagcacaaaagcgatatacagcagcaacaagctgaatgctacagttgccagcgaccgtttaaaatctatcaggtaaaccacctgtaaggctctgatcagcaggtacagcatccacagcttcgctgtaatacaggcccccactactaccagcatccccggcaggcccagttttgtccccagcaaagctaccggagtcatgaccagaaacggtaaagtcgtataacccagcaggcagatcaatcccacagcatcaccggccatggctcctaaagtttccaaaatcccgtgcagcaaaaaaccatacatcgacaaaactacgccggcaatggaaacagcggccgcaataacagcaaaccttaccgacagcgtctgatctaaaaacaactgatttgttacaacgccgctgaacagacccacgcttaaggcaaaataccacaagctgcgccacatgcagcgctcctgtaccaacaaacgcatgccatctctggtttcaaacaaaacgtcaaaggttttacgcctcataaggcatcacctcgccgcctgcggtgaagacattccagccgcgtctttttgcagcagcatttccaactgccccagcatcattttagataactgggcactgaaaaatacttcccagggtttttgacgcttgttttctttaatttccggtattccatctactccgatggctttacctgctgcctccaaagcgtcataataattgccaagttcatcgacaagcccgactgcctgagcctgctgaccggtataaacacgtccgtccgccaaagcttttactttagtgatatccattttacgcccttcagcgatcacggcgacaaaattctcaaacatctgattgaccatattttgtaatatctgctgttcttccggagtcatcggtctgtcagcggacataatatccttgtactgaccgcttttgattttagtagtatagataccgatttttttgaaaagttcctgcgtattcatatagggcatatagaccccgatactgcctgtcaaagtagacggattggcataaatggtatcgctgtaagcagccagccaataagctgccgaagcagcactgtcgcccatcgaagtaatgatcggtttatcagtagtttctttaaaacgtttcagttcacggccaacttcttctgctgcggtaacactgccgcctggggaattgatacgcagcaccagtgcttttacactgctgtcggcagccgcctcacggatctcacgcatcagacggcctgaagaagcgcccgtagtttcaccccagatattctcgcccggttcaccgctgacgatagtcccttcgatattgatgactgctaccctgtctgccggggcagcaataaccttttcatcattatttttacctgaaagcagcgacactacaaaagacaggacagcgatcaataaaatcgcactgataaaaatttttttcagcatactttctactccttttacaaaaaaagcagactgactcgcagtctgcttttgggtttttcttcagagtcttatttttgttcccgcaaagcagcggcaatgaaatctctaaataatgggtgcggattagtgggacgggatttaaactccggatggaactgtgcacccaggaaccagggatgtctgtcctccgggatctcaacgatctcaaccagacgtccgttaggcaaagtgccgccgattctcagaccgccgtcaactatctgctcacgcaaagcgttgtttacttcataacggtgacgatgacgttcgtaaacaagttcttccttgtaagccttctcagtcaaagtaccgggataaactttacaaggataaagacctaaacgcatcgtaccgcctttatcttctacacttacctgttccggcataagatcaatgacaggatacttacagtcagctacaaattcggcactgttagcattttccaaaccgcagacattacgagcatattcgataacagcacactgcatacccagacagataccaaagaacgggaccttgttctcacgggcatactgcacagctttgatttttccttctatgccacggtcgccaaaaccaccaggcaccaaaataccatctacaccttccataattttctgcatatcagtttcaggcgcttcgatattctcggcgtttacccattttattttcagttcgctttcattagcaacagctgcatgtttcaatgcttctgtaatactgatgtaagcatcctgcagctcaacatatttaccaactacggcaatcgttactttgcggtcataatgcttcaggatacgctctaccatttcatgccagtaagtcatatcttttggtttatcaggcatatccaattttttgagcacgatggaatccataccctgttcttccatcagcatcggaacctggtaaatacttgccgcggtcagattctgaattacagcttcaggatcaacgtcgcagaacatagccattttttcgcacatatctttggaaataggacgttcactgcggcagacaatgatatccggggaaatgccgatgctgcgcagctctttaacgctgtgctgggtcggcttggttttgagctcacctgcagcagctatataaggaacaagtgttacatggatatacaagacgtcgttacggtcaacttctttttttacctgacggatagcttcaaggaacggcaagctttcaatatcgccgacggtaccgccgatctctgtaataacaaaatcagcattatcatcacggccaacgcggtaaacgcgctctttgatttcattagtaatgtgagggattacctgcactgtacgtcccagataatcgccccggcgttctttattgataacggacaaatagatcttgcccgcggtcacattggaactctttgacaaattaatatcaataaagcgctcataatgacccagatcaaggtcggtctcagcaccgtcatcggtgacaaaaacttcgccgtgctgataagggctcattgtccccggatcaacattgatataaggatcaaatttctggatcgttaccttatagccgcggcttttcagcaaacgtccaagcgaagccgctgtgatccctttccccagcgaagaaactacaccgcctgttacaaaaatatatttcgtcatgattgtcctcccgttcctcataaaatggctttttatctccaaaaattacattctttccggtgccgatacgcccaaaatattcaaagcatgtttaatagtatggcgggtcgcctgtaccagcttgatccgtgcctgctgcacttccgggcccacacccaggatacggcactgattatagaaggaatggaacagtccggccagatcgtgcacataatgcgccacacggtgtaccgcgcgttcttcagccgcaacttccagcatttcctgatattcgcccagttttttgatcagttccagctctgtcgcatctgtcagcagattataatcggcagcagccgcttcaacaacattctcctcagccagctgacgcatgatactgcaaatgcgggcatgtgcatattgaatataatacacaggattttcattagatttttcagtagccagggtcagatcaaaatccagctggctgtcgatcgaacgcatagcaaaaaagaatctggcagcatcagtaccgacttcttcgatcagctcgttcaaagtgacgctctgacccgtacgcttcgacatcttgaccagctcaccgttgcggtacagactgaccatctgcagaatcaaaacttccagctgctcgggatcataccctaaagcgcctacagctgccttcattctggcgatatacccatggtgatcagcgccccacaggttgatgacacggtcaaagccgcggctgaatttattccagtgataagcaatatcagcagccaaataagtaggcacaccgttatcacggatcacgacgcggtccttatcatcaccgtaagcagtagctttcagccacaatgctccgtctttttcatacatatagccgcgttccgtcaaaagttcgcaggcttctttgatcttatctgcatcatgcagtgtctgctcgctgaaccagacatcaaatgtgacattaaaggcttccaaatcttcctttagagcagcaagcttttcttttaaggcaatcgtacggaattcgtgcaaacgttcctgctcatccatatgcaggaatttatcgccgtagatcttgacgatgcgtttggcagtttccacaatgtcgtaaccatgataaccgttttccgggaactccacatccacaccaagctcttccagataacgggcattgaccgaagcagccagattattgatctgattgccggcatcattgatatagtattcacgggtaacatcatagccggccgctttcagaagattggcaagtgaactgcctaccgcagcaccacggccatggccgacatgcagcggtccggtaggattggcgctcacatattccaattggatcttttcgccgcctctggcaggcagattgccgtaatcagcacctgctgctacgatacttgccaaaagttcggctgtccaattttgtttcagataaaaattaataaaccccggtcccgcgatctcagcctttgcaacataagggcagtccagattgtcgatcacagcctgagccactaaacgcggattacattttaagccgcgggctgactgcatggcaaaattggtggcaaaatcaccaaattccttttgcggcggcacctctaataatacctccggcaagtctccctctttgatcgtaccggcggcaatcgctttaaccgcggcagctttaatggcagcagccagtgcttccttcatattcacgcttgacatcctcctcgatttccatcttcagcttaaatctgctgcgtgtctgtccttccagttctaaaacatattccaaatcgatatgccagactttgtcgcggcagtaaacatataaatactctgtcgtcagccgcatcggcaaagccagatatggagtccggtacatactttcactgaccagacctccggcaaattcctgcctgcaatccaccgtgccgctgcgtagaataatgactctctcataatcccacttgatagtagttttagtgcctgccagacctgctgcttcagattcatcataaaaaacataatatttattatttttttctgccagtctcccgtaagctgtggtctcgatattttccgtccctacgctactgtgtgactggctgtaaatatgtattttcacaggctgcataacacttttcactccataaaaacgactagagcttactccctttcgccgcgttaacctatgttcgaaacggagcaagcccctcaatgcctgcaccttcctttcaataaataaaaggaacggtctacaaaacttcttcaaatattatatatcagtggccgtattcagtcaaggaaaggctgactcttgcacctgcggttaaaaaaagtgtataatatttatactgtttttgttgaattaaagaggaggggtcgcgatgcagcaagattggggcatcatttttgcatttggattgtattttttagcactgttcggcatagggattttccatatgaaaaaagaacaggatctggccggctatgttttaggcggacgtaaggtagggccatgggtctcggcaatgagtgccgaagcctcagatatgagcggctggatgctgatgggattgccgggctatgcgtatgtagcaggtgtcagcgcattctggatcgctatcggcttggcaatcggaacctggctgaactggctgtttgtggctaagcggctgcgtgtttataccaaaatagccaacgattcgatcactttaccggatttttttgaaaaccggttccgcgataaaacaaaaatcctgcgtgtcgtttcggcaatttttatttttattttctttcttatctatacagcttccggtttcgttgccggcggacgcttattcaatactgtttttggactgccttattttgaatcactgctcatcacggcaggcattgtagttttttacacctttaccggcggttatgtagcggtctgccgcaccgacttcttccagggctgcctgatgttctttgcgatcatcatcgttcctgtaaccggtatttttaaagccggtggtccggtaacagcctttgaaaaactttataatatgaacgccaactatttcagcttttttaccgacgctaccggcgtcacactaagcgctacggcaattatttctctgctggcctggggcctgggttacttcggccagccgcatatcctagtacgctttatgggcatcagctctgccaaagagatccctcaggcaacccgtatcgctatggtctgggtaatcttttcactgttcttcgcagttacggtcggacttgtaggacgcgtgttgttgggcgatacgctgacaggcgtcaatgccgaaactgtttttatggttcttaacaatgaattcttcgtttccttcctggccggcatcatcatttccgctattttgggcgcgatcatgagtacttcttccagccagctgctggtaacagcttcagcaatctccaccgacttttaccaagcgctgctgcgtaaaaatgccggtgaaaaagaactggtttttgtcagccgtttatctgtaattttagtggcctgctgctcattagcgctggcttccaaccccaacaactatatcctggagctggtagcatatgcctgggcaggcttcggcgcctcttttggcccgcttgtactgttcagccttttctggcgccgcactactatcaaaggcgctattgcaggcgttttcttcggtggcagcacagtgcttatctggaaagaattttttgcttacaccggtatttacgaaatcgttcccggtttcatcatttcagctctggctatttatgttgtcagcctgctggataaaaaacccgatgcttctatagttaaagactttgacgtagctgaagcccatattcaggatatgtaaaaactgtttaaaagcacccgcagatttatctgcgggtgcttttttatatcctataaggcataaatatcataaaaaataacgcctgcattttcgcagacgttattttaaattttctttttacaaaatattttactttcccctaccgcgcatatttgctttgatcaaagctacaacatcacctgaaagcagcagtcctgtcatcgtcaacagcataccgaaggcgataaccgctgtgattttctcatccagaacaataacagaggtaatcacagtaactacaggtgccagataaatataggcactggtcttaatagctcccagcagcttgactgccatattccaggtcacgaagcacatcgccgacgctccgacacctaaaaacaacaaattaaacagattgacaggatcagccagccgctcaaaaccccagcgaaaatccataaacagcagtgccggcagcataaataccaaaccatacatgaaagtatgccgtgtgctttggatggcattgtaaccaaatgaactgatttttttagacaatacagcataaactgcccatgtagcagctgccgctaaagccagaaaatctcctaaaggattaatctgcagctgtgtagcactgttgaaactgatcatggcgataccggcaatcgccagtacaaacccgactataaattttttctgcagagcttcgcctgccaaaaaacgacaggccagtaatgctgtaaaaaatggtgctgtggccgtaataactcccacgttagacgcaggagcatacacaagcgcaatattttcaaacagataatacaaagtaataccgcttaatccggcaccggcaaagatccattcctgttttttatcagtcaccttcaaccgatatggatagatcagaaacaaaactatcagccccataataaagcggaaaaacaaaatctctatcggagtaaagctgcgcagcaatactttagttgaaatgaatgtcgtaccccagagcaagatcgttacaagagcaaaaagatgccccatcaaaattttattctgcatagcttctcctattgttttactctaaaaatattacggtattgccctggtgtcaggccaatgacctctttgaaaaatttactgaaatggctttgatcactaaaaccggtcatcaatgcaacctcagcaggttccaggtcctgagcaagcagttccttagctttgccgatccttattgtttccaggtaacgataaggcgtgataccttccgttttcgtaaacagccgcagcagggaatatttgttcatacaagccacagctgccagttcttccagcgtcactttttctgtataatgccccagcagatgttctgttactctgcgtacaggcggggctttcgcctcgatagaggttttactgataccggcagcaacaagctgttccagcaaaaaataaaaagtttcttccttcgccaggtcttcccgttcctgcataatcatttgatgcagttcacgcaggagtgatccagacaattcgtcaccgcgtaaaacagggctggcaaacagcggcacttcctcactgcctgtcaattcctgcataaactgactcataatctccggtttaatattcaggcagcgcagatcaagcagatcattatccattggttcgcagttatgcggcacgcagggattgaacagcagcacatcaccggcagttatataataatccacattatcgtagcacatatgacgcaggccactcttctcaacaaacccgagcacataatattcgtgaaaatgctgcgggaatttctgcaggattccctgaaaccaataggcttctatctgcagttctttatcatattttacaaaacgtttttcatttttcacagcaggctcctttttcttatcctaccaaaaatctaccgtgccatcttgtataatattgactgcaattataaaagaacctgcgtaaaacgcaggttctggcaatcaacgcatattttcgataaaatcttcaaaattattgatgagaatcggatgacctacgacctttaaatcacgcaggtgcgtaccataagattcataaatattttcagcaagctccattttcagaccttctttaacatattcttccatcattttaacgataaagcggttgatctctcctgtttccggtttaacattgagcggaatgatacgttcttcgggttcgtagctttcgacagtcacatcccagcctccgggaataggcggcagccgttttgccaaaatcatatactcaggcgaaaaccctacatacgcatctaatttattttgtaattttgctttcgtaacaggataaccgttagcattgccccatttaactatttcatcacaaacttcgttgttgtgaataacactggaaaatgtagtttttgctaaaacttcagccataatcatacctcccatatggtaaaattctaacttctattgtactttatcttgccgataaattcaactcattcgcttttacctctgtaaatctagtaacgtggtcaaagaaaaagcactggccaaaggccagtgcctgaaaatactgctgattaaatctgtcccagtgccttcaagatagtctgcgcaataatcgcgctgccgatataagtgcctgtaaaaactacacaggcaactacaacgatccgccagccgctcttggcaaaagcatcaaggtctttgccgatagcgataccggcataagcgagaatcggagtacaaagctgtaaaaagcctacttttttaacagcttcattgatcacgtcactgccgggcatagtcggataagtcaggatacagcccaaagttacgatataagcaacagcagggatacgtcccggcaaatattttgccagaacaacaccggcaattgccaaaaatattaaaaatagcagaccgggaattgcttccacgatagtatatttggtgccaatagcgttggcgacaagagacatggcgccgacaataaataatacgatcagtgtatctttgattttcattttgcagcatcctttcctgtcggttcaacaccgtatttgaagcggtagattttcttatacagccactctgtcagcggcaaagccatccagatgcacatatacaggccgtcaagaccggagagcatattgctggctgcaccaaaggcagcgatctgatccgccatctgcggatacataacgcttaaagaacctacagcagcagtcatcatactggcagagccgacgccggctgccattgccagcgcataaggatggaaaggcaggtacgcagctgcaaaactggccataacaccaaagaaaatagtcccaaaaaccgtaccggcaatatacactcccataactccgcgcccttcagcagagtcaagaccataacgctcgccgatcaaagctacgttaggttcacgggcaatggagtgagccgcaccgatagtttcacgtttgaggcccaaataaatagccacaggcacaccgatgaaaacagtgcccagattaccaaactcctgcagtatcaaagccggagaagccgccagaattttaggcagcgtcggcccaaccaaagtaccgtaacgtgccatcagcagcatcagtgtaatgccgatcagcgagcttgcatccagcatatccttttgattaactacctttaagaatttaggtgccataaaaatacccataatcagggcatacagcatcggcagcagtacaatagtacctacgccgatcttgaaagaaacgttaccaatcatttccgcaatgatgatcaatgctaaaacgatggcatgaactttaatgtttttcacaaaatccaccttcccttttccatcattttcctgttacagcttataattactgaaaatatttatcaagcttggcgatgtattcttcttttgtcagcagcgggtggtgctccgctttgatctgacgcgctaattcggcatcgtcggccagcaaatcaacgatcatcatcgcaaaagccttagcaggcaacaatacagcatgcttaaaatcgactacatgaaaatctgccgtatgcaaaaagccgtcgaccccgccaataaagggatgaataaccggcagtaaatgcgatacgtcacccatatcagttgaagcactgaaatgtccggcgtctttaactgctacattgggttcggcaattttagcattggttacgaacaactcattcagtctgttattgcaggccaaaggcaactgccccggcatcgtggcaataaccgtctgtgctcctacggcatcgccgccggctttcaatgcagtatccacctttttatgagtcgcttcgatcgcttccatggttttagcgcgtacataggtctcgatcctgacatcggcaggaacagagtttactaagtcgccgcctttagtaatgatcggatgaacacgaacaacgtctgcttcacgaaaagtttcacgcaaagcgttgattcccatcagtcccagcatagccgcattgagagcattaataccttgatcaggcgcatcggctgcatgagctgttttacctacatactgaattgttttaccaataaagccgttgctgctttcaccaatggatacagttgctgccggcatatttttatcagcatgcatctgcatcgccatatcgatatcgtcaaaagcaccttcataaataagttgccccttgccggtaagaaaatgcagtttgccttctttgatcaatttgttgcggtaagcaagttctacatattcttcagcaggaacgccaaaaaatacggcatcgcctgataattcactcaaaacaccagactgcgtaatcccgcaggctacagcagccattgttgcaacctgtaaattatggccgcaggcatgcgccgcaccggtcagaggatctgctttacaactgtccggacaccctatcgcatccagttcgcccaacactgccacagtaggtccgggacgtccgcttacaacgcgggctttgacacccgtcagggccaaaccagtctgaggtgtcaaacctaattgctgtaaaaaagcagtgactttagctgctgttttagtttctttaaagccaagttccggttccctttcgatatcctgcgctaaagcttcgactttagcggcccaggcatcaatagcggcgcatacttttgctttcatcacatctttgtccgtaataaacacctcgctttgaaatagtatacactttattcttgtaaatcgtttttaattatagcataaatactatcagtggtacaggtttaattctaagcattttgtttgattatgaacttttatttctttaaactttaccacaacttacaaaattttacaattccattatattttgtatactttattcatatttttaactttctgcgataatgtctgtcattgcaataatttgcattggaaaataccctgtgctaaaatatataagttaagaagtcactttaaaactgtttacgaaaggagtctgtcatgttagaccaaattaaaaccgacattgatgcagttatgcaccgcgatcctgcagccaaaaccaggctggaggcagcactttgttatcccggtctgcatgctatctggctccaccgtttagcgcataaattatacttaaaaggctgggtactgattccccggctgcttaatacattttccagatttctgaccggtatcgatatccaccccggagcaactcttggacccggactttttatcgaccatggtatgggccttgttattggcgaaaccgcagaacttggttctaatgtcacgctctatcagggagtaaccctcggtggtaccggcaaggaaaaaggcaaacgtcatcctacgatcggcgataacgtagtcgtttccagcggtgctaaagtactgggatcctttacagtcggctccaattccaagatcggcgccggttcggtagtattaaaggaagtaccgccaaactcggtagtagtaggtgttcccggccgtatcgttaccaaagatggagtccgcattgccgccagcgatatgagcagccctgacagcatgatcgatctgaaccataaccagcttcccgatccagttgccgattacgaagaccgtctggcagattatatggtacgtatggacagcagactggaagaactggaagaaatcatcaaaaaacatcgcgagcaaaatgaaaagcgaggtaacaacgaatgagcagaacaatgaccatgtcggaagctatcaatgaagcgcgccgctgtttgaattgtgcacgtcccacctgccgcaccggctgcccgatagccaacaatatcccgcagtttatccgcgcactcagtgaaggcaatatcggtctggcctacgaaacaattgccgaacgcagcaacctgcccgctatctgcggacgtgtatgcccgcatgaacgtcaatgcgaagctcactgcgttttaactaaaaataaacacggaatcgaaatcggcagtttagaaatgtttatcgctgatttcgctcacgaaaataatctgaagccacttcctccttctaccggcaaacgcggaaaagttgccgttatcggcagcggacctgcaggtctgacggtggcaggcgatctagctaaaatgaatttcgccgtcactattcttgagggacaatcagaacctggtggcattctgctgttcggcatcccggaatttcgtctgcaaaaagacgttgtccgccgcgagatcactgaactgctgcatttaggcgtagaaatcaagaccaacatgctggtcgggccggactttacagttgatgatttattcgaacagggctatgatgctgtttttatgggtacaggcacttctctgccacgtactttagatatcccaggtaaagaactgtccggcattctgactgccacatattttctgcgtatggtagtactttcagattccggaaaattagacgaaagtgaaaccctgctgcatgacggcgataacgtagtagttatcggtgccggcaatgtggctatggacgccgctcgtacggcaatacgccgcggtgcagaaaacgtgactatcgtctatcataaaaccgaagccgaaatttccagcttcccgtctgaatacgaagcggcagttaaagaaggcgtacaattcaattttctgaagcagcccattgcttatctgaacaaaaagcagatgcgtgctttaaacaatatccgccgcaaaccggcagaatctgacgaaacagatctggctggacttttagtacaaaacatcaccaaaactgatgacggtcagttcgtaaccgaaggcggtcaggaagtcattccctgtgattgtgttatcctggctatcggacagcgacctgcagcccgtatcgtttctactaccaaaggtatccaggtcgacgaccgtggttttgttattacccgtgaacgcccttacggtatgactaccagagccggagttttcagcagcggtgatgtagtacacggccctgcaaccgtagttttggcaatgaaggaatctaaaaaagtagcggcaggtattgctcaatatatcgatgcaaaaaaactgctggaagactgctgtgaagattaacaaataactaaagcccctgcttaaataagcaggggctttacttttttcacaaaaaacttctgccgcaataggcggcaggagtttaattttaatattctacttttggcagcgtagcaaagcctttttccaaatcttcatcagtaggaacataatctaccatagttccctgattataagcctgataagcggctaaatcaaaatagccagtaccggtcaaaccaaaaacaataacttttttctcgccggtctcacgacatttaattgcttcgtccatcgctacacgaatagcatgtgaactttcaggagcaggcaatgtaccttcacagcggcagaacatcgtagctgcttcaaacacttttgtctgttccacgctgcgcgcttccatcatcccatcatgataaagtttagagacgatcggcgacataccatgataacggagtccaccggaatggttaggtgaaggcataaatccactgcctaaagtatacatccgcatcagcggtgtagtttgtccggtatcaccgaaatcaaaagcatatctgccgcgggtcaaggaagggcaggaagccggttcaacggcaataaaatgaatattattttttccttcaagcttatctgccataaacggcgtaatcaacccgccaaggttcgaaccgccaccggcacagccgatgactatatccggctgaacaccgtatttatcaagtccgagcttagtttccaggccgataatactttggtgcagcactacatgattaagtacactgcctaatacatagcggcagttatctgttttcatcgatacttccattgcttctgagatagcacagcccaaggacccgcctgtaccggggttttctgccaaaatcctgcgtcctacttcagtagtatccgaaggtgaaggaataactctggcaccataagtttccataacggccttacgataaggtttttgctcggctgaaaccttaaccatatatacggaaagatcaatgccaaaataaccgcaggccatcgaaagagcagtcccccattgtccggcacctgtttccgtagtcaggtgagtcagcccctgctgcttagcataataaacctgagcaacagcagaattgagtttatgcgaaccggaagtattagtgccttcgaatttgtagtaaatttctgccggcgtacccaacgctttttccaaattataggctctggtcaatggtgatggacgatacattttataaaaatcacggatttcttccggaatttcaataaatttattggtattatccagctcctgctcaatcagctcgtcacagaaaacagggcgcagatcatcagcagtacaaggcttaaaggtcaccggattgataaacgggtccggagcctcctgcatataagggcgaatattctgccaatatttcggcagctcatcttcagataaattgattttatatggtatttttgtcataagtcaccgtcctttctattctgctttagcggccttcagcgccgcatatgcttctttgagcagtaaaacagtcagtatcagcaaaacagtagaaattcctgatacgatatagttattcaaattagcggcaatcatctgtaccaaagccacaatagtagttaccagcataaaagccatcgggtacataatgaatccggcgctttttttcagagaacgaattacccaaacacccattgccaaaagcgcaatcgcagcaaccagctggttagtagcgccgaaaacaggccagatcatctgccatgcagcaactttaccggtcttaacaaaaataagagctaaggccacaccaacactgatagctgtagcaagatatttgttcaagctcatgcctgtaaattcctgcagctgataacgcgccaaacgggtagccgtatcaagcgaggtaagaataaaggagttgagagccagtaagccaagtgcagtaccaacgcgcggagaaatacccagcagcgaagcaaactggcctaagccgttgccatacacaacagtcggaccgccttgcagcatttcgccgctcatcataatcgtacccaacgcaataacgccaacaacaccttccagcagcatagcaccataaccaacaggaacagcatcagtttcgcgcttcagctgtttggacgtagtgccggaagcaaccagagaatggaatcctgaaatagcaccgcaggctactgtaataaacagcagcggccagagccagtctccggaagcagtaacaaaccccttaaatgcaggtaattttacttcatagctggcaccgccaaaaatcatgcccacaccgccgataaacacggaaaaatataacatatacgaggccagataatcgcgaggctgcagaagcagccaaacaggcaatactgaagcggcaaagatatacacgatcaaagccatacgccaggtatcaaggctcagagcaaaggttgactgcacccaggagctttctataccaaatatcagcgaaccgaataaaatcggcagcataataatcgtactgacttttaaagatataccatagtgataaatagcgacaccaaaaaccatcgccagaaaaatatacagggtcgctgtgaaagcgacagcggggtcagcagcaaaggtctgtgctgctaattccaaaaatacagcaattaccagtgttaaactgagccaggtaaaagcaagaaataacttgtggccgcgggcaccgatccattgacggacaacttcgccgatcgacatacctttatgacgaatagacgcaaccaaagcacccatgtcgtgtacgccaccaaaaaaaatacaaccgataataatccaaagtaatgttggcagccagccaagtgctgccgctgccgcaatgggacctacaacagggccggcaccagcaatcgaggcaaaatgatgccccatcaaaaccgccggatgagcagggcaataatcaatatcgtcctgtaattcagtagccggagttttacgatttgggtctaaatcgtaaaaacggctttgaaagccgccataaaatttgtaagcgacagcaaaacaaagaatcgtaattacaaaaatggtcagtaacataaaatatccccttcgcgaacttattgcagaattattctgccgcagcgccgttgctgcgctaaatagatcaaatcatcaaaacgcttttccgcatccccctccttatactgcaatatttccaaccagccgcgtataccaagccaaaaaactttttttgtcaatctggtctcatggcagtccaacagcagaaacctgtgcgtcataacgtcttccctgctctgccaatgttcccgcagccaatttactgatctatcgccttcatgacggatcactatataatcatccgcataatagcgggcaatttcacctgccagacaatccttgacaaatgcagtctgacgataccatccctgcatcccgccagctgaccagggcacaaagccataaccttttaaaaaatcttcccactctttcatacagcgctcctgtctacaagtttgctttacgccaggcgttcaacgcgccgcagaaatcttcccacaactggggcagcatttctaccgccgcctctgctttagcgcgttcccatccggcaaacagccctgcctcatagcgcagctgcacattaccagcatcctcgagaaaacactgcactaacttagcgttgataaaatcatcatgtaaaaagcccagcatatcctgcagtcttttcaaccgccgcagcagattactgtcgcgcggtacttccggcaaagtctgcagcgcataacgaaaacgtttgatcttaatcctgatctggtgcagttccagcatattatgaaaatccggatattttctatcaatagtttccagtttttcactccactcattcaaacgtctgctgataaatttcctgatttttttatcagccagatttgaagccagtggcctctcatgcaaccaaatactgaactgcgccagcgttttggtcatgatgctaaggtccgccttctgcagacatgctgcagtttcctccacacgcagcttctgcaggagctcttccacctgagttggtactgtcagcttaccgcctgaagcggctgcctgcaactttattttttcacaggtcattaaagccacatccagctcacgcagccgtgacagtatttcaccctgctgccgcagggtattttgccaggcaactgtactgtttttttgcagcaccggtttaaaaaaactcaaagtcgaacgcagccggcgcaattttacccgcagctgtcttacaaaaaccttttcttccggctgctgcagaaattgctgccaggctttactgaccacataaatctgccaaggaagatggcaaacggccatcgcctgcagactgccatttttataggcaggcagcttcctaaaatcataggttccgttctcctggaccaaacgctgcttcagatccggttcggctataatcagcgacatccggcagcaaagtttttcgacaaccgtactcagcttcgttagctccttactggtataaacaacagtcatctcgcgaagaggaagcagcttggccgccatgattacgatgccttctttcgcaataagccttaattcactgttttttaccggcggctgcaactccgtttcgcggcatctcaatactgcctcttccccgtcgatctcaaaccgccgttcacattcttcagttctgcaggctttccagccggtaatgatacgcaggcgttcagccaaatcgacttcgctcacacctgatacatcttgcaggcataacattttcttcactgctccccctcctttcttctggtctgttttacttgtcagtcttttatttgcacctgcgccggtaagggatcccccgccaaacctgccaaaatattcgcagctgccagcttcgccatggcatcacgtgtttccaccgttgatgcggcaatgtgcggggttaccgtaatattggagagtgtcagcagcggatgatcaccgggcaatggttccggttcaaccacatcaatcgccgcataagcgatctgcccgcttcgcagagcttcataaagtgcctgcgtctcgacgactctgccgcgggaaatattgataaaacgcgccgttggtttcattttagcaaaagcttcttcattgaacattccagccgttgccggtgttaaattaactgttaccaaaacaaaatccgccgtttgcagcaaatcgtcaaatccagcataactgatgcccagcgctgcttcatcagcacgccggtgcctgttatgataaataaccttcattttactggcctgggccctgggcactacggcactgccaatgtcacccaacccgacaattcccagagtttttccagccagatcaacgccgaagccaaggcccttccgttcgccccatttgccgctttcaacgtgccgccagccacgggcaatacttctggcactatctaaaatcagcccgtacgcaagatcggcaacagcatccaccagtacgcccggcgtattacctactgcaattccgtgtgcgctgcaggcagcgatatcaatattatcatatccaaccgacgcctgagcaattaccttcagcttcggcgctttggccaggaaagcttcatcaaccttaatattgccaatagaataaagtccttcagcttctgcaagccagctgtcaaattgttcctgcggcactttgccgccctgctgccatgacagcagtctagtctgttcattcaatatatcataggccacctgccgcagtttaccgctggcagccacagtcatttttttcagatcggtcattactgtcacttctctttaaaaattaatgtttgggaataatttccagccaataattatcaggatcagcaataaaataaatacccatcgctggattttcatacacgatacagcccatttcctgatgttttttatgggcagcagaatagtcttcagcttcaaatgcaagatggaactcattctcgcccaaattatacggttccttacggtcacgcagccaggtcaattccaactgatgcggagtctgtccgtctcctaaataaaccaaaataaaactgccgtcacctgctactttacggcggacctcttttaatcccaaagcgtcctcataaaatttcaggcttttttccaagttaagcacattaaaattgttgtgtaaaaatttaaataccattttttaccctcctttaatattgtactgtttcaattattcaaaaaaatctgcttaaaaagcagcagcgccatcgcaaacgatgcgacgattttgccaagcatggcaacaaactgtgtctgtgctgccttccaggccagcgcgaacgcattctccttattcctggtacgcataaactcgtaaccgaaggcaacgatatacgaaccaactgcgccgcccaaaacagagcccagcaccgggaaaaagcctgtaccgatgacagcgcctataaaagtaccgacagcaatcagaaataccgcaccccacgatactttatgccgccgaattccaaaaaacgatacgataaattcccagatctcaccaaaagcataaaccagcaccagcgccgataaaagacgtccatcaaagtatctggcttcatcaaaaaaagcataacctatgcctgcagctaacataattgtattgcccggcaggtcgagcagcgtcagcaacggacctacaaccacgatcaaggctccgaatgcccactctactaaaaattccacacaaagtcctccttaacgaagattaaaatatattataacatatttatgataaatagttagataattgtatgactcttatgtgaattattgttttttgtttacgcaaatgttacaatatctacaaatatcttttagaggagtaactacaatggatctggacgctctttttattcttctgcagccctggctcagaccttttctggcgtttgttttttttacatttttacgttatttttacagagccgtattactgcgtgtactgcatcgttttaacagcaaaacatcctttgaatacggagaagacctgctgaacgcttttgaaaagccagtgcattttttcctatttatttttgctatttatgcagcgcttaattgctcgcctttgacctttatagctgaccatccttctatcgatcagcttctgcgcagctttttcatcatctgtttcatctggggcctttacaacctcagcgacactacgcatggtatcgccatgaaggtactccttaaagcaggcgttgaatttgatctggcgctatccaatgtggtttccacaaccttacgcatcctgcttatcattttgggttttgtcatgatcgccaaagaatggaattacgatattaccgggtttatcgccagtttgagtattggctcactggctgtcgccctagccgctaaagattctctggccaacgtattcggcagtctggtcatcatcattgacaaaccttttgtgatcggcgactggatctcggctaacggcatcgaaggcactgtagaaaaaatcactttccgcagcacttgtctgcgtacttttccacaggaacttgtctatatccccaactccctgctctccaacacggccatcaccaatttcagcaaacgtgaaaaaagacggcttgattttgtgttgggattgacctacgacacgacctatcagcaaatggaaaaatttgtcggccgcctgcgcgaatatctcatgcatcatgatggtgtttatgacgacggcatcaccgtcaattttcaggatttcggtggcagcagcctggacatcagaataatctgctatactaaggccagcgcttacgccagttttatggatgtccgccagcaaatcaacatcgatattatgaaaatgttagaagaagaaaatcttggctgtgcattcccaagtaccagcgtttattttgaaacaccgctggtccaaaagcaagcagctccaccaacagatgcccctaaaactgaagtacaagcctgaaacataaaaaacgctccttttttaaggagcgtttttttatattttattcccatagatcaacaattgcgaatttaccaacatcgaccaagcctttatcgctgagcctcaaactgggaataaccggtaacgccagaaatgaaaggcaattaaaagcattcacattttccggcactcccagttcagcagtccaaaagttcagctgctgcagcttatgctgcacaaattcagtattctgatcactcatcagaccggcaagaggcagaggcagcatagcttttacttctccatctgccaccactgccaggccaccgccggcttcctgcaaagcaactgcagccgtcagcatgtcctgatcgtcaaccccgaccacaatcagattatgcgaatcatgcgctacagtcgaagccaaagcaccgcgctgcaaaccaaagccccgtaccaggcctacacctgtattcccattactaccatgtctttcccaaactgccagttttagaatatcacgctcagtatcactcacaacgaaaccagcttctgctttaggctgcacatattctgtttcagtcaaaatctgctctggaacaatgcggataacacgggcctttctgccattcattaccggcaagcgcagctgctgttcacgcacatcttccaagtgcatggtattctcaggatcttttagcagcggcggtgactgccagagcagtttttgtttatttacaataacgacaccgttttttaggaccagctgtggctgaaaatttaccagattattaaaaacacagatatccgccttataaccgggtgctaatgcacctctgtcatacagtcgaaacctttctgctgtattcaaggtcgccatctgtaataactgttcaacaggataaccatgcgctgtaccaatctcaatcaaataattgatgctgccttcactcacaagctcatctaaatgcctgtcatctgttgccagacagcagcggcggcaattaagcggcgttactgccggcagtaaggctaacaaattatgggccccagaagcctctctcagcatcagataagcacctcggcgcagtttctccattgcttcatccgccgttgttgcttcgtggtcagaactgatccctacggccagataagcattgagagctttaccgcttacacctggagcatgcccatcgcacaggctgcagccagccaacgcaagtttatcaagcactgctgccgcagcattgatcgtccccggataattcatcatctcacccaatcccagtactcttggatgactgaccagcggctctagctttgcagctgtaagcacggtaccactggtctccatttcagtagcaggcacacaagaaggcagcataaagaaaacgtctaaaggtattgcctctgtttctgtaagcatcaattcaatccctgctgttccaaggacattagcaatttcatgaggatcggcaaaaatcgtcgttactccattcaaaagtaaaatttttgccagctcacgcggagcaaccattgtactttcaatatgaagatgagagtccatcaaaccgggagtcacatatttaccggtaacatcaatttcttttttaccgctgtagctgccgataccggcaatagtttctccaactatagctacatcgccaatttcccattcacctgtaaaactattgaaaatacaaccgccttttaacactatgtcagctgggacttcgcctctggcagcagccaagacctctgtcaaatctatattcttcatcacaattcacaacctttaccaaaagttctctgcttttattgtcagtcatacacagtaaaaacgcaagctttattttatttatttcttcactctcagacctggttttgtattttacattcccacctttaaaaaggtataaaaataacaggcgccaccgaaactggtgacgcctgttatcaaggggaaagggtatctatatgaacggtagctgaccgttattttttcaaaacggtaacgtaatatttaccattttctacttctacgccatgggaatcatgttcaaaagcagggaattgtctgtcaaagccttctaaggctttcagataaccaagtgcagggccgtcggcaggaccggcattttcaccaggcatgatcagcggaattccaggcggataaggaacaatacctgtagctaaggtacgctcagcaacaccgtcaagatctactttttcaacattatcaagcaccagttgttcataagctgctgccgggctcatatcaggatgcggcaatacagcgaaaccttcggacataaattctgtcgttttgagctctttcattgctgcaaacatttcctcgcacaagtcgcgcaggcccatacctgcataacgctgcggagctgctttaacaacatcaggcaatacttcttccaaagcagtgttgttgtcatagtcttctttaaatttgatcaaggtatcgatcaaagtgccccatttacctttagtaataccgatagagaacagcatcagaacagtaaagtcagttgtcttctcaggaatgatgccattggcagtaagataagcggacaaaatggaagcaggtacgcccattttacccaacccgtcaggaccgatgcccggagtggtgatagatactttgatcgggtctaacatgcagtatccgtcttcgatatcaccgaagccgtgccatgcgtcattaggatgcaggacccagcattccggttcggtagccaggtattcgggattggccagacgaaaagcaattttcttgccttcagcgtctttaacaaaatcaggctgccagcagttaaagaaccattcgccctgatcggcaaagtctgcattcagttttgccatcaattgacggaaggctactgcttcatggatcgattcgtcagtcagcgctttaccgcctttaccatccatcattgctgctgtgatatcgttagaagcaataatcggatagttcggggaggtagatgcctgcatcataaaggattcattaaaacggctgtgatcgacattctttttaccttcacggatatgaatgaaggaagcctgagaaagagcagccagtaatttatgggtggattgagttgcaaaaaccgtcatatcagttggtttgtggtcggcaggattgccgtacatggcaaagcggtctttataaataggattgaagcgggcatagccataccatgcttcgtcaaaatgcatgcggtcaacgctttgtccaagtaattcttcaacacgacgggcattgtaacacaaaccatcataggtggagttggtaacgattgcatgtacaggagtagaatctatatctttagtaatcaaggagttttcagaaatagttttcttgattgcttcagcctgcaaagcttgcggcgggataggaccgataataccgtagaagttacgcagcggcatcatatagttagggatagcgccgctcatggtcatcgcctgttctatggatttatggcagttacggtcacacaatgcaacctgattatgagttacgcaagccataaagattactctgttagaggtagaagaaccgttggtaacatgataggtacgatgagcgccgaatactttagcggcatatttttcactggcaccgatcggtccggaatgatcaagcaaagaaccaagctcgccgacagagatcgataaatcgctgcggaacagattttcgccaaagaaatcaaaataagcacgtcctgcaggtgctttcataaaagcagtaccgccggtatgacccggagtatgccaggaatattcatgcacctgagagaatttagccaaagccttaaacatcggcggcagcagatttttcaaataagtatcaatcgctgcttcgatacggccggcaataaagttagcagtatcttcatacaaccagatgaagtcactggtttctttcaatacttccagaggaatatcagcaacgtcggcacgatctgcaaataaaaatacaggtacgttttcggcacggctgcgcagtttgtttaaaacatctttagcagcctgatgtgtattgtcttctgccagatcccagtccagaagtattgcttggatcatcgggtcagcgacaatcatcatttcggcatcgaatgctgttgtagcgttgagcacttcaatttcatgttctcctaaaacattactcagtttatcgagagcactttcatccagggtattatgatcgcaaaggtcatgtaccaacaaaattcttttgccttttgttttggaaataatcatttttttcactccttaattaattttttagttatctatgctaacagattgagtagtagtagaacctaccttatccggagcttgtgtagtagtcgttatgttagtacgatgtttgagttccatatttttatcgataccgacagagtaccagaacgtaccgaccaaggtaaggatcgtaatagccagggaagtgtaacgaacccatctcggcgagaatccgccaggagtttcgtgcagctcttccagctcatgttttctggtaacagcgccggagaagaatacgatcgtagcgataacgaagatcagtgaccaccgtgtctggttaccattggatgttacaagtgcagccatactgtagacagctgctatcaaaccgatgatacatgatttattgtaatctttcggtgataactttccgtaacctaaaaccttgatagaaatactggaataaatataaggcagtaaagtcaggataacggctattgatgcgatcttaccaaattgctgactggcagacggcgacatggttgccaaaacctgtattgtcatgataccagcaacaatagccaagcctgcagaaggcacgcctttagagttggtacgggcaaaaacattaccgaacaaaccgtcatcagcagcagctttagcactttgtccaaccagcagcgtccagcctgccagcgaacccaggcagcctaaagccgcacagatagctacgccgttaccagcgatttcaccgaaggccagtcttgcggcatcagcaaaaggtgccgatgaatttgcaagtgcatggttcggaatcatgcccataataacagaagaacttaaaacatagcagacagcggctaaaattacaccgccaatagttgcaattggaacattctttttaggatttttaacaacgccggcagatacagaagcactctcgacgccaataaaagcccacaaagtaaagttcaatgtcataccaatagcactgacagtgcttttacctgttacgttccatgcatccatgtaggttttgccgtcaaaccagaaccagcctaagattgcggtaccgataataggaatcaatgccagagtagtggttactgattgaatacgcccgaccagtttagggccgatcatattagcgtaagcaaacagccagataacgcagatctgcgccagagcaaaagcaaatggattttttaaagccgggaaaaaactgatcagataaccgatacctacaactgccagaccaacgttaccaataacatttgccagccagtaaatgaggtttgtctgataccccatataatcgccgaaggcttgacgcgtataagcgtaaggaccgccggcagcaggatcaatagaagataactttgcaaatgtaagtgccagagcaatagcacctatacaggtaactatccagccgaatactgcaacgcctcctattgccgccaaattcgcaggcaacataaatacgccggaacccatcatattaccggcaaccatcaatgttgcagcaacgacacctattttattactgttgtcgtcttgattcataataaaacctctcctttcgattatttgccgtcagcagcggatgggaatcttggctttcggcaaatcatacataaagccagctttgcagcatttttctttatgcggtttcttgcttcggataaatcttacacccgttacaaacaaaatatccaagcaagaaattttcatttactttttaatatgtttttttaaaaaagttagagtaaaacgccagaacttctatcgtaacaatcccgcctgcatgggcttgccgccaacatataattttctacggagaaataatctccaaatcatttttacgtcttactgatctgagttatttttttactttgcttaatttactaaagtattttccacacaaaaataaactgtgcgctaatacagcagtagcttaagcctcaagcaacccctggcagctttttatattgtaaataaaccaattgttgcatattctcacagctaaaaaacaaaaaagccctgccttataaggcagggcttttttgttttgattattattcagttattttttctctactgctttgcaagtcaattattccatattaatctgaactaaaataaaatttcatgagtttcatatccttagtactaaaatgcatatccacatttttccaataatagttttgccaacaaaaaaacgcgcctgccgaatcggcaaacgcgtgtgtttactggtgtcctggaagggaatcgaacccccgacctatcgcttaggaggcgatcgctctatcctactgagctaccaagacgtaaatgttctattgttttcagaacccttttactataacacaaatagagaaagcgttcaatcacaaattttctgtcattcccggaggcatactccattccaccaatacgtccgtattgaaccaaagtcttgtcaggcaaattttaaaattatcaaggttttccaacggatccagtgttttagtaacaaattgccggaccgtatcgccttcctgcacatccaaagtcagcttttcatttaaaaatttttctactttggcttttgcttcagcaacgcctaaaacaatttctgcttttttattttcgctatcatattcaacatagccataattgccatgatagttcaaggttacagcaaatttgctcattctttttcctcctcaaaacttctgcatacattatagcaactcgcagcaaattctacaataagcagtattacttacgcgattaaattactctttactgtctttgctgtacatgggccgcagtcttacttccataggaattttatcagcagcggccgccaaaagcgcttcctcatataaggagctctgagcgcttacaggcgttgctttattggtgacacgtctgtaggtcccgttagactgcatcatatgcgcaccgacattatcccgcagatacaagtcaagaatctctttgatacgcttaatatgctcttcgctctcgaccgggaaaaacagttccacacgatcattgagatttctgggcatccaatcggcactggacagatacagttgctgttccccgccgttagcaaaccagaagatgcggctatgctccagttgcctgcctacaatactgcgaacagtgatgttttcgctgatcccttccactccggcacgcaatccgcaaataccgcgtacaatcaattctacctgtacgcctccgatcgaagcttcatataatttttgaatgacctgctgatcgatcaaagaattcatttttacaatgatgtgtcccttgttgccagctttgacctgcgctatttcattatcaataagctcataaattttatcgcgcagccctaaaggcgccattaccagtttattccataatggcggctgcgaataacctgacagcagattaaaaaatgccgaggcgtcgctgccaaactgatcgttagcggttaaaagtcccatatctgtatacagcttggctgtattgtcgttataattgccagtgccaagatgaacataacgtttaatgccatcggcttccttacgtacgataagaatgattttagcatgagttttcagccctacaagtccgtaaataacatggcatccggcttgttccagacgtctggcccagataatattattttcttcatcaaaccgtgccttaagctctactaataccgtgacctgctttccattctcagcagcacgcgccagtgcggctacgataggtgaattaccgctgacacggtataaagtctgcttaatcgccagaaccttggggtctgaggcggcatcactaaccagctttacaacaggatcaaagctttcatagggatggtgcagtaaaatatcttttttcctgatagcgctaaataaatcgctgtcatccggcaattctaaaggacgctgcggcacaaaaggctcatagagccacggccacataccagacagactggcaaatttaaagaaacaggtcgcatcaagcggtccgttaatttcaaaaatttcctgttctgataaatcaagattgtcgctgaggaattttttgatacgcagattagctgttttatttaattccaaacgcactgctgcgccacgttttcgtttacgcagagatttctctacttccttcagcaaattatctatatcgtcttcatcaacgtcaagatcagagtcacgcgtaagtctaaacggcactacatccaaaatttggcagccgttaaaaagatcatggcaattttcaatgataatatcttccaaaaatacaaaggtccgcttgccttcaccctctacctcgacgagccgcggcaatactgaagggacctgtaccaaacccatgctttgctcttcgtcctgattaatgatctctaccgccaaattcagtgtcttattcgccaaaaacggaaacggtctggaagcatcaacagccataggcgtcaaaaccggataaacaacctcacggtaatattcatccagccagccgcgtcctttttcactgatcttacttacacggcagatcctgataccattactttccagctctttaagaatcgacagcatatatttatactggagcttgacctgttcatgcgcagaagcgctgatttcatccaattgttccttgactgtaagtccggaagcatcgcgctgattgattccatcttcccacttatcccatagtccggccacacgcaccataaaaaattcatccagattagacgcggtaatcgcaacaaacttcaagcgttccagcagcggcgtcgttttgactgcagcttccttcagtacgcgcaggttaaatttcagccaactcaattcacggttaaaaaaatattcaggtttgttcaaatctatgcttttcatctattcactcacccgttctaaaattgctttcaagccgtaaacttcttcaaaaaatgtcgctttaccagcgaaagtccattcttccaaagtcaaatcgaccttgcttttagcttcaattaacatcgttccatctttaatgctgactttgcaaaattttattttttgctgataactgcggtccatcgcatcagctagacgcactaaggcagctattttcgctactaacggcgtcagttctttttccatttccgggctgccggccttgttttcaaagagctgattggcatggtaatagcttgccagcgccacgatttttttatcattatcactgaaccctaaaatgtccgttgacataataagcttataggtataaagcgaatgactgcgcatcgaaatatatttaccgatatcatgcagcagcgccgtagcctgcactaaagtgcggcagtgctcatccataccatggcttttacttaatttatcaaacattgccagcgccagccgttctacctgtttggcgtgcttaacgtcataattataatgttcaccgatattatggatcaggcttaattgctctttttcaagctcggcagcatactctttatctgtcttcggtcctatatgcagcagctgaatgccatcgataaaacgatcggcggtaataattatctcttttgtcggcactaaagccagcagctgttcatataaaagaatcgtcggcagtactaattctgccacactttcctttatcttgaatacctttatgatctgcggcagatttagtttgtggaccttattaaaaagttccataaactcctcggctttaatccttgttaccttagcctgagtatccagtcccaacatctgtaaaagcagttcggtttccgtaccggaaaggatcaaatagcggatattggcatccttcagagcttcacgcacaggccccatcgtactggccaaaaactctgtcagcgccagattgaactgcataccgttacgctgattacggttaaaactttctttaatcctgatgatgcccacatgaaaattctgctgatatttaattttttcatcatcaacaaaagtgatgcccaacccacccgaagaaatatccatcagcagcataccataatctttgccgttaatgccttcactgcgcaaagtctgcctgatcgccgtatacttggtataaatttcctggggcatatcaacaacttttactttcaaaccagttttgatataaatctgatccagcaaaaacacctggttcaacgcttcacgcacagcggtcgttgcctgcacactgcattcttccacaccatattcggacatcaggcgtttgtagccctgcagcagttcacagatttcgctgaccatactgaaagggataattttatttttaaaagtttcttcgcccaatttgactctgtggttgcattgttcgattacttttaccttattcatattgcggtattcaactatttgcatgctgatcatctctgatccgagatgtatcgcggcaaaggttgtatagcttttctttttcacaaacaaacctcctccattttatattaaattcgacatcagacctctaaatccttgcacaaacgttactttttacaattctttacgtaaaattttacaaaatcacttaaattacgcaggatttttttaatctgtgagtaatatataaaatatatctttttaatcgaggaacgttttctatttactgggagtgaaaaatatgcagcgtatcgcaatcatcgatatcggttctaactcagcccgtcttgtaatcagccatatttataaaaatggcgcttacaacatggtttataatcaaaaagaagcattgcggctcagtcagaagcttgataaaaccggtcgtttaacagaagaagctttcgcttcaaccctggaaacgatgaaaagcttcgcttatatgtgccggctttataatgccgacaaaaccattgccgtggctacagccgctatccgctcagctccaaacggccctgaactgacgcgtcttgtagaagcagaaacaggtattaccctgcatatcattacaggtaataccgaggcctacatcagttatctgggcgttatcaatacgctgccggttaaagatggtattatctttgacctgggcggcggcagtaccgaattgatcctctttaaaaacaggcagatcgttgagtctgtttctctgcccttcggcgcagtaaacactaccgatatgttcaatacacgcggtactatgtcacctaatgtttacagcgatatgagctttttcctgctcagccgtctttcacagcatccctggctcaaacaaaacaggctaccgcttataggcgtcggcggtacggcgcgtacccttggcaaaatgcagcagaagcgcagtaaatacccgtcttcaaaaatccataactacaaattttcagcacaggctttccatgatattttcagccagctgcgcagcacaactttagaacagcgccgtaaaatagccggtctcagcagcgaacgtgccgatattattctagccggtgccggtatcattaattgtttactggaaacaaccggttgtaaacaaatgatcatttccggctgcggtttacgtgaaggattatttttcgattactattccaaatccgaaaatatgcccctgatcgcgcccgatatcctggatcgcagtacgcagaatattttaactctctatacccctgacactacgcacagcaaacatatcaccgagcttgcactgactatgtttgacgcctggaaagatttacataagctggacaaggattatcgaaagctgctgaaaacagcggctctgctgcatgatatcggtatcaccatcaacttctacagccacgcccggcacagtgcgtatatgatccaaaacgctcagatttttgggctttcacatcgtgaacagctgataacttccgctatcgccggctggcataacggcatctccaaaaattattttcgggatcgaaactacaaagaattgttaaacgaaaatcactggcaggctatcaataaattatctttattgctggcgctggcggaaagccttgattattcacaaaccaatcagatacgcggcattcagccacgtatcgaaaaaaaacatgctgtactgacattacatgccgaaggtatacccagcatcgagatgcatcagatcaaacagcatatccgttggtttgccaaagttttcggtgtcgagctcagcgtgcagctgggataaaaaaatacctgttatttaaacataatcaacgtttagataacaggtatttttattttttattttgccgcagcctgcagaattccgtaaaccatcagcacactgttataaagatcttcttccagtataaattcatcgaccgtatgcacttcactcataccagtgcctaaaatgacacagggcacaccataagcattaataaagtttgcatcactgccgccgccagtcaccgtaacatccggtgtaaaaccgtttgccttgcaggactccagtgccagcgtcacaacgtcagaatcatgactaaggtcaaaaggctgatacttatgaatgatctccacatccaccttaccgccattagcaacaacacctgcagtgacagtattaaccagataatcacgctgagcaaccagtttatccagattacggctgcgaacgtcgctttggatctctactagatcaggaacaatattagtagctaacccgccatggataacgccgatattacaagtcgtttcttcatcaatcctggcatatttttcaacaccggctaaagctttagctgcaaccagaatcgcattgatgcctttttcaggagcaagtccgccgtgggcagttttaccgtgcactttaaaatgtaccctgtcctgtccaggagcagccgtaacgatttctcccggatggccctcactatccagagcatagccaacatcggcatgcagcaggctcttgtccatacagcgcgatccgttaacaccgccttcttcagcaatcgtaaacaaaacctggatatcaccgtgttcagcctttgtttcctgcagcatccgcactgcttccagaatagccactacaccggatttatcatcactgcctaaaatagtagtcccatctgacaggatcttaccatcttttttaacgaccttgatgccttcgcatggttccacgcaatccatatgcgcggtcagcagcacacgtgtcgctccgactttgttccccggcaaccatccccataaattgccgcattcgccgcctaattctttacctgcatcatcttcctgtgtcacaaaacccagatctttcagcttctgctgcagaagttcaaaaacctgcctttctttcagagtatgacagggaacagaaaccaattccacaaattcatcaaaaattctttctttgtttgcttctgccattgtcaacactacctttcaaaattataaattacagccagccggtatgttccaaaagaatcttcgtcccaataatgataaggacacagccgcccactaacgtagctctgctgccgatcctctctcctaacctgaagccagccaaaccacctaccatagaaaaaataaaagttaccagaccgatcagccctgccgcagtccagatatccacatctaaaaaagcaaaactcacaccaaccgctaaagcatcgatgctggtagctacagccaatgtcagcatttccctgatattataatgctgctttaaattacagctgtcagcagcatcggcctcacgcagcatgttgattcccaaatagatcaaaagaatgaaagctatccaatgatcataggtttcaatataagatctgaaccttattgcgcagaaaaaaccaacaacaggcatcagtgcctgaaaaaatccaaaccagatgccaaaacgcaaggctccactaaaacgcgaagccggagctaaagccaagctaccgcagatagaaactgcaaaagcatccatcgccagacctacggctaaaagcaataactctagtaaacccaaatctaaccctccacaacaagtttagtctaattcactggcagcatcagtcccaaaaatatcttcaataaaatgcttagatttttctttaacttctgcatccacatatccctgaacctgcaataaagcataagtaatagccacaaaatcatcactataacctaaaacaggcgtcaaatcgggaataaaatccaagggcgcaatcaaatagccgatagctcccgtaataagtgctttctgtttcaacggcacatcaggtttctgtaaaacataccacagctgcagcactttataaactgcccctacaccaattattttggcatatttccgcagtttttccttaaagctgtgctcgctgtaatcctgtttatatttctgcagttcctgtgtattgattttagaactgtcaaagcttttctcatcctgctttttatctgtcatcttctatcgcctcagcaaacgtccttaccatgatacttgattaaaaatcttctgtctttcctgatcttcagaacacgaaataaactggaaaccagcatcacaccaacggctatagcgcacgaatcggttattgccgtcagcagaatcgacataccgccattataatcattattgattacggcaaacatccctttatagatacctaacccaggaaccaacggaataataccgggaatgacaaaaacagttgccggctgtttaaaaatccgtgctgaaagctcactcaaaagcgccaaagcaagcgtcccgaaaaagttggcataaaacgaactgtaacccatctgatcacgcagacttataaaaaccacccagccaacagctccaatcaaaccatctgtcagcaagatttttttaggtgactgaaataataccgcaaaagccattgttgcaataaatgcaaaaataaaggaagtgattatttccataaatcccacccccacaatacccaggcacgcagcgcgaaggcgataccaatagcaatagatgcagcaaagagcagagcctctgctatcctcgcattgccggaaagcaaatctcctgccatataatcacgcagcccattagtaaaagccacaccaggtacaaacggcatcaaagcaccaacaatgattttttccatcgtgcattgcacgcttacagcacagcaaatgagcgctacgacaccaattgccacaccagccagcgcattctcccaaaacgcacttgggcgatagcctgcaatctgtttcaaaaccagcatggcaataccgccagttataaaagcagcaataaaatcatggctgttgccgcccagcatcgccgaaaaagaagctgatgctatagcagaagccagacaaaccttccatttgccataaggcacctgtgctttcagtttttcttccagccaggccatcgttccacgatagctcattggccagcgctcaaatttataagacatatcattcatttcactgatcatgcctaaattggtggtacgataacgaattcggctgacacagttaaaactgtcaacctgttcgttacccaaaattattaccgtcggggttacaaaaatatcaacttcatagccattagcaatacaaaagcggttaatagtatcctctacacgatacgtttccgcaccgcttttgagtaaaattttacctaccatcaatgctacttttaaggtttcgtcacgcgtcattttattttcatgcgcttgttccataatcattccccgttagtaaacagctgtgcaactgcagccttaaaacgattggcgcctcccatggatggatgcggaacgcaagctacgcattcaactccataacgctgcagtgtccctgctgatttttgaccaatagcaactatttttaaagttggcactaaagccaacagcatttttgcatattctatacccgcatccagctcctcattcgtaggagttcgattagtaagcagatcatcttttttatgcggatgaaagggaaaaatattccataaaatggtatcaaaagctgacaattcatgtcttgccaaagtattccacattactgtagccgtaggctcattaaaaccgctttgtttttgtgtacttttaagcagttcactttcagggttactggttctgcggtaatcccattcacctaaaactgcctcaggctttatatcaggatgcaggcccagtaaaatccgttcggaagtcatcgccattcccgagaaatgtccgccctgataaccaagaccttccgcaataaataaataatgcgccttttgacgcagctgtaaatatctggtcaaattagccgcacggataacaggagcatcactgcttatatcacatttggggtcgtaatcacgccaaggattgaaaaccaaaggacttcgatattcttttaatgcctgcatgaaattctcaattttcacattatccctccgacgtttattatatcacaaaaaaatgttaagcatagtgctgcagaacgcagattttttgcaaaatacagtattgtaaataaataaatagaaaaacgcccgcagcaaaagcgggcgttccttgctaaaatcagaacagcagaatgaccatgcctgccagcaaggccagagtaatacccaaagcattacgtttgcaaacttccatcggatcgacaccggcaataccggcgcagataatggtcgcacctgcaatcggagacattgtccgtcccaaggttccacccaaggcagccatggaacccatatcaatagcctgcaatccaaactgtgccgcatgcggagtaacagcttcgttaaaagctacagttgcagcatcgccggaaccggagatcattgccagaataaacgggccaaaggttgcagcgatcttaacgatgccggtagattcaagcatccagttgatcagggctttgaccagccccagagactgcattccggaaacgaaaacgccaacagaaatgatgataccaataatattggcataagcatcccccatgccatcaaagaaagatttcgtcagcttggtagggttactgcgagtcacagccaagctcagcaaagcgccgatcaacatagcctgaggaacacccattttcagaatcggtgccatacctgtagaaccgaccagtaaaataattaccggcagcagcggcatcagagcatacagcggattaatctttaaatcctcagccaccgcatcgttaccgccttccggcagataacctttattttctttcaggaaaatagcaaggatagtcaatgtggttgcagcgataataacaccaacgatatcagccatcatatggtgagtaataacttcggtgatttcaacattagacaatttggcaataacgccgttatgtaccaggccgggattcagcatactcccataagtacctgattttacggcagctgctgccatcgccgggtggataccggcagacatcagaataggaataaaaataacaccgacagccgcactgcagcctgccgcgcttggaattgctatattaatgataaaagtcgcaatagtagcaccaggtatgagcataaagcccatttttttcagcactttaccaatagcgacaaccaaatgtttatcacagccggtatatttcataaccatagcaaaacccatgcaggaacatacggaagtaataagtccggcatttgtcatacttttagcaaatgcatccaatgctgccataggtttaccagcaataacagccattaaaatacctgcagcaatcagaaccattcttgattcatgtcttttcaacagcagataaatgacgccgataacaataattgcaccaataattaccatcataaataacccctcccaaaaaattaatacaaggtattatagcattgctgcgatgtaaaattccagtatttacgtatatgtatacaaaatacattcactatgtgctgaatatttttattgatttttaagctgacgttcggaatattcatgaattatataatttgtcagcgcatcttcatattctgtagccggcgaaggattatccatctgatcttcaaaagacaggtcagcagaataatagaatgcctttccgccaaaatatcctaaagcaaacggcgtttcgacactttccagcaaattacgtcccataaaatcttccggagccttaagaccagccagatatagtaaggtcggagccaaatcgatctgagaagcataatctttcgtcattaaattattcaacggctgtaaatttttagatacgaaaagcaacgggataggggcaatacttttcctgtcattctcattagttacgatttttgtatattctccacctgaatgaggattatgatcagctgtaattataaagagagtcctgtcatccatcaaacctttggcttcagcttcctcaaaaaagtttttcagtgtctgatcgacccaatacatgcctcgaatcgtcaccagctcgtgatcgcgtactgccggcggcatattctcccagctgataccatagtaaggatatggctgatgcatatccagcgttttggttaccagcagcattttatctttacgtccggcttctaaaagccgcaacgtttccttatacaacacatcattatgataaccccagccgctggcaccgctgtatcccagatcctgcaggtattctttggcataatactcctgcatgccaaactgctgcggatattcgcgcacttcattactataatactgactggacgcattcataaaaataccgcgccagcctgcttcctgtacggatctgaacagggatccctgctttgcaccgttgatctcttcatcaaaaatcagatgtgaacgaaaagtcgcattcaagccttgcgttgtcgggatcgctgaagaatagtaattatccagacgaggatattttgccagcaagctgtctaaaaacggtgtcgtttcctgcggaatatttttattataaaaacctatataatcacgatgtactgattccaaaaccagcaatacaattttatcatattgtgcttccaacggctgcagcacctgctgagtccttaaaatccccagttctttcagcacacgttcgtcttttgctgtcagagggcgctgctcaatatgtttacgtctggcgatcttatccgtatcaaacaacattttgctggcaaaattaatattgacaggcgtcgtcaataaattacgataatcactgcggatcatttcactggtttcgtcgccccaaacacaaacatattccgtcaaaatatatttattgacctgcaccattgaccaatatgaaagattcaagcccagaaaaaatacggatacgcacaacagcgaccaggcaaaattcggtttacgtttttgaggcttcgtcacccggaacaacaataaaacagcagcaacagcaaaacctatccctgcaagctgtattgccgtcatacctgataaaacaccctgaacagcataaatatttaaatttttgaacaaaacactttcgacatgcatcgaagtctgccaaaaataaaacgcatcaaaaatcattgtcagcgcagttataaaatacacagcaaaataaactgacttcattagcatagaaggccatttatggtaacacattgccgccaaaagtactaaaacaatattattgtttaaacctgtaaggacagctaataccgttaaaaaccctttatcaaggctcagctgattgaccataaagccagcaatcagcaaatacagcacaccgataacaactaccgggaaataacgtttcgtacggtcagcaagacgatttctcctgaaatacaataagcccgctacaccagctaaaagcaggtcccgcaggcaattattaacgaccgtcatccaccattcgtcttcaggaaacggtactatttcaatataaaattgacgcgcaaaaaatgcttcagccgcaaaaagcagcaaaagaattaccaagataatactgcgcctatacatattttcacatccgcttacttatgctaaaaagttgatgggaacaggatgcagctctatctgcagcggtgctgaagtaatagcatccccatcaagctcagcagcgaaatcttccacattacaacgaatctctattttctgcgcgtgcctgatgatgatacttttatcaagctgcagcgcttccatcgcaatgactgctgcatagcgcataaagtcagccctggtatcaccggtaaaaatagctacatgcagctgcggcacacataatgaagccccattgaacaagctgtaacggcctgcataataacggcttttaccaacgattacagacgaagcctcataccattcttcctcatcatctaatcgcacctgaaacttatagcgccagttactatagacaaattctttccgcatcatctctgttccctgccaaacataagccagctttgacagcaatttcttctccagttcagatacgttatcgactaccagcgaatcgaacccgatccctgctaccgttaaaaaaatatgaccgttggccttacccagctgcacaggcgaaacaattcctttgctaacgcgtttgacccattttgctggatcattgctcattaaaagttcttttgctaccaaattaactgtccctgcaggaaaaacactgacatacggcatatgttcatgtttggcaaaaacatcgattattgcacgcaaagtgccatcaccgcctgcaacaattatccagtcatatttttcctgacaaatacgagctgccagaccttcaacctgctcgaaagacttaatttcaacaatttccaagcttttcggatcaatgacctgtttcaatcttttttttacttcatttactcttgccagcatacttgcaaacaactgcttgccagagttccgattataaacgatcattactttttgaaaagctgcaatgtcgacacgattcggcatatcctaatctcctatttcatcaatccagcaaatacaactggccttacttcatcgttatagcacaatctacccaatattacctggcagatacgcgctgtcaaaaaatccactttttacgggctagataattccaaatgactacaatgcagctggccaatactttggcaaacatcggctgcaataacatcattcctacaaaaatatacattaaaatcaaattaaaagcaagccccataatactaacggcaaaaactaaagacagttctttacccttttcatatctggcaccgctggtaaaaaccaaaatattacccaggaaataatgatacagcgttgccagacagaacgctgcagccgtcgccagcatatactccatacctatcccctggttaaagccgtaaaaaaacgcccactctaccagcgccgccgtcccgccaacaaacaaatataaaattatcttgatccattctttgtcagtataatcgacgccgaacaacgtttttttagacatgtaaagcgctccataaaatttatttaccgctaccaattctgattacattatttatcaaagcttcccattcatcccatattttcccaggggcaaaagctttcatactttcccttgcatttccgcctaattttcttcttaaatcagcgtcagacattaaaagttttagtttatctgcaaaatcgtctatgccatcatcacataaaaatccattaaaattgtcaattatcaattcatttacagacgaacatgacttatatcctatagctggtaatcccacactcatcgcatccatcagtgctaatggcataccctcaaatttacttggaaaagcaaaaatatctccatccatcaatttattaataatatctttagtttcacccatcaaaaatactttctcttctaatttattttctccaatatagtcaattatttcatttttatattgattttgtttttccgtatatgtgccaccccaaatttccagttgccattgaggaaaatattcctttattttattaaaagcgttaatcaaaattaattgacgtttatgatcaccatcaatacgcccaatatttataattttattacaatttttagtttttataattttatccggcatatccactgtattgggaatataaacaacttctatattgccgcaaaattctttcactatttctatatcttttctacttaaaacctgtatacaatcaactgacctatatgcttttaacaagctgggactgatacggtttttagaaaaaaagtacactgcttccatgtgcagcatcgctattgtaggtaaagtatttttcaataaacactttaagaccagcaaagatttaggatcaaaagttataataacatcaggatttatattctcaattaacttcgaaaaatctttttttatacgtctcccaaatcttgttttaatatacattttatctttgtcaagagtccctaatattctaaaaaactctctttgtatgcgcaggtaaaatgaccctttttcaaaacatcctttgccatttaggttcacaaagtttactttatccgataaataaaaaaaagggttaccacttttagggtcactgcaaactacggttacctcgtgcccacgatcaacaagctcgtttgccatacggcaaagcaccttttctgcaccacctgaagaattaacaacattccaaaaatcagttaacatgatattcatatatctattacctctattatttaaccttgattttatccctaatttttttctctatatttttaaaaagtttttcccaaatcactaacaagctataaccgcatttaaaattatccaacaaaaatagtttcaaacattttgaacgtcccaagctgtttttatacatatcaagattcttgatctctagttttatcttgttgagtaaagttattttttcttcagattcttctacattttcaacattacagcgtaaatcgtataaactacgcaaatatctgatatcaaaattagattttagcttgcaattatttatttcaactaattttttttcgaatagttttaattgttctaatgccaaagtatttttcatcaaaacagtatccctgttttctgtgatacttccttttcgtagaatcctataattatataacggcttattaatatatacaattttgctggcattgtacaaccactgaaagactgtaaaaaagtcttcattataccttatttctggaaacttgatgcttttgacaacatttttttttaataatttattccaaactggccaatccatagattgcacataaaattctgccatatccaaattactcaaaatctttttttgttctgcaaattcatatcctgaaactccagatattagccctctatttatagttatccatctacaacatacaatatcagcttcatcttctttcattgatttatacatttccaaaaacatttccaaatcacagtaatcatctggatctacaaagccaataagttctccttcagctacttctaaacctttatttctagccgcaccgacaccttgatttatttggtgaaaacattttattctagtatccttcagaacataatcatcacaaatttctccactgttatctgtagacccatcatcaattaaaataatttctaaatttttatatgtttgcttaaccagagactcaagacattcttcaatgtaatcttcaacattatatacaggcacaattatactaatcaaaggtttcttttcatccacggataaacttctccttttgtaaataaacatctgcgatagttcctcccaaaaggcaccaaaacagttgatagtactgcttaacaataaactgataatctaccatattatttataaataacgcagccactgcatataacatggctcttgccattagatttcccctatttttcgcagaccaataaacaatatatacaaataaagccattagcggaacggttccaatcaagcccatttctgttagataatgcaaaataatattatgaggagaatctaaatgcggctcacgcgctttaacatttatataatttccattaatataaatatcgttgaattgccttaatcccaccccatgaacaggaaaatctttaatcatatttaaagaagatccccataataatattcgctcatcatcgccacttattttactggtatttaacaatctttgtaaaatgccaggttcagttttgtgctcatcgtccataataaataataatccacacaatgccattatgctcaacagcaaagcaatcatttgccgacaagtaaaactccatctcattcttaattcattcaaacaatagaaaaacgaaacaaaggtcaacgccaaaaatgagcctctggactgacttatcgcgatgccactcaaaaatatcagccaggttaaaatattaaacagtaaattagggatgttaagtaaaacaaatggtactgctaaagctacgatagcagaaaaactattagggcctgtagacaggcttcccgggcgattaagatctaaaacgaggtcctgataaccagcataaacacataaaattattccccccaatgctaatccacttgcaaataaataacggccgatattctctcgcgtccataacccatatattgcagctccaggtaatatccaataacaataccttcttgcccacttcatactgatagacaaatcggtactataataattactagccagtaaccctacacaaaaacaaattatcaaaaacaaaaatttacgctcaaaattttgccaccgttctttatctttcttaaaatttaatacacaaataaaaaacgcaaggtataaaataccatttgtaaaattcatttcatgcagcattattccaatcggcaaaaggaacaaacacaacaaacgtaatatctgtaatacttttctataaatcaacatgcctaagactgcactcctatctcaccgtcaaaattaaaggtgctaaaactgtaccaatattcatgacaactttaaaaaaacgcgctgcaattttctctttatcaaatgtaaagattaccaaacatagtctcactattcgtaatggtaactgtaaaaagttttttaaatattcagaaattccaaatctatgatattgtgtaattccctcataaaagtaccttttggtaaaccattgaaaagtcgttcgttccttagcaatataatgtttcaccggagcaaattctgtaaatccgcataaattatccgttcccattgctttacaaaaaaaatcattatcctcaccagataaaagtacctttccactatacccaagagtataatcaaaaagtatcttttttgatctaacaatatccatacgtaacataacattgccaccagcagccattctaacagaatacgcaccaataccacgtacctccgaattaaatgcatgaaaatcatatggcatccacgcaggcggcgtgatttcaaagcaaggtatgtatggtcctccaacaacagcaatacgttcgtcaagctgaaaacagtccagcattcttaaaatccaatcttcatttaccgtttcatcatcatcgagcattcccaaatattctgtatccttgccacatttgttcagcaggcagttcctagcatatgccagtccttgtcttgcttcaaaaatatatttgactttttcaaactccgaaataatttttgccgtttgatctgtagaattattatctacaactataatttcaaagttcggataatctaattttattaaagactgcaatagcctttttaagcccaaacatctattatatgtacaaaccccaattacaacttttgggaatttatctttattcatcaatttgatcctttcaaacattcctattcattaatttttttatcatcatatcaactttttccattaccatttctacagaaatattattcagacatttctttccacatgttttccgtaaatatttattacaatttttaacacaatcataattacaactaacgatcattgcattatcctgtatcggtttaaactgcatcggattagaattgctgaataaagttattgtaggacagccagctgccgcagcaaaatgccccattccattgtcaaaatgaactaaaaaatctacatttgtaaaaaaagcagacagctgatctaaattcgtctttccacaaaaattaattactctagccttatttttaaccaaacttatcacttgatcagcaacaattttatcttctttcattcccgtaataaaaacaatagcattattgcttttgcttatttgatcaatcaaataagcaaacttttcaaccggccaattacgtaggggatcttttgtatttacacacatcgcaatctttataaactcaagtggaatattagcaaattctttttttatgtattctagatttttaattaacggcttattaaattcaggtttgtaaaacaaacagtccgtatttttggtaaataatttaactaaatactgaaaattctctgccgcagaatgtttttttacatcatagtcttttaatctaaaataatccgaaaaaaagaacctttcagtacctgcttgccatccaaaaagactttccgaccctacccttgttggtattccagccaaccacatcattgccgacaaccttaatcttggatctaatgatatagagagatcaaaattatatttttttatttctttggccattctgaaaaccgaaaaataatcacctttacttttatacttatatggtattacgtactcaatattatctatatttttaaacaaatcaaccaattccggtttaactaaatatgatatcctggcatccggatattgctgtttcagtaacggaataagagtagttgcatgtattaaatctcctaaatgcattacggcatcaatcaaaatattattatacttgggcttcatcataaacactcctgttatttaacaaaaattttcaaccataaatctgctattttcagtcttataatctgcctgcagatagatttcccctgcatatttttactcggctgtggcatatttacttctgaaaaatctgtatttgataaatacaaataatatttgtcattaaagccgctatattttggaaattcccaaggcttatatctaccggcatagtgaacaattgcaggcactgcttttgcgcatactgcagcattgcgaaatttagaattgagtaatatcttgctgaataaatagaatacaggtggaataacattccacctcaacggtatttcataccaattattcataaaaattttatttaacgcatcctgatcatgatgcggtagttgttctttttgtgcaaagtccaaaactttttgaccatagccatttatgcgccattcttcaacattaataattagaactccagagttaaagtatctgtaactatctgttatccctatcacagcctttttctctttccgcattctcgaggatgtaattatcccgtagtcaagcaccgcacccactggaaatttacaaatatcaattttccacaaattaaaaatatcttcacaaaccagcaaatccacgtccagatagataatcttttttacatcttcaggtaccaaatcagcaatcatcagtctgaaatacgccgctcggcttacatgtccgcttaaataaatgttttttagcttgtcatgtcctatatcaataaattctattttcgcattaaatttttctactgttttttttataagttttatttttttatcacttatatcgtcacttaaaacaaaaaaatgcaattgatctgcaaattttgtatttttcagaatagatactgtaacaactgctacatgctgtgcatagttatcatcagaagctaatacgacatttatatgtttatccataataatatccttgtccaatccaacaaactttccatattatattgttttattataccatatatactaggataatacagctatcatttgctttacatcaccctctattaaccttataataaaattatcattaatattttacggaggttaatatgtttaaatatctgttatttacagcattattatattttatttcatatttatattatgtaaaagtatctcatggattaggccataaagcagaattcctccagctaagacgtttcctcccctgcgcacttttggctgtcgcacctgctgcaacagcgcaaatccagttaactaatagcttattacttacgagtatggcagttggtatatcctggataatcacctaccctttattatattggaacacctatcacaaaaattccactgatttcggcttccattttgatactgttttcggattatatattataggctggctcacagcactaaaaattattgtactaaatttcaacattttcccaattacttttttgattatactaacaacagtagaatttttaattttgcttattccaatttcacagtggattttttattttttatataaatcatgcattgacgaaaacagcatgatgatgctacaggaaacacactacaacgaaatactagaatttttcaaatcgttttccatacctgctaatttattaattttcgttattccaacttcagtttacggtatttttatttatttaaacatagatgcctccgtaagtacgtcaatttctataaatatttaccagcttataacactgttggcaatcgttgctttcctcacaatctatttatggaaaaaaggtaaaggcgtatttgtacgcacaggtattgttgaattatatttagatgtcaaggaatactttgaaacaactaaattatatactcaaaacatgaaagagagattaaaagatcttcaggttacaccacaaaaaccagtatttgataaaccttctactattttgctgatcatcggtgaatcagaatcgcgtgattatatgagcgccttcagcgaatgtgaatatgataccacaccctggttaaaagccaaaaaagaagatccacattttttactttttccaaacagctactcctgcatcgctcatacagtttcctgtctagaacgcgcattaacagaatttaatcaatataatgacaaacagttttatacatcttgttctattattgatattgcgcataaggcaggttatacaacatcctggtatagtaaccagggtcatttaggctgtgccgatactcctgtaacattagttgccaacacttctcagactgcaaaatggaccaagcaaaatttaaatcaggtacaatatgatgaagcgttgctggagtatcttgaagaagtaaatccacaaaaaaataatttcgttgttattcatttaaaaggcaatcattttaattttatcaatcgttatccatctcaattcacaaaatggggtactcctggcaaatatgacctaattttaaattatctgaattccatcgcctatactgactctattttagaaaaaatctacaactacgcttctgcgaagcttaatctgcaagccatactttatttctctgaccacggaaccctgcctgataaaagacggtcgcctaattttgacggattcggcactgtacgtataccaatgtttgcttatttttcagatgaatatatacaaaagaataaagaaatttatcgaactttatcagataatcagaataaatattttaccaatgatttatcttatgaattgatgtgcagtatctttaatataaaatctaatcattttgatgaaacaaacagcttagcctcaccaaaatataaatttactcgtgaaatgttaactaccgatcttgggaaaatgtacattaaagatgacactacaaaataaataatggcggaccatttagtccgccattatttatttttttgctgtaattcatataacttccaatattttagcagagtgtagaaaaaatgctgtaaacttgaataaagtcctgcccaaccatctaaaaaccccaattgtaaaaaataagctcggataaagccataaattccatgagtaaaagcagcacttttccctacgcgttttcctttactgaaattatcttcagcccagatagaagtatactgaccagctttatcaagccattgctgccaggaatcataagtataatgcataagaattccagaaagcttctgttttggcaatttgcaaactggccgctcatgtactttatgttcccattttacttccagtctgggaaaaagtcttattacttcatccggtgcaaaaattccatgattatatccaaaatcaaaagcttcaattttccgcataaaactatattgcttggcttcgcatttatccacagcattttttaccgactcaatcagttcaaatgacagtctttcgtcagcatctatatataaaatataatcagcatcagttttatctaaaacaaaattgcgctgagctgaaaaatcattatcccatttacggtaaagaacccttgcgccatgtaaattagccaatccaacagttgcatcatcacttccggaatcaataataattatttcgtcggtaatcttacggacattttctataactgcaactatatttttctcttcattttttgttaaaatgaccacagcaatttttttcataaaagcctccatgacatctttattttattataacatataaacacaccaagtatcccttgtaatcgtcggaagtttattctataattattatgaatttatttaatcaatcatccgtatatttgaaaggacaatataaataatggatttcagctattccagttacgaaaaattgatttctctattaaaacaatataattattctatcactgattataataactacaaaaaatatgaaaaatcagtaattttacgacatgatatagatttttcaatcaaagacagttataaattttctctttttgaagaatctttaggtattaagtcaaattatttcgttctactatctacaggtttttacaatcctatggaaaaacgtgttcgaaaaatgcttagagatatgcataaccgaggttttactattggtctgcattttgatacaacagcttatgataatactgatctgaacaaacctatccagtctgagaagcatatattagaagaaattttagaagctccggttaatttgattgcattccatcgaccagcaccaacagcattagcaaacaatttaaaatttcctggactgataaacgtttattcaaaagaatttttccatgactgtaaatactgttctgattccagatttttttggcgtgataacccatatgagttaattaccagccaaaaatatgaccgccttcagattttaacgcatgcgttctgttgggctgaatcagacagatgtccagctcatgtttataaatctttcatctcgcaggcaagttgggaacgttacaaatatttaactgaaaatatcagaaatcctgaagaatttatttcagaagaagaagccagaaaactttggcttaacaaataggagtcaataatgcagaactttaaaaatcttattgaaaaaagaacctctcttgctgtaataggattgggttatgttggtatgcctttggctattgcatttgcagaccatataaacgtaaccggttttgatttgaacaaagaaaaaatttccttatataaatccggtatagatccaaccaacgaagtaggaaatgaaaaaatacaaaaaactactataaatttcacaacagacgaacagcagttgcaatatgcaagctttcatatcattgctgttccaacgcctataaatcaggataaaactcccgattttggtcctattatcggagccagcactattttaggccgcaatcttgcgcctggttctatcatcgtttacgaatcaactgtttatccgggggttacagaagatatctgtattccaatcttggaaaaagagtctggtttaacgtgcggtattgatttcaaagtcggatattctcctgaaagaataaaccctggtgataaaatccatcgtttagaaaatataaaaaaaatagtatccggcatggatcaggaaacactaaacgaaatagcatcagtttatgaacttataataaaagcaggagtatatcgtgcttccagcattaaagttgctgaagcagccaaagttgctgaaaacagccagcgtgatatcaacatagcttttatgaacgaattggcaatggctttcgataaaatgaaaatagatacaaacgaagttgttgatgctatgaacacgaaatggaatgctctcggtttccgtccaggcttagttggtggccactgtattggcgtagatccatattattttgtttatgaagcggaaaaacttggttaccacagtcagataatactttctggccgacaaataaatgacggcatgggcacttttattgcagatgccattattaaacagctggtactggcaggaaaaaaagttattgatgcaaaagtagcaattttgggaatcacctttaaagaaaattgccctgacgttcgaaactcaaaagttattgacattgtcaaaaggctcaaagaatatggaatttccccagacattacagatccctgggcagatatcatagaagtaaaaaatgaatataatattgacctaaagcagctaaacgatataaaaaatgttgactgtcttgttttagctgtggcacatgatgaatttaaaattatgaatttacttgatatggataatctatttaagccattgccaaattcagaaaaagtttttattgatctaaaaaatatctgttctctatctgagcttacatcttctggttataatttttggagattataaaataaagccgtaaacacaagtgtttacggctttatttttatgattttattttcagcctgacttttaaaatagcataccataaataacattttaaagcattctgccaattatgatgttttctaaaaaatttcccggcttgtttaaaattgtgataattttccggctttcgttctggcagtggatcatcaacactatcccaaaaagatatatctaaatatcgtctccacattttatcatattctgttaatgctaaattccaaggcttttctctgccaaaaaaatgataaattatacatctttcaggtactttgctaccatcacaccccaaatgattaaatttttcgtcaataaactttatatcaccatccataaccagattcaatacatcctgatcatggcacgtaaagcttttgggatcgcgtccttgataactgaatgctttttcagttatggaattctcttcccatttttcagtatcaatccatagaacacccgaattaaaatatttaccacttttgagccctaaaaaatcacttctagtctttaccgcctcaggcaaatctgaaacagctgctaatactttcccttctaaatctatttttttaaatgcttccatactgttgatacatatcaaatcagcatcaatatataaaaaatatcttgttatttttttcaataccttgggcatgtatagtctaaaataactaacttttttgaatcgtggatgtttaatatgaaaattagcaaatggagccatatccattaaataaacatagcaactttgtttatatttaacggtagttttttctaaagcttccaaatcttttttacttacagcatcagtaaaaatatgaaatgcaaatttcatatttgagttattctctaatatagatgtaattgtgactcctgtaggtctgaaaaaattaatatctatattaaaacaaatatgcattacatcattttgatcttctatacattgcaagttttcaaaactatatattttctttacaaattcattcttttcaaaatactcccgatcaaacattagcatccctcaatagtctcatattttctaacatttcgtaaaatcaacaacaatatattttactactggttgattttatttttctaacattttctccgctgctgccacaacctgttctaccgtcatcctggacatacactgcaaatcatcgcagctgtgtttcattccgtctgcacatccctgacaaggcggttgtgccgtaactattacagcatcctttgtataaggaccataaagcttcggatttgacggtccatacatagcaacgataggcaccttctggctgatagccacatgcataggaccgctgtcattagtaataatcaaacaacaacggcgcattgcagcggccagcccgccaatagcaaaatgtcctgttgcaataatcggccgcgtttgcatataacctgttgcttccgcaaccatctcttcatccattggcccgccaaaaaatactgttttataccccttggccgcaaaaatatctgcaacctcagcaaaacgttccggcggccagcgtttagtcggtacggcgctgccaatattaaagccaatcagtttatcctgatcagtaatattttgttcctgccagaaaagctctgcttctaaaaaatgttcttcccccggaaaaatttccagaccgttactactcagatcctgcacacctaactgctgcaatacatcaagatacatatcagcagcatgcatagacctatccagcggcgtaaaaacatcccaaaaccacttaaatattttatgcgtcgtacctgtacgcagtttaacacttgtcatcgcatcaataaaagaacagcgctcgttaggatgcaaattaatgagcacatcaaaatcaagtttgcttaaatgcctggaacaggcccatagagacaaaatactgttgtcacgtccttttttatctatcgtgacaacttcatcaaggtacggattaaaaagcaccacatcttttagtttttcatctaccagcatagtaatatgtgcatcaggtgcagctttacgcagagcatggataaaaggcgtcgttaaagtcaaatcacccaagtgcattaaaaacgttaccagtatcttcttgccattgagttcaaccattacagcctcctgcttttctcgatataaaccgcatataccatctcaggtgtgatgtcatacatacaatgccagtcgtcacattctttttttaaacaaccggcacatgccgccgtactcaaaataaccgttgcgtcatcagagccatacgggccggtccgatcagctttagtcggtccatacatagcaatcaaaggtttcttcaacgctgctgcaaaatgcagcggccctgtatccgcgctgataaaaagcttacagcctttaataagcgctgctaattcgcgcagactggtctgtccgatcaaatttataagctgcataggttttccagccaactccgtaattttttctcctttagcagtatcatcaggtccacctgccaaaacaacactgcagccatcagcaatgatcattttgatcaaactggcataatgctctgccggccactcttttgttttccaccttgccccgggaacaacaactatatattcaccctgcagctcatttttctgtaatttttcctgcacagaaacagtctctttggacaaatcaggcaacgggaaaacaatttgctctgccgaagcgcctaaataacgtgccacatcaagataacgctcaataacatggtcattactgtgactgccgcaaatcgctttactgaccaacccgctgccttcacgcatttcacaatatccaatgcgatcagaacagccgctgatagctgcaagcaccgcacttttaaacaacccctgcatatctattaccagatcaaattttttagaatgcaataatcggcgcatttcctggaaatacgccaatttagccagtaaattcattttattgaactttaccttatcaaaataaattatctcatcaataacaggcggatcaggtacaaaaccggcaaactgcggatgcaccagccatgttattttcgctttgggaaaacgctgccgcaaagctgccgcaaaaggcagcgtgtgcaaaatatcacccaatgaactcattttgatcagtaaaatatttttatattccatgtatgcctctaataacacttatttaaggaattatcagcttgataaagtccaataaatttcccttttcaaacaaataccctttgatcccggcggcctctgccgcttctacatcacgtctcttatcaccaatcagaaaagatttatcctgatcgatatcatattctgccatagcctgtaaaataagtcccggtttcggtttgcggcactcgcagtcaacagcatactcagcaacgctgccagacggtagatgcggacaataataaaacttttctatcttcccgccgctgttaaaaacaatatctgacatatactgatgtagtttttccatttcagcgaccgtataataacctcgtgctatcccgctttgattagtcacgacaaaaacaagatacccggactgtgttaaataggttattgcctccagcgcgccttctatccactccagttcatcgatcttatataaataagctttatcgatattcagcacaccgtcgcggtcaaaaaagactgccttatgcgccatgagtataataaccgccgctcttgtccaggatagcgcagtattcagcaacagcttcattcacgtcagtaaaaccaccatcatacccagccgccaaaagattcttcgcgtctgcctgagtatagctctgatatttaccttttaatacttctgggaacggcacatattccaattcgccgctgccaaaatgtttcagtacaccttgggccaaagtattaaaagtatgggcatgccctgttccgcagttaaagaccccgctgatttcaggatgatcccagaagaagaaattaactttaacaacgtcttttacataaataaaatctcttgtctgttcaccggcaccataatctccgtaagcatcaaataatttaacctttttctctgccagccattgattatacatctggaacaccatagatgccattttacccttatgattttcctgcggaccataaacattgaaatagcgcaggccgactaactgactgttggtcttgccaaaataacgacgggcataattatcaaaaaacaatttggaaaacgcataaacatttaaagcttcctcacaggcaggctcttcacgaaatccgtttgtaccgctgccgtaagtggaagccgacgacgcataaatcatttgtatcttacggtcaactgcaaaatgcatcagatttttcgtatattcaaagttattctgcatcatatatttgccattatattccatcgtatcagagcaggcgccttcgtggaaaataacatcaacattctcatgcacaaatttaccagcctttaaggcctcagaaaaatccactttatccatataatccatgaccttcagtccctggatgtttttaaatttgaccatattagtcagattatccacaactaaaatatcatcgcgtccgcgatcatttaagcctttaacgatattactgccgataaaacctgcaccgccagttacaataatcatagtttgccctccttcacaaattgagctatctgctccacaataccagtcgtcgaatagccatcttcaaaatcaatgatcctgacttcgcctgcatattcccttccggcaacttcctcaggtttataatcaccgcccttgactaaaatatcaggacgtattttttcaatcaattccgtcggtgtgtcctgttcaaacaataccactgcgtcaacacaagccagtgccgctaaaacgcgcgcacggtcaagctcatgtactaaaggtctgacatcacctttcagtttccgtaccgaagtatcagaattcaacccaacgactaaatgcctgccaagcctggccgctttttccaaatagctgacatgccctacatgcagaatgtcaaaacacccattggtaaaaactattttttccccgcaggatctccaggttttagccaaagattctatctcggaccagctcaaagttctataaccgcggccctgtttacgctcttccgtcagcagatcctttaaaagttcctcccgatgcacaggatacgtaccaacttttgctacaactatacctgcagcacgattagccataaatactgtatcctgtaaggcaagcttcccggcagcgcctgccaaaagcgttgccgctacggtgtcaccggcacctgaaacatcgaatacctcttgtgccgtagccgggtcattaatcaccagtccatccaaaccggctaaagtcatcccccgctcactgcgggtgaccacaacatttttgatctcatatttttcccgggcattttgggccagacgcagaacctcttcatcctcattaggaacgagttctccagccgcctcgcacatttcctttaaatttggagtaatgaaatcacagccccgatatttattccagtcatcccccttggggtcaataagcaccggcacctgatactgatgcgcagccgcgatcacccactgcacaaaattatccgaacagacacctttggcataatcagaaacaatcacaccgtccaatccggcttccagtaaattctggagccataatgataaggcctctgtttcttccggaaacaaatctcctgtttcttcaaaatccaagcgcagcatctgctgctgcgctcccaagatacgcatcttcgtgatcgtttcacgctgctgcgacttgatcaaaccactgtaatcgatacctttttcggccatcatctcttccagtacttctctgttgttatcggccccggtaacgccacccataaaaaccctgcattctaaatgtgccaggtttgcagctacatttgcggcaccgcccaaaacagactttatgcgtttgaccttattaacaggcacaggagcctccggagaaatacgcttgacctctccataaaaataacggtcgagcataacgtccccaatcacagcaatttttaaattttggatatgttcagctaaaaaagcagtacatgacaaattcgtcactttattcaccatccaccaattcgcacagaatatggccaatcaaaatatgtatttcctgcgcccgagccgtaaccgggcagggaacagccatgcagatatcacagacctctgccatcttgccacccccctgagccgtcattccgatgcactgtatccctttagttttggcaacatcaatagctgccaatacatttttactgttacccgaagttgataatccgaccaagacatcaccggcacttcctaatgcctgcacctgccttgcaaaaacagtatcgtaaccatagtcgttagctaccgcggtcaaaatagaagtatctacggtcaaagctatagccggcagaccgttgcgctccttttgaaagcgtcctacgaattcagccgccaaatgctgactgtcggcagcactaccgccgttgccgcaaaacaaaaccttcttgccgttttgcaaggcacgtcgaataatttccgcactttctgcaacctgctctaaaattctgctttctgcaacctgctgtgccaaagtaatatgttcagcaaaacgctgtttaatgatttccatatttcacctgcttcaccaattaagtaaattataacgtaccctaaaggtattatttttattagactcatgattctgctcatattcaaattcaatagcccagcagcagaaccggtgcgtccatctgtaatttgtttcataattactgtgtttgcccaaatcataacggttgacaatcgtaaaagtgtttttatcatccagtttaaagctcagtccgttgcgcaactccctgcccatgtcaggctgtccataatcataaagattactggtaatatcttcacgataataaccgacccaggtatcccatttcggagccagtttttgccctaatgtcgcataatacatcattgtagattttgtttcatctgtatagctttctgttacccattttttacctacagtcagatcaaggaaggtatttttactgttgaacagataaatacggtcatgattcaagtaagcagcatactctgtatgccagcttttgatactgctcttttcgttacgccataaaccatgagtaatatacgcactgtatgtcaacggcaaattatcgatcaaacgatggtttttataatataagccgatatctctttctttgcggatccattcgtcatcttcttcatcccagccgtcctgaaactttatattaaagttacgctcatcgtgattgatgccgtacatgggtttataaccggccttagaataataagccagatcggcataaaaatctgttttcgggcctaaattataatcgacctgcagcttagcatacattccgttatcgctgccgtcatacccgatacgcggcatgattctattttcactctcaccatctaatctattgacccataaatcacgcgagtagatatgcttgcctttggcataaaccttaacatctctggcgaccattttttctttgggataaatctcaaaagtttttgccgttatcagcagacaaggatcatgctccaccgcaggacagcgtgttgtctgtccaccctcgtccacaactattttatccggataaatcgttgcatgaggtgctttaaaatagtctttggcacctttgccgtcaatttgcttgatctcaccggtcttagaattaaaattataatggacccattccccattcatggtagtatccggctcctgcagtgttccgccctgcttgagccagacatccccggtcttcatattgccttcagccctggtagtcagaatagtttcatccccctgcactatcttgacattaccttcagcaaaaaagtccccgctgccctggtcatatgtagcactgtcactccataaggttatcggcatcggctcagcagactccgcctgtttcttcttcttgctcttatctttaattacaccagcttcccgctcctgcttctgttcctgaaaatcaggcgcagcataacgcgaatcaccggtaacatagtcgtcggcaaaagctgcctgtgatactgctaaactcattaagcaagcagttgctaagactttcttcttcatgctttctctcctcagtcaaatttatcatttataaaaaagcatacaaatatccactacatattatatcacaattttaaataaaaaacccgccactaaggcgggttttactgataattcaaattttattttccctgataaaccataccctggatagtagtatcttccatagtctgtacataagtagtagaaccaacgggaatgacaactgctttaccggtaacaaaggcacctcctaaagcaccgataggccctaaaacgatcatgccgccgattgccgcgcctgctgcaccggctgcagtcttagcctcctgtttagccagatcgccgatatagaccggaaccttagttccgtcaagagcataaacatgagtaaaatctacgtcaatacgggcatcacggccaaagctgcgcggctgtacaacctttttgatagtaccttctcctaaagcacctttaggaagtaccagcacatcattcacataaacattgtcagcaattttaaaatgcacaggttcacctgctttgtcttctctgctgctcagttcctcagtaaattctactttaatcacagaatccttcggcaaagtaacgctttcaacagaaatcacaccatcggtaaaagcgacattcgccaaagcttccaatctggaagaaagagagccttcatcaattttgccgttaagcatcatttctactgcctcgatacgggtcttggcaggaccaccggacatactttcattaaactgccattcaatagcgttgagtttagttaaaaacccggcttcattactggcagggctgcctttaagataatcatacaggttatcaatacgatctaaaatagcgtcgctggtaacagtaccataaacatcatcttccaaactatccatacggccgaccaatgcgcctgcctgctcagtaccatataacatcttttccatcgcggaaattttatcagtagcagacatttgtgtcactgctgacgcagccggcacagcaccgcccaaatcatcagcattcatggcaaaaccaggcgcaactgatgttacacagaaaaccaaagtcaaaagcaaagtaaggagtcgtcttttcattacaatacctccgttatttattatttttatgaagctattataccatataaagtgcgtaaaaaaaataggcgaccacaagataatgtggtcacgcctttattttttataattatttaacacttctgtcacagattcagttatttcatccattttcgcaaaccttcttctatgctgagcacgcttagacggcttcagctcttccatagacttgcggtattcttctatcggcatttcaaaaaaacgctgatctttacatgcctgcccttcgcattcctgccagaaatcatccagcgaggtttttaatttacggtcaatgcgcacatggttcattgcataatatccggcattagaaaccgcatataaatgcttacagcccaatcctgccgctacattcctgataccatagaaaatcagatttttagtacggtaaccaaaaaaagctttggtcagaccttttatgatctcactgccgttaggcgttccctgcaacgcgcctatccacagcgacatttcattatcttccggtgacggcgccagccaaaacataatttggtacagctcgtctgcacccaacgaaagcaccagcgaaaggcacccttccttacgctgtcctccatgaaaccacagctccattaccaacggctgctcttcatatgtatcttcccacaacctgatacgttcgccattaacatataattttgctatagcttcatcgttaaatatattttccatatattcaatatgattctttacaatggcaatacgctcatcccaggtagaacccttataaaaaaacgcacgggtagtttgttccacaaaggaagttgtatgtttgagcatctctctacgcaaaggagtcgtttgaaaaaaatccaataaagctccaatctgacttttatgtaaaccacatcttattctaaaaacaatatatctttttctttctttaagcttttttacattgtatagatcatgcccaatatattttaaaaattttttatccattactacctctccagttatatcgttgaacatattatatcacagttttcagtaaatcagaaaaagcattctgcaatatttctattacaatgccattatcaaattactattattacagtcaatcataaaaaaacgaccgccaaagcggtcgtttttagagctcttaaatttagaaagtaaaggtcacgtcagtccacagccttttatctttcaagctgctgccttcactggtaacagttttggctttggtatcataataggccaaagtagcaacgatgtttttagcaacagcgtagtttgcgcctactgcataacctttaaagcctgtattccagaaagtattggcatcggtagtatgttcccaataagtaccttcgccctgatcatagtaacgggcaaaaataccataagacccggcatcagatgcctgagcgcctttataattcaaaccaacagtccagccgtcgtcgtcagaatttctttcaccgtcccagttagaattgaggtacataccagaaagtgtcagatcattattaaagttatatgctgcaccaacatgccagatcccgtcatctttaccagaatctctgcccataacatcctggaatttcacataaccggcagccaggttcagcgaatcgccaagattaccggaaacctcaccgccgtaatatctgttagcgattgttttagttgcaataacattattgacatcgaaatcagtatcgtcggaagccttacccatataagctttaactttaatacggtcgccataggtagcaaccaggccgtcagcctgggcatccataatattgccgtctgccaggaaggcatcgatacggcctgcctgcaagccaacgccaccaacgcggccattgacataagcacgtttaaaatctgtgccctcatcaccctgatcattgctgaagtcctgaatattctggatcatagccgtgtaagtccagtcatcattgatctgaccattcagccacaaacggctacgcaagtcagaatcatatttgctgccctgattagcttttgctttttggtcaacatagcgggcacgaatttcaccggtaatctttacattatctgatttcttttcaagaccggcaacacgcacgcctaaagaatcaagctcatcggcaaattcagctgccagacgatctacattagcgcctttagccatagctttggctacgatctgtgccatttcataacgggtcatcaaacgatcgccgccaaaacttccattaggataaccgtcaataataccttctgccgccagtttattgacagcgtcataagcccagctgtttgccggcacatcagaaaacggattagctgcgtaagccgaagcagttacgcctaaagccatcgccatacctaaaactacagatttgttcattttctattcctcctcaggaaagatattttctgcagtccgtaaattccaaacagaaatcaacaacatttcggacaagtcaccttgttacctcttccgtctgctgccgcctgctcctgaaatctatcggctacgtcacctatcttaacccccgtcaaccccagatgcaaattagcttaattgcaaaaaagtttaactttaaacaagttaatggaataaaaaaatttaagaaagctttattgaaacaaattcaggcagcagatcatcttcaaccaatctcagcataaaataaaagaaagcggacgcatacgcgtccgcttaagtctctaagttaatcttagaaagtaacgatcaattgagaccacaaggttttcattttgtcgtcagaataggtttgtttcagatcgtagtattcgataccggcgatcatgtttttagcaacagtatagtaaccagctacgctgtaacctttgaagccttcaccggaataggtcgggccatattcaccgttcatggtgtgctggatagcagtgcctgcagcttgttgatagtatttagcaactaagcccacagaacccggtttggaagctttagcgccgcccaaagtaccggtaactacaaagccgtctttatcgccgtcaagatcttcaacatcagatctcaagtacataactcccaaggatgctttgtcgctgaagttataagttgcgccaacgttccagatgctgtcgtcgtcgctggtgataggagtagcatcaccttcaaatttagtccagccggcctctgcatttaaagcgccgattttaccattaacgcgggcaccataaattttatcgaagccccagtttttgaaggagttggtcggtttgccatagaatgcttccaatttcacttctttaccgaaagtcaggtttacgccatcataacgggtatcatagatattaccatctgcaaggttcaggttctgacgacctgcagaaacgcctacagcaccgattttaccaacaatgtatgcacgttggaactcagtgccttcattgccaacatcatcagctaaattctcgtcattctgcagcatgccaacatatttccagtcgtcattgatttgaccgttgatggaaatacgggaacgcagtttggaacgataaccgtcgatatcgccggaataatcagtgtagtcataacgtacctgaccagtgatcctaacgttatcagattttttctccaaagctgcaacgcgtacgccaaggctgtccagttcgtcagcaaattcagctgccaaacggtctacgttagcgcctttggccattgctttagcaacgatttgtgccatttcgtaacgggtcatcaggcgatcgccaccaaaagtgccgttgccataaccgtcaacgataccagctgatgccagtttgtttacggagtcatacgcccaatggcctgccggcacatcggagaagggatttgcagcataggcagaagcggttacgcccaatgccatagccattgcaagtactaaagattttttcatgtttctttcctcctcggaaatttattaagccaagtttttcagctcataacaatttcctaaggaatgcgccatacgagttacctagtttcctctacggccatccgctttccaattattataaactttaaaaactataagctttagtttattttagcgtgcgtttctagtttttgcaatactattttatatttatttaatttaact

SEQ ID NO: 10009 - DNA, 225 bp, Unknown
  gut microbiota DNA sequence
aaaaaggtccaggcaaaatcagtccgttcttcattccgatggagatcccgaatatgcctgccggccagatttctattgctttaggctttaaaggacctaataccgctatcatcacagcttgtgctaccggcactaactgtatcggcgacgctctgcgtactattcaatatggcgatgccgatattatgatcgcaggcggcacagaagctgctgtttctcctgttg

SEQ ID NO: 10010 - DNA, 2325 bp, Unknown
  gut microbiota DNA sequence
tacttatagtgaatatacatcgcctgagcctacattggaagaacttaaagctatcaagctgtcagaggtagacgcttggactgaaaggaaaatcacaggcggttttatatctgaatgcactggtgagatagtaagatatgatagcgataaggacacgcagcttacgatgcaggggattgcgctgaacgtaagcactgaacgttttaaaaatgaatatcctgacggctgtccggtacgggggtataaagatggtgaaactgttaaaacaatacagtatcttaacgcttcgcaggtatatacatggtgtgctgacttatcgtcccacgtgggcgcttgcaaacaacaaggttggagtaagcaggcagaggtagccgcagcattaagcaaagaggaattggacgctattatattagattaggcggtgcaaagatggttgaaatggcaatggcttcaataacaatctttagctttttatttggtatagtaggttttgtatttaagatttggatcataaatcctttgtctacggcgatagagaacctccaaaagactgttgacgctttagctaagactattaatagggagcaagaacgtacaacagagttaaagataaaatttgctgagattgatcagaaggcaaaatctgcacataacaggattaacgaagttggtgaacggctattactgattgaaaacaaatgtaataactgttcgtgtaaggataagtgatatttatgcttgagaaaataaaaaacttaatagtgagtgccagaaataaagtagcctcaatgtcgccgtcgccaaaaataatggctgtcattgtaggctattttattgcagtcgttttgctggttctaacctattacgctgcgtggatgtatatgtggttgtggttggataagattgttatgtctgacctgctggcactgatacgtgagatcacaggcccggctatggttgcatttgtgacctttatagctacgagtttagtagataaagacggggacggtgtccctgacaagtttgaacaggaggcagagaataatggtgacaaaaagaatcactttagatgagctgcggcagttagcagcaagggctaaaggtaatattgataagatatatctacactggtcagctggtaattatcaccagtttttcagtgactatcacttaaacattgacagcgacggcgctgttatggcgacaacagatgatttaactgaatataaggctcatacatggcggcgcaattctagagctattgggattgctttagcgtgctgtgtagatgctgtagcctatgctgatggtagtatcgactttggcaacgtgccaccgacagagttacagatagatagtatggcgaaagttgtagctgtactgtgtgaggaactaggattggacattaatgccgataccgtaatgacacatgcagaagctgcagacttagacgactacggtccggcaactacttttgaacgctgggacttgtggaaattaccagatgtgccaggcgacggagaactgaaaccaggcggtgatgttattcgtggcaaggctatctggtggcatcataattggtaaagattgtataaggaggtgactaatatggaaaaacagcgtattttgatttgggctgggattgctcttgcgattttggtagggtgcattacttattacaatctgtaaggcaaaaaccagccacagaattagcctgtgtgttgttttatctctgaaacactaggaaatctaagtgggagtatagaaaacggcgcacaggttgattatattgaaaatagaactatcttaatggtaatgaaatagaatttaatttgaaagaagggcagaaagtgaatgaagaaaaacaaatcaggtatagcaagtatcttattattagctttgcccttattgctgtgcttatcattttctttaaattgttttgcggaggaacttccggaaacaataacgatgtccagggaacagttcagcgaattgcagacgataatcgacagacaggaatttctattgaccgagctgtcgaacacgttggaactgcagcagatgaactcgaacgagctgaagaagctaatcgaagagcagcgtttatcttatcagaagataaggagcgagctaacgagtgcgcaggaatcattgtcgaactccaaaaaaacaatagcagagcaaaacaaatccttagagatattgagcgagcaaataaagaaagaacaatccaaaagtgaattgaaacaaaaacagaaggctttatggggatttatcggaggggtattagttgggacaatagcagcgagcaggtgattattatgg

SEQ ID NO: 10011 - DNA, 808 bp, Unknown
  gut microbiota DNA sequence
tatgcacaaaaaccacacataattgcgaaataaattaataatgctaaattctctcctacatcaatcattctttatatgctcctccatcttttcgatttcttttatccactgcggaagaatctctcccctatagatgtaccaatcttctgacccttgccaatcttccacaaaataacgtgcttctaccggcagcgcttttacgaattctcccgccgcaaccaaattacgtaaatgttttcctagaattattatgcgtagcctataagctgttcggctataattaagcccatggcttgttgcccacgtctgttttgatggatcagaatttactgttagccactggcattttttaatcattctaattccacgctttgtatctacaggacacattccaagcgtaagcccctgtcgcttaatactttcaacatccatagccgcacaaaaatgaaataattctctgctcctactcatatcctcaacacctttcaatcatcacatatagcttggccgcagtatttgcaataatgagcatcatcatctacctcacgtccgcatacaggacatgcccaacctttaggtatttgttgtggaaaaggacagtttggtataaaatgctcttcgactaccaaatttacttcttgtggtaactgcttttgagcagctgtcaataaagttatataagcctctcttttctcgttcataggcattttccaaatgattggttttaataaagccattgctctttctaactttagtatgttcattcggtttcaccgtccatctttgccccgcagttataacaataatg

SEQ ID NO: 10012 - DNA, 2935 bp, Unknown
  gut microbiota DNA sequence
aaatcgcctatattttaaaatccattttttccgctttatgtattctcttgaaaaaaattttcttacttgttctaaagtatacaaaaacggccgcatatgcggccgtttttagttcagattatttaattaactgcaaaaatctgtcttagaaagtgatcgtcagatcagtccacatgattttgtctttatcactggtatcaaatttagatttagtatcatagtaagcagcagttaaaaccatatttttagcaacagtataatttgcacctacaccataacctttaaaaccttgtccgtcaaaggtattagcatcagtagtatgagcaatataggtttgtccgcctaaatcataatagttggcaaacaggccccaggaaccttttttagctgcttccgcacccttgaaggtcaaccctacagtccagccgtcatcatcaaggccgtcaagatcaacatcatgatagctcatatcgcctttaaggtacatggcattcaaagcaaaatcgccaaactcagtaccggcacctacgaaccagattgcattatcaagtttactgtttttagctaaaatgtctttaaagttatagtaacctgcagacgcgttgaatttaccgaaatcagcaactacagcaccgccggcatagctgccgccggtagttccggaaacgcccagcttatcgagatcgtcagttgccttaccagcggcaccaatgatcttgattttatcgccgtaagaaacttccacgccatcagcacgattatcataaatattgccatctgcaaagaaagcattataacggccggcagttacatccataccgccgagtcggccttccagataggcacgttggaaatcagtgctttcgtcaccggaatcagtagacagatcctgcgtgttctgcagcataccggtatatttccagccgtcattgatctgacctgtgatccagatacgggaacgcaaagtgctttcataatcgttggaaatgctgcctttaccttcatggttagcatacaaagcacggaactcacctgtaattttaacattatcagattttttctccaaagctgcaacacgtacgccaagactgtccagttcgtcagcaaattcagctgccaaacgatctacgttagcgccttttgccattgcttttgctacgatttgtgccatttcataacgggtcatcagacgatcgccaccaaaagtgccgttgccataaccgtcaacgataccagctgccgccagcttgtttacggaatcatacgcccaatggcctgccggcacatcggagaagggatttgcagcataggcagaagcagttacgcccaatgccattgccattgcaagtactaaagattttttcatgtttctttcctcctcggaaatttattaagcttataaagactttgcgctcaaataaataattccgaatctcctttagtgcgagttgccttgtttcctctacttacggaaatccatttcattattttttgatctaaaagtataagcttttatatattctaaacactggccttcctttttgcaaggttaattgctatttatttattttaagtgaaaatcagtaaattcatcattttataagcttttaattattttttctgccaatatcctataattttattttttaaaattgcattattacaccaaaaattattttcgcctatcctatctctattcttataaaataaggccattgtatataacaaatgaattatgttagaataagtaaattacgaatataaaggaggtcctaaaatgaaaaaaacgctgcttacagcaggtatcatcctggcagcctgcctgccttcattcatctccgaagcctcaaataatattattctgcccccctctcgaaacagctgttatcaaaacgtcagcagttatacgaacataaccctgggcatggccgatagggaacgcaaagaacaggaagcctgggaccgtgaaaagaaacggcgcggcaaagaatatgaatccgacaagcaagagcgccgggaccgtgaacgctgggaacgtcaggaagataaaaaacgcacagaggaaaaccttcaccataaaaaagacaaaaaacgtaagaatgacagtgattttgaacgtcagcaaaaatggaaattcgacccttctcaatcgggaggagaaggtgactgacagcaggaaccaaaaaaggggcagctgatctatgatcatctgcccctttcaataataagcctatttaaattgggtcacctttttcaaataactgcgtacagtcttggcaaattcttcgctcttccaatcactgcgtacagtcaaaatctcttcaatttccatatcgtcagaatactttttaacataatatctgcccgtaactttgttcaaaaatgcaaactcaccgctcatatccagcttcaaagtaggctcgcgacggggaaacaaagctttgtcatccagtttatcaagcgacatggcaataacgatatccgcaccgctttcacgggcaatacgttccaggttggctttactgaaatcagaaatattcctgctgcctactgccttatccacaacatcctcggcaatcatatcaaactcaggaaacttaaacgtatccatgatctcttccatgtaaatcatacttgcagtagtattatcttctacatggttagccagcgggacaacagccaattttgcggcttcagccttacctgctgccggcagtacaaaacaaacagccaaaacagccattagtacaaaattcataatttttttcattaaagagcctcctctataccagattagatgtctactctgaacatcttagcacattttaactgtaaaaaacaagaggagatacaaatttgcttttttcacaagaacctttgttaaattttattacgtttcctttaaaaatataaatgataaaaaataacgtcagcc

SEQ ID NO: 10013 - DNA, 133570 bp, Unknown
  gut microbiota DNA sequence
ctaaagatattagtaggtgtctatcggaacaaagaaatgaaatagaaatttttcttaatgaattaagaacaaatgcagataataaattaaaatatttatatgaaaccttagattcattaaaagtacagattcctccttcattagaggctattattaacaaacacaatggattagtggaaaaaaataatagtagcgttctttctgaaaaaaaagaagaagcgagaaacaaactcagattgcataaagttaaattataccttgaagaatttaactttgctaccgaaaatactaaatgtgaagtatttaaaaaaattttttctgaaataggctgtgacttacaacgagaacgtgaaagaatcaatgtgcgtcaaagtgacataaaagtgttagaagatgagataaaagagcttgtaagatctacaaaaaatgaaaaaatattagccgatgaaatcaatcgaaaactaaaattatatgttaattttgagttagttcatatgcaagataaagatgagaaaggattttatcaaataaagtgcaaaagaactggtgatattagaaatgtggacgagctttctacaggtgaaaaaaatatcattgcgtttttgtattttcttgagaaattaaaagaagtaaaagcaggaaatagtaaacctaagttgataatatttgatgatccgatgaattctaacgatgacaccatgcagtatataattattgaagaattgaaaaaattaatggccagtgtaaaagaagacaataagtttgtcttgttgacacataatattcatttttatttaaatgtaaaatatggtgtaggttataaaaaaaatagttttgtacgattgacttttagtggtaaaaatatagttttgaaatttattgggtgtgaggaagatgattttaaaacaagttatgaagcactttggaaagatttagaaattatgtatggatgtccagtgctatcagatagcatgctcttaaatcaaattagaagaataattgatacatttactcaatttaattgtatagacccaaaggatatgttagctaatgtaagtggtgcaaaaaaaatgtttgatgtaaattctcattctatagatgacttggaagctgatttgagtggtatggagaagatagatattataaagatgttacaagagtgttttaaaggtgtaaatgcagaagaacattttgaaaatcattgtaaaatagaaattgtttaaataaaagctgctagatatttttgtctagtagcttttattcgccttacaacgttgtttatatttagcatacacgatataatatagtaaattagcataagcaagcattaaaaaaataaatgacatagctaaaagggtaacacaaaaagaaactatacaaaaacacttaaggggtacacgcatgattactggcgaattaaagaataaagttgataaaatttgggaaatattctggacgggcggcttggccaatccattagatgttattgaacaactcacctatttgatgtttgtccgtgatcttgaccaaatagaccagacccggcaaagagaaagtctgatgctgagtattcctcataaaagtgtatttcagggtaaagaacagcttaaatggtcaatatttattcataaatccgctgaagacatgtacaaaatcatgcaggcagaagtgtttccttttatcaagcaattaaatggcaacagcggtacttatgccaagtatatggcggacgctatttttaaagtgccaacaccgcagctattagaaagactagtaacagaactggacgagctctatactcaaatagataaaatgccggataagcaagatgcccgcggcgacctgtacgagtatatgctttctaaactggcacaggccggtactaatgggcagttccgcacgccgaggcatattatccgtatgatggtagagctaatggatttacagccaggcgacactatttgcgaccctgcctgcggtacaagtggctttttggtagcggcaggtcagtatttaaaagagaaatatttagaagatattttttacaataaagagcaaaaaacgcattatgatagcaccatgtttaccggttatgatatggatagaactatgctgcgtattggtgccatgaacatgatgactcacggtatcgccaatcctaatattgcatataaagacagtttgtccgagcaaaatactgacagtggtaaatatactaaaattttagcaaatccaccatttaaaggcagtttgaactatgaaggtgtatcaacagacttactaaaagttgctaaaaccaaaaaaacagaactgctctttttaattttgtttttacggatgttaaaaactggcggacgttgcgcttctattgttcctgacggtgttttatttggttcgtccaatgctcataaagctattcgcaaagagattgtagaaaacaatcgtctggaagcaattatatccatgccttccggtgtgtttaaaccttatgccggagtaagtacggcggtaatcatttttacgaaaacaggtgccggtggcacggatgatgtttggttctatgacatgcaaaatgacggttacagcctggacgataaacgtactgccatagtaggcagtgatatacctgacattgtggctcgctttaaatccctgggagaggaagcaaagcgtgaacgcacggaacagagctttttagtacccaaagcagaaatcgtagctaatggttatgacctttcgataaataaatacaaaaaaacagtgtatgttgaagaaacatatccgcatccgctcgagatcatgacagaaatcagacaattagaaagtgagatcacctctggcttagcagaactggaggcgatgttgcgtgagtaagtgggaaagcttacaattaaataaaattgcaggattagtgatgggacagtctccatcatctgattcatataatactgagggcgaggggatgcctttttttcaaggaaaaagtgattttggaaaagtgaatccgaaaataaggatgtattgcaagagtcctaaaaaattagcacataagaatgatattttattgtctgtacgtgcaccagttggtgacgtgaatattgcggaaggaacatgttgcattggacgtggactggcggcgatatcaggtcaaaaagagaaaagttattcgaaatatatatattattatttactttggaaaaagaaagagttagaaaacattggtgtcggtagtacatttaaggcaattgggaaaaaagatattgaaaaaattctaatcccgcttccacctctagatattcaaaagaaaatagctactgctctggatactgccaatgcgctcatcgaaaaacgcaaagagcaaatagaaaaattggatttgttaattaaatcacagtttatcgaaatgtttggtgatccagtgactaatcctaaagggtgggaaagcttgttgtggaagtgtgtttttaacacaactacaggaaaacttgattcaaatgcaatggtaacatatggacaatatcctttttttacatgcgcaaaggaatcatttttaattgatgtatatgcctttgattgtgaagctttaattcttgcgggtaataatgctgcaggtatatatgatgtaaaatattattcaggtaaatttaatgcctatcagagaacctatattttaacattaaaaaacgcacataataaatattgtatttttaaaatgcaattagaattaaggttaaaacagttgcgatataattcaaagggaacaaatacaaaatatttaacaatggaaatattaaataagttagattttattattccacctaccgatcttcaaaatcaatttgctgaattcgtacaaaaagttgaagcgcaaaaagctttactgcaaaagtcactagccgatatggaacaaaattatcaatctttgttgcaaaaatgttttaagggtgagatattttagtcgtaaaatgatgaggtgtatttgatgaaaaccaactttgattttttattaaaagaaccacagtttgaaccatttgccgaggctgccatctcggctgaacgtgttttgcatatttcgcctgcgctgtgcgctacggcgtgccgcacagcgttagagtttgctgtaaaatggttgtatagcatagacagttctttaacaaagccctatgcagataagttggttacactcatcagcaccgaagattttcaggatttaataccgtcggggatggcggcgaagataaattacctgcgtaaaattggtaacaatgctactcataatcctaagagcgtcaataaagaccaggctgttttggctttggaaaacttacatagctttttggactttttagcttgctgttatgcggacagctatgcagaaacgtcctttgataaggggattattaataaagttgttgagccggcagaggtgcctttggctcaaccggaagtagaagaagtggacttccaaactttgcttgatgaaaacttccccaaacgcccgggcatgacggcgaagcgtttagaacgtctcaaacgtggctatgaagttaagccgatggatatgacggaagcccaaacacgtaaggcgtatatcgacgtaatgcttcaggatgccggttgggagcgcggcgttaactggtacgatgagtatcctgtcgataatatgcccaataaatcgggctatggcgcggcggattatgtgctttttgctgatgacggtatgccgctggctgttattgaagctaaacgtactagtgtgaatgttgaaaaaggccgtcagcaggcagttttatatgctaattttttagaacaaaaatttggtaaacggccaattatttttttaaccaatggttacgaaacaagattatgggatgatcggcactacccggagcgtttagtatctggtttttactccaagcgtgatttggagcagtattttggtattttaaaagaccgcaaaggtttaaaaggcgtacagataaacgatgctatttcaggccgttattatcaaaaagaagcgattcaagcggtatgtgatgcaataggtgagcgtaaccgccgcaaagcgctgctggttatggcgaccggtagcggtaaaacacgtacagttatttcattagccgatgttttgattcgccacggctgggtcaaaaatttgttgtttttggcagatcgcaatgctttagttactcaggctaagcgtgcttttcataacgaactgcctaacctttcgctgtgcgatttaacaaatagtaaagaagatgccaatgccagagcggtattttcgacatatcaaactatgatgaattgtattgatgccatgcggaatgaggaaggcgggcgcctgtttactccggggcattttgatttaattgtagtggatgaagcgcatcgcagtatttataataaatataaggatatctttacttattttgatgccctgttagtgggtctaactgctacgccaaaagatgaaatggataaaaacacctacgagatttttgagctggaagtaggagtgccaacttatggctatgagcttgaccaggcagtaaaagacggatttttgattgattttaaatcggtcgaaacatcattaaaatttttgactaaagggattacttatgacgaattatcgccagaggaaaaagaagagtacgaaaagacttttgctgaccaggacggtaatattcccgagtccatagattccagtgctttgaaccagtggatttttaatgaggataccattaaaaaaacactgcatattttaatggagcatgggcaaaaagtagattttggttccaagattggaaaaactattattttcgctaaaaatcacttgcatgcggaaaagattttaaaagtgtggaataaagaataccctgactatccgcagcactatgcacgtgtgattgataactatactaattatgcacaaagtctgattgatgattttgcggataaaaagaaattgccgcagatcgcgatttcggtagatatgctggatacaggtatcgatgttccggagatacttaacctggtattttttaaaagggttatgagcagagctaaattttggcagatgattggccgtggaaccagaacctgtgaaggcttgattgatggccaaaataaagaaattttttatatctttgacttgtgcggcaactttgaattcttccgtttgcattctaaggggtgtgaagcaagtacagtgccaactttgcaggagcgcacttttaacaccaaggtggagatggtttataagctgcaggaactgagcctgcaaacagcagagctgcaagaatatcgcaaagaacttgtggcatctttagttgcacagatcaaagctttgccccgggataattttgcggtgaagcagcatttgcgtgtgattgataagtaccagtctgaagcggattttacggtgttagaatttaaacaaacgcaggaaattgctgaacatgttgcgccattagtgttgcctttgggtgatgatccaacagcgtctcgttttgaccagctggtttaccagattgagctggcgatgttaactggaaaaaactttaaacgtgcgcagaatgatattaggggcaaagctgaagagctggcgaagctgggaacaatacctgatgttgctgcacaaaaagacttgatcgaagaaattctggaaagcaactatttggatcgtattggagtgacaggatacgaagagttgcgcattaaattacgcgatttgatcaagtttattcctgatgggctcaaagtacattatgatactaactttatggacgatcttttggcaatggaatggcgtgaatcagaactggataatgacgatctggttcagtataaaaagaaggtcaattactatattctgcaaaatcaaaagctgcctgtgattgcaaaactcaagagtaatatgccgcttactgaaagtgacgttaaggagcttgaaactatcctgtggcacgacctgggcaccaaagaacaatatagctcgcaatatggagcaacacctctaggagagcttgtacgctctattgtagggttagaccatagggctgctaacgaagctttttcgggctttttaaataatgccggattggatagcaggcaaatgtattttgtgcgtcaaattgtaaactatattgttaaaaatggtttaatgaaagatttatcggtattgcaggaaagcccatttactgaccagggcagtatcagtgaattgtttgatgatgttaccgtattcatgaatttgcggacagttattgatggtattaatcaaaatgccatggtagcttagacgattataataagtgcgagtttagttaaaaatgtgagcatcattatttaataccaattattcaaaaaatgctaaacttattgagcgaaaaggataataagctattgcagattcatgaataactttagtattctcacactttattgatttaccactattcttttgttatactgaaactaccataaagagtgtgctagggacagccccgttgaccacacagcaacctgccaaaggtaaggtgctaaaggctgaatgatgggcttataagactactttttaagacccatcaggtgatgggtcttttctttatgagtaaattttgggaggaatttctcatggaagaggaaaagtggatcaacaaggggcatgtaagagcatttttggtttgcgacaaatcatttttggaatttgatgcgccgtttgtgcagtggttacgcgaagaaggatttaagattggctggtgcaaaggacactactcaaactgcccgtggatgtatatcaatatcacacgtaaattgtacgcacatggtatgccgggggtagacattgtaccttcgattggcgagcatgcgattaccttagatgagtttaaaacgatctatgcgatctataaaaagtacgagggtaaagaaatttttacttttcataaagaacggtttgattgttatgaataaaggaaacagctcaaatcaccttgaatcggtgatttgtagttaaagtattggcaaaaggtttttgattaaaatattggacatttttcgccgctaagcaggctggaagccggaaacaggtaaattcaagctgagcttgagtttatctgtttttttcaaggtaaacgtgttggaaacacggctgaataaatgttatgattatgatgcagaaggggtggggaggatgatggataccaaaactggtttgaaaatcgcatatcgccgtaaaatgccggaaactctgcgtacgctttcctttgctaaagaaaaacatgcggggcagtatcgcaagggggatggaagcgttccgtatatagttcaacctctcaatatggcctgtcatgctctggaaatgggtatatatgacgacgctgtcattgtggctgcgctgcttcacgacgtctgcgaagattgtgatatagcgccggataaactgccagtaagtgaaactgttcgccgggcagtaagcctgctgacgtttgctgtgaaagatggataaacaaaggcccagtccaggagccgttacttttgcgcgatcattgaaaatcgtgaggctgttattgtgaaattgctggatcgctgtaataatgtttcttttatggcgcacggcttttcgccgtctaaactgggtgagtatatcgaagagaccaaaaagtttattttaccgttacttacagaaacaagaaggcggtatccggagttttacgatgcctgttttctattaaagtatcagatctgctgtgtcataaattctcttgaagctgttctgtcgatgacaaaaaacaggacggaaatttaataagctgggaggcagataagctatgaacgcagaatattacggctggttaggcgctaaaggttatgatactgttatcaaaatcgaagattacgacgcgtatgtgtacaggacagttgaacagaaattcgttaaaaacaacgactttctgaaagcgaaatgggaccctggcagtgagtttgaagctattactaaaaaagaagcagataagattatcgataggattaaaagaggcttaaaaaataactatagtataaacatccaggaggcagtaaattatggataaatatgaagaccttatagaacaatatgtggaaaaatttgatgaaggttttcctactttcatggcaccaggtggggaagaggagcatatggaaattattaaaaattgtttaaagactggtaagtcatacgatccgtacacagatcctgattttgatccttatgctgactattaataaaaattaccgaaaagaaagtgaaactttatgagaaaattaacagcattgtttagtgtaattgttttgatggtgggcattctggccttaccaattacaagttatgcttattggaatcatggtaaagtgcgtatagtatctcggggagaggatttaaaagttaggattgttgagcgtggcgaggattttactattagatgggtagatcgtaatcctggcgttggtgagtgggaggaagttcctagacttgaagattttaccattcgttttgttgagagtggcgaagatgtaaaggtaagatttgtttaccattgaggagcagatttgcatatggatggaggaaagctatcgccttgtgttaaagtgaattagcagctaaaaaatgctataatattagggccaaaatcaaaaagagcttctgctaaaaacagaagctctttttgattataaaaccttactcaacaagttcaacacgtttttgtgggtgattttttcgatggtgctgtcgctgtagtttttgctttgcaggtattcaatcagcggtttgtaatcctgtacgccatggatattataaggcgggtgactgataccgtcgaagtcgctgccgaaaccgacgtggtcgtcattgcccaaaaggttcagcatataatcgatatggcggtacacactgtcgatgcaggcattgttataatcttcttccaggaactgtccggcaaaggtgataccgatcagaccgtcattggcattgatggctttgatctggtcgtcattgagattacggggatgactgcaaagtgttttggcattggaatgggtagcaatgattggcttggtagaagtttcgataacatcccagaagcccgctgtagcaatatgggaaacgtctaccagcatgcccagacggttcatttctgcaactacctgacggccaaaggtggtcagaccgccgccgctgcattcttcgttgacgccgtcggcaatgtcgttgcggttgctccaggtaagggtgatagcgcgcacgccaagctcatagagcatgcgcagggcttccagactgccatcgatagcgccgccttcttcgatagccagcagagttgctgctttgtggttgagcacgtcggcagcatcggctttagttaaaacgggaagtacgtcgatgcctttctcctgcagtgctttaagctcctgcttatatttgtcgaggaggcaaagcgtataacgcagtcctccgtagtaacggaattcgtgggtcgggacaaaaatagcgcaaaactgcagaccgccgcccagttctatctgacgtttaatgtcgaagtgctgatcgttgtcatacagggaagtgccttttttgtaaagctcggtaagtgtgtcgcagtgacagtcgcagatgaacatgatttacacatcctttctaaaataagaatagccgcccgcaggcagctattctgttttatcaaaatttcaattaccctctgtagtagtagaagaaggtcataccgatattaacaagcattgcgccggccatcgggatagcggtacgttttaccaggtcaaacggagaaacgccgcccatgccggaggatacaacgataactgctgtgatcggtgaacagttacgggcaatagaagccgcaaaatgcatcggcagaagcatcagtaccggatgcagtcctgtatgggctgcaacagcaggtgtcagagccgcaaaggcaaagaacggagcgttgccgctgcccataacgatagccgagaaggtgatgatagcgaccataacgagcatcatagccatcgggccaaagccaaagccctgactgccggagatcagcgcattgatagtacccatggacagaaggccctgagcaaaagtctgaccggctacgatcaaggtgataacgttagccatctgcattcctaaaccgtcaaagaaggtctggatgtcgccgagaacttttttgccgtcatgccagcgcatgtattcgcagcaggcgccaataaaaagtccaatgaacatagccataacgatgttcattttgattgaggtgatccacagcgggctgaaggagaggatcaaagccagcgggataaccggcaggaccgcataccagagcggcgcgctgtcagccggatcatcttcagcaggtttttcaacttccatcggctggacgacatgtccgtcgcgtttatccatatatttttgagtgaaatagtgcagtgtgccgacaacaacgaaagcaaccaaaacgatcggtacctggtagtcagtccagtaaactaccgggttcaagccggcggtttcagcagaaaggatggtgccggtatcactggggctccagtcgaagcagagcgtagtagcaacagcagccgtagcagacagacggctgacaccaagtccgatcaggatcgggaacatggtgaccatcagcagcatggccagaccagatgcactgttgatgcacagaccgatcagcataccgacaacccaggtgccggataaaacgatataaggtgattttaaagccagtaaaggacggatagtcagacgaactaaagaacgggaagctccgattttgtccatatagcgggcaaaagcgccaactgccataatgttcataccgagcttgccggcattagaactcatggtagcgcgaataaattcaaaagcatcaaagaaagtagagcctgtagcggctttggccggtaagatagtaccgtaaccgaaaattgcggcaatatacattaagatcataccgcctaagaataagaccggttgaggtttgtactttttgtagatcagaaagccgacccaaaaagtaacaagagcagagattactaaacccattggtgcaacaccctttcttcatatataatgtctttcaatgactaaagtatagcattctaatatctcataaagcaagagcagcagcaacaaagggtaacaaatttacagaaaattttattaaaataaaaacgctgtaatatttttgtactgatttccagaacataaaaggacgttcttccttagaagaacgtcctttggactaacagtaattatttatctttggacaccggcttcagcagcaactgcatgctgtacataaatagcctgtactgcggcattgcggccgataccctgcaggtgacctacagttttaacgcccattttttcgatcatggatttccaggaatcttcttcatcgccgtacatatcgttgttggcatggtcgcctgcaacgatcatcagcgggaacatatgcacagttttgtaaccgcgtgctttgatttgttccagaacttcgtccacgttaggagtatccacttcttcaacagtgccaactactaccggtaaacccattttatcaaaggtttcctgcagcattttgtaggtgttgccaaaggattggttgttatcacggggagaaccgtgacccatcaagacaacgccttcacctttgccaagagtcgggaattgagtcgcaacagcggaagcagcgatagcgaaatcgtttttacctaccatcagaggatcgctgacaacgatgcggtcaaaatcacctttgaatttatcaacggtggtcaggactttatgctcatattcttcgccgtgcagcaaatgagtcggttgtacgagaatgtctttataaccggcttttttcagttcttttaaggttgcaggcaaatcgttgactttgatgcctttatttttttccaatcgttccatgatgatgtaggaagtaaaagcacgtttaaaatcacggttcgggaaagctttggcaacagcttcttcgataccgccgatatctttcgtacgggtgtcgtcgaaggtcgaaccgaagctgactactacgacagccttgtcgtttttcggtgctttagcagcggcagaagcgcccatagttcccagtgcaaaaaccatcattgaagccataactaacattgaaagcagttttttcataaattattcctctttcctctgattattttctgaataggtaataaaaaaaccatccataaatattagggatggtgataaaacatggttagacccatgatctttccccgtccttcgcaggtcactaagatcgcgatgcaggtagttcttctggcttgacttcatggctcggccttccttcccggaatattccagtggttctataggcgttgctccatcttacagcggcgggaccgcgccggcttttaaccggtcttctctgttattcctgacggaacctgcattaccgtattcagtttgatatactaaattataacatctttgaatagagtgtcaagcaaattaggaaaaaatatcattaagatacagaggtatacaagaataaacaccctttaattatttaaagggtgtttagaaatttgcagagttatttttttgcagctttatcaagatcctgaacgaaagcattggccatgcgctgccacatatttgttgtatcactgtctgctgtacggctgcgtgtatcgcgcagactgaaaattatttttcctgtagcagggtcaaaaagatgaaaagctacatcaacgtagccgtcatatacagtgctggccggaacatattcataaacagttcgttctgcatcccgttcgatccagtttcctttattgtctttgaccttttctttgtaatatctggtacgcggttcttcgtgagcggggatgacccgtctgttgtaaccaaatttatgggcgattattttcagatcagcagttggagcaggcgctattttggtcgatatatctgtataagtgccgcttaaagcatctttggtcagttgggaagcatcttctttggtaattgaaagatttgattcgatgcttgtatcaaaaacataatcttttttagttaaagctttttgtaaagcacttattattttttcggtcgccatatcgtcaacagtaaaattgctgccgacaggatcgactacacttatggaaaccaaattgatgcggtgaagtttattaaaatcgtaattgggattcgtccatttcgttttgtctgcatgagcggccagcggcaatgccagcattgcgatggcaacagtaagcaaaagaagtaattttttcatcattgttaaaacagctcctttgaattgttaagagtttttgatgagtttttttatcccggtaaaggtttcggggctgataacatgttcgattcggcaggcatctttttcagctgtttcttcggatacgccaagattttcgcgtaaaaagcgagttaacagcagatgtctttccaaaacagcgtttgctttagcgagccctgtttcagtcagaatgatgttgccgtccgcttccatcagaatgtaattttcgcgttttaaaatactcatagccctgctgacgctggctttggtaaaattcatatgcgttgcaatgtcgatagaacggacactgccgttttgctgctgcagcatcagaatggtttccaaatagttttctccagattcttgcaaaatcataacaagtcctccgttggcaatagtgccgtttgattgatcgtgtaataaaacacagccggtgaaaattagtgagcagtaagaatattccggcaaatattattagtactattttaacattataaaaaggtctgggcaagtatagttagagcaggataaaaaacgcctgaagttttgacttcaggcatagaaaaagtagcggtcaagaacgttcgtaaacgcgttttgtcagggttaatgttttctctaaaacagaagcaaataacccggatgttaatgctgtgaaaatcattccaggaagagctgctgccaacagagggtagactgccttaccaataaaaagactgagtgcaagacgtgctgcggaggaagcgacaggtcctgataacaggtagaagattttggtttttcctaaaactgcatataataaggcaacgactattcgaaaaagcattgcaataaggacgttgaaaatagtttgcgtacccaggagtaaaccgccggcagaggccagaatacctgcaagcagatattttttgatgccaaaaacaccgcagatcgctacagcaataggagcggagagttgaaattcacttcctggaataaagctgggaagcttaaaagccccgctgacggcgataaatgctgccaataaggcaatttcactgatttcacgaattttaaaagtagacataaagatcaccttaattatggttaactataaactgaaattaagtttacgataatagtatataaaacttgatggtggtatgtcaaccataagaatggtaaaagttaacgcaataaaagtatgacggcaggtaaagtttcgtgtacaataaagttgtagagaagggagcggcgtaaatgttggattttattaaggaaaaacaggacgtttggcagattttgcagctgactgacaagcctgttgttttatatggaatgggtaacggtgccgaccagattattgacttgtgtgacaggatgcaaataaaggtcgccggtatttttgccagtgatgaatttgttcgcgggcaggtttttcgtggtcatatggtcgagacttataccgcagttaaagatcggctgggtgattttctgattgttattgcctttgcctcagagtcgcctgcagttttaaaccgctttcaggagctgagcacaatgcatgaaacagtagcgccgcatttgccgctgtttcccggagatgaaacagtttcgtttgactggctgcagcagcatcagcaggaattgcagcaggtatatgacaatttggctgatgattggtcccgagacgtgtttgcagcatcactgaattataagctgagcggtaaactgcattatttatggcaaagtgagacggagcggctaaaagatctgcagagtattttcagttggagcgaagaagaaacgtatgctgatctaggtgcctataatggtgatacgatcagggaatttttacagctgactaataataaatataatcggatttttgcggcagagccggataggcgtaattataaaaaattatctgcttatttagatgcaagtggtttgtccgatatcaaaatttttgaaagagccatttggaaagaaacggcagaactgtctttttctgacagcggcggccgtcagtcaacgttgctgacaggccagcgtcacatagtgcaggctgtcgatattgatacactgcttgaagatgagcgtgtaacttacatcaaaatggatgtggaaggcgctgagatggaggctttgaaagggggaaaggagcagataaaacgtaataaacctaaattatttattgccgcttatcatcacgatgcggatattttcctgctgccattgtttatgtggcagttagtgcctgaatataaggtttatctgcgtaaacatccgtatgtgccggcgtgggaattaaatttttttgcagtcgtataatcgcgggacacaaaaaatcccatagggtcaaaagtgtcgtattgtcgattgacaatggaatgttttttaaataaggcgtaaatgtgacataaattttaattttttgtaaaactttttttctaatgtaagcaggaattttacaaagccgggcgaactttaagggtagtatgacaacacaaaggagtggatgtttaatgaaaaaagcaaaatggttgtgcactgcagcagcagttctggcattatcagtagcagttgccggctgcggcggcagcgacgataagaaagctgcagattctaaaggcggtcctaaaggcgacgttatggtttatacctctatttatcctgatatcatcgataaaatgtgtaaacctaatgtagctaaagcattccctgatatgaaagttacctggttccagggcggtactgaaaaagtaatcactaaaattaccggcgagatcaaagccaacaaaatcggtactgacgttctgatggttgctgatccttcctactacctgactttgcaggatcaaggtttgctgcttgattatgtttccccgaacctgaaagatgtcatcactgataaagacaagaacggtgcttggtcctctgttcgtgtctgcaacatgatcattgcttataactctgataaactgaaacccgaagatgctccgaaatcctggaaagatctgaccgatccgaaatggaaaggcaaaatcgctatgccgaacccaatgctttccggtactgcttatgtagcggttggcgctttggccgataaatatggctgggaatatttcgaccaattgaaagctaatgatattcgcgttgaagaaggcaactctgctattcagaacaaattgctgaccggcgaatatgctgctgcaatgattttggaagaaaacgtcctcaaattggctaatactaaaaatgagcctttgaaagtttcctatcctgaagacggcgttatcatcatcccgtctccgatcgctatttttaaagcaaccaaaaaccccgaaggtgctaaagctctggttgactggtggttgtctaaagatggtcagcaggcagttgttcaaggctggatgcactctgtacgcggtgacgtagagccgcctaaaggcgctcctgctctgaaaactttctctgataaagctattaaagtaaactgggaaaaactttccaaagaaaatgctcaaatcaaagaggctttccgcgtaagagttatggaatagttcttattaaaatttgttgagtaacaatttttaagggatcaggggtcgtttttgacgatccctgttttccaatttctttgcaggaaaatcctgtaaatgatttttcaccggtctcaaagccggggaaaggagccatagtggggtctttacctagatttaatagtaaattcatagttattgctgtttccgttattttattattatattttgtggttttcccgatgggaatactgctttatgacagtattatggttaatggagccatcaatttcggcaattatgctgatgtttacagtcaggatgttaactggcgtgctttgtccaatactgtgcagctatcgcttttagttatggtagccagtgttattattacgttcccgctggcctggcttgttggccgcaccgatatgcccggtaaaaaaacataccggactttactggttgccagctatatgatccctccttatgttggtgcgattgcctgggtacagcttttaaatcccagcgtcggttatttgaattcgatttttaagtggattctgcaactgcagcaatctccatttgatatttatactatgggcggtctggcttgggtattgaccctgttttattcgccttttgcttttattaccatttcccgggcaatggaaaaaatggatccgacgctcgaagaagcggcacgtgtttccggagcttcccctctgcgtaccctggtcgatgttactttgcctttgatggcaccaagtattttagcaggcggtctgttggttttcattgctgccggttcctgcttcggtattcctgccattgttggtatgcctggtaatatcgaggttatgactacccgtatcgtcacctatatttacatgggtaatgatgagggtatccgtgatgccacggctttagcagcatctttgatgttccttgccaacttcttactgttctttatgacctggatgctgggccgcaaggattatacaacgatcagcggtaagagtacccgtcctaatatcgtagagcttggcaaatggaaatggcctgctttctgtggtgtaggtctatatgcgtttattgcagtaattttaccattaggttctatattgctgacatcacttttaaagagtatgtcgcgcggagttacctggtcgaatatcggctttgatgcatgggagcctgttattaccagcagtcagtatatggagagtatctggaattcggtcgtgtatggcgtaatcgccgccactattggtacgatactttcagtgttcattgcttatctggccgttaaaacaaaagtcaaaggacgtagcttcccggatctgctgaccgttatcggcggttctactccgagtatcgttatcgcccttgctctggttatcaccttctccggtaatttcggtctcaatctttattcgtcgatgtggattctggtcgtcagctatctggtcaaatatatgaccatgtctgtgcggacaatagcggcttccctgagtcaggtgcacgtttctcttgaagaagcagcattaaattcaggtgccagctggatcagaacctgtaaagatattattatgccgttgatcgctccgtccatcatcgccggttggttcctgatctttatgccgtctttctacgagctgacgatgtcgctccttctgtacggtgcagaaactaaaactatcggtgttttgctgtacgagctgcaaacttatgcagatacacaaaatgcttctgtattatcagtaatcattttgactatcgttttggttggtaacctgatccttaacaaactgaccaaaggcaatgtgggaatttaaagaaggagtggaataaattggcacaagtacgtattgaacatgtatttaaacgtttcgggcctgtaacggctgttaatgattttaacctgacggttgaagacggcgaattcgtttctatcctcggtccttccggctgtggtaaaacaacttccctgagaatgatcgcaggctttgaaaaagctacagaaggcgagatctatatcggtgaccactgcgtcagttcttcgtcgcagaataaatttgttcctccggaaaatcgcgatatcggtatggtattccagtcatatgcagtttggccgcatatgacggttgttgaaaatgtggcttacccgctgaagatccaaaaggttcccaaagaggaacgtttgaaaagagtaaatgaaatgctggagctcgtgcatttaggcgaatatggccaccgttatccgcatcagctgtccggcggtcagcagcagcgtgtcgctttggctcgtgctttggttgcgcagccaggtttgctgctgttagacgaaccgttatccaatctggatgctaaactgcgtgaaagcatgcgttttgagatcctgtcgattcaaaaagcacttggtattaccgttgtttatgtaacccatgatcagggtgaagccatggcaatgagcgaccgcgtagttgttatgagtaaaggcgtagtgcagcagatcggtgctccgcatgaaatttataccaatcctgccaacaaaatggttgctgattttatcgggttggtcaattttatgcagggtgaagtatcggatgacagagtatacctgcaaggtactacagcttctttccccaatacttcgggtgtttccggcagtgctaccatcgctgtacgtcctgagaatattacgatgagccgcggcggtggtatgcttgaagggacattgacgcatcgcttctatttaggtgatgctgttgattaccgtgttaccgtcggtgatcatgatgtacgcgttatcgtcaaaggggcagacttgaaagaatttgccgacggagaaaaggtatatcttgattttgaaaaagtaatgatctttgaccgcgaataattaaaaagctgtttatatgaaaaaggaaaccctcggatgttttcatccgagggttttatttttaatttagcgggcttttactgaactgtgccatataaagcttgtaatattctccctgcaaagccatcagatcgtcatgagaaccatgttcgctgataccgttgggggtgaggacaacgatacggtcggcatgacggatcgttgccaggcgatgggctacgatcagggtcgtgcggttgcgtgacagctgcatcagtgattcctggataaggttttccgtttcattatccagggaagaagtcgcttcgtctaaaatcaggatgggcggatttttgagaaaaacacgggcaatggcaatcctctgtttttggcctccggacaatttaacaccgcgttcaccaagctggctgtcataaccatccggcagctgattgataaaagcatcagcttcggccaatctggcagcggtgatgatttcttccatactggcatgagggttgccgtaagcgatattttcacgtacagagtcagagaaaaggaagatatcctgctgaactatgccgatattacggcgcagtgattttaaggtcacattgcggatatccattccgtcaatggttataacgccctgctgcagttcatagaaacgcggcagcagattgcagatcgtgcttttaccaacacctgtagtgccgacaaaagcgataacttcaccggcagcgatatcaagatcaaaattttgaataacaggtttgccgggatcgtagccaaagctgacatttttaaaggaaatagagccttttaaagtaccacagtcgactgcgccgggcagatctgtattttcagaaggggtatccatcagctggcaaaagcgctggtaaccggccatacctttctgataggattctgctaatgcggtcaggcgcaggatggggcggataaagattgatacatacagtaaaaaggcgaccagatcgctgatctgcattttaccatatgcgatcatggcgccgcctacgacaatgataacaagattagtgacattggaaaacaatacagcgttgctgttcaggcgtgataaaaggtcgaacgatgttttacgtgcctgtaaaagagcttgtccgtttttatcaaggcgtttttcttcccattcttcattgttgaaggatttaactaggcgtatggcattcagactttcatttgtctgtgctgtaagattaccgacctgttcgcggatcatacgccctgattgtttcagtgcatgattggtagcaactgattcataagcttttcctaacagcagcagattgaccagtaacgctaaaggccagttaagataaataagtattcccagagtaccaagcatggttatagtacagaccagcaggtaattaggaccaagaaaaacaagctcacggatctcggcaatatcgctgacaatacgggaaatcagctggccgatacggatgttgtcaaaataacggaaagacattgattggacatgctgaaaaaggtcactgcgcatatcctgttctatttttgcacccattaggcggccgtgtcttgagacttgataactgattataaaattaagcaggtataaaaaaagcaagatgatcgtagcctgccctaagaggaaaagattgccttcgggcagtacatcgcccagtatatagcgcataaagagcggaaaacataaatcaagggcggatgtgataacggatccgagcaaagcaaaaaacaatgttttccggtaagggcggtagtattttaataaacgttctggcatatggcagacctcgcagataaatgtacctactgctgctgcagccggtagaaatataaaaatgacgaataaaaatcaactataatcaattataacacattgaactataacagcagaggctattttgagtatttgtaaagtaatttgttaatgtgatttgaagtgtattggaaaagttagcttaagctaactcgagaaaataaaaaaactgtgcgtgagagctgttaagcacagtatcgagtgagcgttaagttgataagtgtaaaagtttggaagcgggcaaccccaaacagttagcttaagctaacgtataaattatacttaaaaaaagcactgatgtcaataattaagttcaaattagcagctgtacgggaattttgatcaatgatagtgatttttcgcggtaatgcgtacccttgtggtataattaatttattaccataaaaggcggtcgaactatgaaagtaattctggtaacagtgctgtcaattgtgtttctctgcagcggttgtagcagtaacatcaaagaagaacagaaaagtatcaagatctgcagcagcctgaatgaaacaatgacagatattttagcggaagattttgccaaacagcagaatgtgaaagttgaagtcagacatttgccggcagggaatttggatgaacggcttaattttctgagagagggaaaattcgatgtctggcttggcggtacgcctgaagaatattatctggcaggagagcagaaaatgctgcgcagctacaggccgagggaggcctataaagtacctgctgaaatgcgtgagaatcagtggcgctggacaggtctttatgtcgattatataggatttttgactaatcgtgaccgactgcgcgagttggggctttatgctcctgagacatgggatgaattgctgaaaccggagctttgggaagaaacagcgctggctgattttaaaaacggcggtcggagttatggcatgataacttctatctggcagctgcgcggcgaagctaaagctatggagtatgcggcttcttttaacagccagctgcctttatatacggccagtgaatgggaggctattgaagcggttcgcagcggcagaaaaacgatcgcggtagtttcactttccacagcattgcagctggaaaggcaaaatcgcgatctattcgcaactttagtcaaagacggtaataaaaactgtattaccggtgctgctattctccaaggggcaaatttagcagaagcacagtcttttatggactatttgctgtcagaacattcaaaagatttactggcctctaagggttatccgcttttgtggcgtgtcagtgattatgcccatgatgacgggcggaaaatgatgatcggtgatttagaactggcggttgatgaccttagctggactgcgggtcagaaaagcgttattatccagcaatggctgaatgctcagtaagataaaaacattgacgataacattgaatcggttataattaagatatagtaagcaggcaatttttgataaagacctgcagtgatgagaggatgacttatatgaaaaaattagtaatgctggtaactgtagttttaacagtggcaatggccgcggtttgttttgctgccggagacggtaatgatttaaataaacagcagaaaatagttgataagtttgtagcggcattgactgttgcggacgacagcggttatgcaggtgctgcagcgggttttagccccgaactgaagcaaaaaatggatgtaaaagcttttgctgctttgcaaaagcaggtcaaagatactttagggacaatgaaggaaatgaaatttgttgcttatgagcgttttgatcagggtgaccggttgacttatctgggaagctacagtaaacagcagctggtacgtgtgatttatggctttaataaagagggcaagctgacggagtttatttttgctccggtagaagttcaaaaacaagaacaaaaataatcaaaaataaaacgtcataacctttaggttatgacgtttttgtttttcactttattttttcgcagcagcaactgtgctaaaagctatttcagctgcctgtaatgttttttcgatatcttcaggcgtatgggccagagataagaaattggtctcaaattgagatggaggaagataaatgccctgttccagcatgctatggaaataaatgcggaacgcatctaaatcgcttgtgcaggcgctgtcatagtcataaacttcctgatcagtaaagaaaacagtaaacatagaaccaagacggtgcacctgtacaggcactcctgccttggcagcggctttagcaaggcctccggtcaggatggccgtcatgctttccagctggctgcagacattgtgtccgtgcatgtaggtaaggttggcgataccggctgccatagccagagggttgccgctcaaagtgccggcctgatacatggggccaacaggagcaacctgttccatgatctggcgtttacctccgtaagcggctaccggcagcccgccgccgataactttgcccagacaggtgatatcaggatcaatgccgtagaggccctgagaagatttttcactgctgcggaagccagacatgacttcatcacagataagcagtgttccatatttttttgtgatggagcgaatgaattccagatagccgtcctgcggtaataccagtcccatgttgccgggagttggctccatgataacggcggcaatatcgctgcctttagcagcaaaagcagcttccagggcagcccggtcgttaaaaggaacagtgatggtattggcggcaacgcctttaggaacaccggggctgtcaggaacgcctaaagtagctgcgccgctgccggctttgaccagcaggctgtcgtgatggccatgataacagcctataaatttaacgatgctttcacgtcctgtataagcgcgtgctaaacgcagagcactcatggtagcttctgttccgctgttgaccatacgtaccatttccatagaagggacaagtgtgcagagaagtttggcaagctctgtttcagccagggtcggcgcgccataggatgagcctttggcggctgcagtttggatggcttcggtgacctgcgggtgtgcatgccctaaaagtaaaggaccgtaagaaagtacataatcgatatattcgttgccgtcgatgtcggtgagtttgctgccgctgcctttggcaatgacaggcggaacaccgccaacactgcggaaggaacgaacggggctgttgacgccgccgggaatgtattgtttggcttcggtaaaagctgcctgagatttgctgtgatccatatgcggcctccttatttgcccagcagccatttggctacgtcgagagcatgataggtgatgatcattttggcgccggcacgtttaaaaccgagcatcgtttccataacgatacgctgttcatcgatccagccttttgctgctgctgctttgaccatagcgtattcaccgctgacattataaacgcataaagggcggttaaatgtttctttgacacggctgatgatatccataaaagccaaagcgggttttaccataacgatatctgcgccttcctcgatatcaagagccacttcacgcagagcttcgtcactgttgccgggatccatctgatagcctttgcggtcgcctgcagagggagtggaatcggctgcagcgcggaaaggaccataataggctgaagcgtatttagctgaataagccatcagggacacattgttgaaacctgcttcgtctaaggcttcacgcataactttgacataaccgtccatcatattggatggcgcaatgacatcagcgccggcttgagcgtgggaaactgcgattttagctaaaagcggcagcgtttcatcattgttgacagtacagccgttttccagaacgccgcaatggccatgttctgtatattcacacaggcaggcatcggtgacgactaccagttcgggataagtgtttttgatcaggcggcaggcctgctgtacaggttcttctgcatcccaggcgctgctgccgacagcatttttataagaggggataccaaacagtataacggcaggaattccaagttcgctgatttcctgtaaaacttccggtaaacggtctaaggaccaatggtaattgcccggcagcgattcaatttcattttttacaccggtgcccgggacgacgaataacggataaatgaggtctttaacggaaagttcagtctcgcggatcatgctgcgcaggttttctgtagcgcgcaggcggcggggacggtaaataggaaagcccatactgatcactccttataatatctttgaatagcgtctgtcaaacctgcaatagtaaatgtttcagctatgatgtcaggttcaagattattttggcggcaggtttcggcggtaacagggccaatagccgctgctggaatattattgataagttctctttgatcgcctaaggatgccaaaagattagtaacagttgaggaactggtaaaagtaacaagatcaacttctccgttttgcagagcagtcagcaattcttctttgttatccagagcggtaacagtttcataggcagttacaacatcaacgctggctcctaaagcacgcaggctttccggtaatacttcacgggctactttagcgcgtgccagcaggattttatcaccaacttgcacttctgctgacagggtttcggccagttcttcagccttgaaggctgggggcactaaatcggcggagatgccatagttttttaaagctttcgccgtttcactgccgatagcggctattttgatgtcagacagggaacgggaatctaatccggcattatcaaggcgattgaagaaagcggtaacgccgttagcactggtcaggatcagccatttgtaggttttgatgttttcgattgctttatccagcggggtataatcttccgggggtatgattttgattgccggcgcctcgattacacgagcaccagcggcttccagctgtctggtcaaagcactggcctgcgcgcgggctctggttactacgattgttttgccaaagagaggtttgttatcgaaccactgcagctgctcgcgcagtttgacaacattaccgacgataaaaattgccggcggtttcagatttgccgcggcaacgtcggcagcagcagtaccgacagtagtgatcagagtgcgctgttccggtttggtgccccagcgaatgactgctgccggagtatcggcgctgcgcccgttggcgatgagattttttgtaatattagtaagattttcgacacccatcaggaaaactaaagtatcaacagcggtagcaagaccgctccagttaatagttgattcgcctttggtagggtcttcgtggccggtaatgactgcaaaggaagtggctacgtgacgatgggtgacaggaatgcctgcgtattcggcaactgcgatggcagaagttacgccgggaacgaattcaaatggcagtccggcttctaaaagttcaatagcttcttcaccgccgcgtccgaaaacaaaaggatcaccgcctttgaggcgggcaacagtcttaccttcggctgccagctttaccagcagtttattgatatctggctgacgcattgtatggttggcagaagctttaccgacatagaccatttctgcgtcgtctttagcataagctaaaattctcggatctgccaaacggtcgtaaacgacagcgtcggctgtttgcaagcattccatggctttgattgaaagcagaccgggatcaccggggcctgcaccgatcaagtaaacttttccctgttttgtcattaatttctctccttacatgatctcggcgaggattgcacggccgccctgatctaacattttattgccaagttcttttccaagttctgcagcgtttacagcctggcctctgatcgtatcgcgtaaaacagtgcttccgtccagagatgcgatgattgcttcaatagatacagaatctccttcagtgacagcatgtacaccaatagggacctggcagccgccctcaatgagccctaaaaaagcacgttcggcatcagtagcctgtttggtaggctggtcatttaaaaaattaagcatagctcttacttctgtattatcggtgcggcattcgattgccaaagcaccttgtccaactgcaggtaagcagaaattatgggggattatttctctgatccgatcggtatatccgagacgagtcagtcctgccgcagcaaggattatagcatccatttggccttcgtcaagcttccgcagacgcgtatcgacgttgcctcgtaaatctacgattttcagatccgggcgtgctgccaaaagctgggctttgcggcgcagactggaagtacccataactgctccctgcggcagtgtttcgatagaagcatatttattgctgacaaaagcgtcgccggcattagcccgcttggtaaccgctgtcaggcacaggccttccggcagaacagtaggcatatctttcagactgtggacggcaagatcgatctcaccttctagaagagcagtttccagttccttggtaaaaagtcccttgccgccgattttggccagcggcacatcaaggatacggtctcccttggtaatgattttttttaaagttacagtacattctggatattgcctgcgcagaaggtcggcaatatgattgctttgccacagagccagcaggctctgtctagtcccaataatcaaatttgttttcatcacctatatagtcctctcccgaatcgttgagtaaaaataactcgcagatcatatctctgtaacgttcttcatctgccgttccggcagcactgttcatagctgtcattggttcgcgcaggaatttgtgttccaggcgctgagtcatgatatcgatgatacggcgttctttatcagtaagatttggcagtttggcaaatgcccgttttaaaaccttctgccgcagaaaattcattttttcatgcagctgaaccattacaggccgcatcgtcagatagcgcagccgttctttcagtgccgttatttcttcgtcaataattgcttcagccaccttggcttcagaagatcggaaattcttattcatatcgacaacgccttccagatcgtcgatattatacagggtaacgccttctatatctccaaccagaggatcaacgtcacggggaacggcaatatcaactaaaataagcggtttgccgctgcgtttaggaataatatcgcgtacaccctgttctgttatcacatagtgaggcgctcctgtagaagtgataatgatatcagaggttatcgcctgatgcataaattcgttatacgggatcgcagtaccgttaaatttttctgccagttcctgagcgtgagacagattacggttactgacaaagatagttttagcgcctttatcaatcaaatggcgggcggtcagttcactcattctgccggcacccaatactaaaatattggctttagtcagatcgccgacaacgtcgatagccagatctaccgcggcggaagaaacagaaacagaactgtaggcgatctttgtttctgtacgtacacgcttgccgacggcgatagcacgattaaataaggtgttgaacaaagtgtctgtcataccgcagctgcgggacagatgatatgcatttttaatctggctcaggatctggccttccccgatgatgagtgagtcaaggctggaagcgactttaaacagatgacggacgcaattaatgccggtcagattatagaaatagtcgggtttatattgttcacctgccagatggcgcagcaaagtacggataaaatgtaatccggcagcaggatcttccagcaccatataaagttcagtacggttgcaggttgaaagtaaaactgcttcgttgaggttgtcgttattgcgcagccggcgcagcacacgaaccgttctatcctgtgaaaaattgaaacgttcacggatctcaacgggggctgttttgtgattcaagcctaaaacgattagctgcatcagtaatgatctcctttgcttggtcaagcttacctgcatgaagcaggccgatgacggattggtttaaagtctgacgccagaaagcagtacgcttttcaggtgtagtagctattgttttcagttctcgtcgaagctgttgtaagaattcgttgaattcggcaaaatcagagccataatatgccctaaggtcctgtgacagtacccgtgtcaaagcgggcatacctccggtagacagagtaaatgtcaaagccccgttttttacggttgaaggcacactgaagttacctaatgacggttctgtaacaacattacagagacagggtgcagcagcagcgatttttctgttgatatgaaaatcgtcggttgctgcaatcgttacaaaagcatcaatgagatcgttgtctgcataagcgcgcagttccagctgcagcagtccggtctttgctaaagtcaacagctgcgggtcagccgcaggtgcgattacagtcaggttcgcacctgcttcgatcaatggcagcgctttacggacggctactttaccaccgccgataatgacacattttttattttttaagtccagcatggccggataagaaaaagaattctgctgcatgtttacctgcttataaaaatagattttacgtaaggataaatgttgaaaaatacaacaactataatatcataaattaggatttatttccagttaaaagagtgttgcagagcaggaaatcagagctgttgcttgctatattaaaattagaaaaaggatttgctgtttgagcggcgaatacttacagataaacatcagcctatgataggaggaatgacttatgaactgtgctttttgccctcatcacaaatgttataccagcggtcagaactgtactcgtctgactcatgaagaaatcagcgagtattataccgacgaagataaaaaaatgatgcgagcgtcgtctgcgacagagagccgcaattatttgaaaatgacacggttggaagaaagcgtatttttcgctaaagagatgggtgtaaaaaaagtcgggatagccttttgcatcggtttagccaatgaagctcatttttgtgcccagtattttaagaatgaagggctggatgttcaatcagtatgctgcaaagtttgttccgtcgataaagatctgctggaactggaaaaaatcaaacccggacagcgtgaggctatgtgcaatcctaaagtgcaggcccgcctgctgaatgaaggcggtacagaattgaattttatcgtagggctttgcgtaggtcacgatatgctttttaccatggaatccaaagtgccggtttccagtataattactaaggacagggttttagcaaataatcctgctggggcggtttattcacgttactggcgccgtaagctgggaattttggaagaaggcactgtataagaaaatatttttttatgaaagtctgtcgctcatgcggcagacttttttactgtaaagcagcaaacggaagggaaattcccttccgtttgcttgagaaacttatgtaggaggatgataatgttacccaagtagctgcagaaggttattgttttatgattgtaccttctttcatgataattttcatattgttaactgcaacagcgcgtatgttttctaaaggattgccatctaggacaaggatatcagcaaacttatcgacttctaaagtaccggttattttatcgaccttcagcatttcagcacctacttttgttgctgccacgatagtatccatttctgaaatgccggctttttctacgaaagaatacatttcgccgatagcagtggtcccgtaaggtgtaaggctggaacagaagctatcagagccaatggttaaccctatgcctttggattttgctttacgcagattggcgtaaacacggttcagttctttttctgcaacagttgctccggaatactgatcgtgtacctctgggatgtatggtggcgcgtatgttttgaaccattcgttaaggaattggattgttgggcagaagtaaatccctttttcagccatgatatcaagacattcatcatttaaggtctgtccatggataatcagatgaactccggcttttgcagaatcaagggcgccaccgtaaccttcggcgtgagaccagactgggataccgaccatattgcattcgtcaacgacagccttgatttcttcaaaggtataatgctggtctaatttttgatcccagcgccaaatgccgccgccggtagaccatattttgatagcgtcaggattttcacgcagtcttttgcggacagctttacgcagttcccaggggccgtctacacgttcagcccatggatgagattgttcattataccaaataggaagtttatgagaatctccgtggccgcaggtacggcagaagcctaatcctgtaccgacgacacgtggtccctgcataacacctttttctaccatatttcggattgcaaggcctgaataagagatttctccgactgtagtcaaaccattttccaaacattcgtgggcctgttgtacagctactaccgttttttgaacgcgatcttctaaaacccactcggtatcgtcatcggtcaagttgccggaaaagtgcaagtgcgtatcaataagtcctggcatgatagttttgccattaatatcgatctgttcatattcaggagagatttgcttggcaggtccggcataggttatttttttgccttcgaccaagactaatgagtttacaagtggttctctaccggtgccatcaatgagataacctccaactaaagcgatttttttcatgataaatacccccttgattattttttgtgaatatggtttttaattaaagttatttatgaatctgtgtgtcatctatggatatcgaaattgttgtagatccagaggttttatttcggtgcaaagttttgataatcaggcctatagccagccatcccaaaacgatactccattctacggcatttagtgtagcggggcttccgggaactatcatcagaagtacgatcagtgatcctgcaagacaggccagtgagatgccaaattttccgcctggtactttataaggtctgggaagatcaggttctgtaaggcgcattttgtaacaggagaaactgaccatagtacaggcgaaaataaaagccagagctgagacattagtcagtggtactaacatcttttttcctagaaatgggccgataacagttaaaacggctaagagaatattagctgttttgggagttcctgaaacagggtctacttcagcaaaagatctgggcagttggcctttacgtcccatagcaagcataatacggcttgtagcaccataaaaagaattcatgggacccataggcccgattgtggcaatgcagagcattgcgatatacaaaaaaatatttattgttttcaaacaagctaaagcaggaacagaactttttacaaaatcagtccagggtatgatactgccaaaggaatagatgcagaccatataaaaacctccggaggctagcagtgctagactgataacacgcccaaatttgttccagtcgagaccttcagcggcttcttctgcctgttgaggaatagtgtcgaaacctgcgtaaaagaatggtgtcataacaagaaccgagatgataccggcaaacatagttgaagctgaagttgatgaagccgcaccttcaacactggcaaaaattggttggatgttctcagggccgcctttaacaagtgagatacccatagcaagaatcattccacagagcagggctttagtaagaaatgcctgtaggcttgccgctgcggaagcaccacgaaaattttggatgattacataaacagcaaaactcagagcaataacagtgggaagcaggtagacatcagcgcccataattgaatagagtttaattgaacggaggattggaaataaatctccgaacatatctgaaacgagcgttgaaatagcaattgcttcccatggacagaggattgcattgcctaaagccaagaaccagccggtaatataggacatggtatttccataagtacggtctacatattcaacgatgccgccggaaatagggattgctgcagtaagttctccgaatacagctccgataggcagtagaaatacagctccaataataaaggcgatcatagctgctacaggacctccgccaatgatcatccagtcgcctaccatcaaaacccagccggttccgataatagctccgaaaccgattgtaaaaaaattccagagtgacagtgttttttgcatactgcctttttggtttgatgctgacatgtaaaagccctcctttgagtgaagataatgagaaacatgaaacgatgtctaaatattcgaataatttagagaagggtagtaactttgtacagctttactatagcttaaagtaaatcgtgttacgacaaaaatttcataattgatatattcgatgtaatatcaggtacgggttaaattttatagcagcaaaatcggcacttccagtgtcataatcgtagcgattagttcaagatacagatgttataataaaaatataattaccagttaggaacggaggtgagaagatgttttatattgctttgtgcgatgatgaatggcaggctgtagaaatattgaccggttatttatcagagatcaaaagatcgggattacagctggaaagtgtgccttttttgaacggacgggaactggtacaccagtatgaacgggggcgtaaatttgatatcatcatattggacatgctgatgaagccattaaatggtattgaaacagcaaggctgatcaggaaatatgacagcgaagtgccgattttaatcgtaacgggaactgttgaatatgcgatggacggttatcaggtaaatgcctatcgttatattttgaagccagtagataaagcttattttttacaggaagtacggactattttgacatcaatagccaggttacagaataaatatttcagttttaccaatgaaaaaggattgtttaaaataaaaactactgatatttattatttcgaatctaatatgcgcactttatcggtttgccatctggggggaaaaacaacttttacggggaaaatcagtgaagtggaggagtcactgagtgaacagagttttttcaggattcataaaagttatgttgttaatctaaaacatatacgtaatatttttaaagatactgttactttagaaaatggagaggaattgccgcttagcaggcatcgcagcaaagaattgcggcagcagttcctatcctatatgaaggaaaatatttgatatggatattatgctgaaatggatcgcttatgtgattttatctgcggctgagacgtggatcggatatcgtcttttcaatacttatttgactcgtaattcagtaagacagaggtattattggctgggggtgatattttattttactttccagatgttttcttatgtaaatgaaagtcccatgttttcgacggctgcttattattttttctttgctacaattattgctgttgttttcttttctgattctttacagaataagattacgattgccttactgtttgttattatgaattatgcatgtaaaacggctatgacaggtattgccttggcctggggtgaacagactttgccgcgggagctgattaattatcgcattgttatggatccctggtcgcagatgatggcatgtatactgtttgttttgagtttatggggtacgatttgtattcgcgagttgaggctgaataagcaaaatttactttatgctgtaatttcatatctgtttccactgactgtgatgatttcagtaatcattatttcccataaaaatattgggtttggatctgccgcggggatacaggtcttttatatttatacttcagtacttttgttttctgcatcaatcagtcttttctaccttctggaaaaaaatattcttttggatatgtccggagaaaagtcatcggtaatggaagaattgctgtcactgcagcgccgtcattatgaacgattggatatatcacagcgtgaattacagagtctgcggcatgatatcaaaaatcatattagctgtctatatgcgcttttggacagtggtcatgctaaagaagctaaggaatatattaaggaactttatacctgtaataaaggcttgcagggcattatttacagtgggaatatagttattgattccattctcagtaatggtttggctaatttggaaaaccgtggtataaatttaaaatgcagtataattataccgccttcgttaaatatcgctgatgtggatctatgtattctttttggaaatttgattgataatgccgtggaggcatgtgaaagaatcgtagaaccgggcaggaaaaaatttattgttcttaacgtcaatatcaaaaaagattatctgttcattgatatcgctaattcgtttactggtgaagtaaaaaaacagaataatatttacagaacagtgaagattgatgagcgttattgtggtataggcctgtttaatatcagaaagattgttgaaaaatataatggtgaattttcagtcagccattctgataatgtttttagtgtttcggttatgttgtcattactctgggggaaaaaataaggactgccgttttaacggcagtccttattttttttataaagatgcaggctaagatgcaggcttttaactagcagccccaaagcagtccatcctgtcagcagcaggtattcagttttactcagcgaagcagaggtaccgggcagcagcatggcagcaataatgagaaaactgacgcagcatgcagcactgatacccgctttgccgccagggactttgtaggggcggtatagatttgcttcgctgctgcgcattttataacaggccagactgaccatcatacaggagaacatgaaggtcagggcagcaacatttgtcagaggcagcagcatattgcttcccaggaaaggggcgagaacgatacttgtgctgagcagaatatgtgtagatttggcaatagcctgagagtggtcggaggggctgaaggctgcaggcagttgtttttttcgggccatagccagtaaaatcctggaggatgaggcataaaaggagttcataggacccaacgctcccaaaacagttatgcagagcatgagaaagtataaattaaaattgatgtgcttaagacaggcaagagctgccaaaggctgtttgacgaaacttgtccaggggataagactgctgaaagctgctatgcagataatgtaaaaggtagctgcagataaaagtgcaaggctgataattctgccgaatttgtgccagtctaagccctgagcagcttcttctgcctgctgcgggatagtgtcaaacccggtatagaaaaaaggcgttactgtaagcagggcaaaaataccggtccagagagaggtggcctgagtatgtgctgtcgactcattgaccggaagaaaaagcggctgccagtttgcaagactgcctttgtcaaaagcactgataatagccagcagtaatcctgcgagcagcgctttagtcaggaaagactgggctttagctgctgcttttgggccgtgcagattttgtctgatgataaatcctgaaaggcaaagcgctatcagtactgggaaaaggtatacatcggcacctaaaatgctgtagagcctgattgaacgcagccatggaaacatatctccgaacagggttccaaaaagggtggagacagcaatcgtttcccatggacacatgataatattacttagcagcagcagccagcctgtaataaaagatactgttttaccgtaggtgcggtcaacatattctattaccccgccgtcaataggcagagcgcttgtaagctctccgaatacagctccgataggcagtaaaagcagcgcccccagtaaaaatgccagcatggccggaatgggtcctccgctgatgatgatccattcgccgactaaaaaaatccagccggtaccgatgatcgcaccgaacccgattgtaaaaaaattccagagcgtcaatgtctttgatatattcttttgtttgaaagagtcaacggacataaaaaagtccccttacataaattttcaggaataaaaatgataataattttagtttatacttttaaagtatatagtgcggctaacactgcttgtttaatcgtttacaataatgcctgataaaagctttctaaaattacaaattctgccagaagttataatgtgaaaatgtcgcaaattgtctgaaaattaatttacaaatgttctgacaaatgttaaaattacggtaaatacatttgtgaggtgatcggaaatgctgactttgcctttacttagaaaaatgctgaatcgtgctggtacagagctgaaagctaacagtaaatatttatgtgagcttgacagtgtggctggcgacggtgatcacggaatcactattggcagaatggctgatgtgatgaaagaaaaaacagaagatactactattgatacgatgagggtcttgctggatgagctgggcgaagcttttatgggtatcaacggcggcagcgccggaccgctttggggtacggtgtttacagggatggccgaaggaatcgatgatcaggctgaactgactgatttagagctgcggaaaatgtttacgcaggccaaagaagattttatggatatttccaaagcaaagcccggtgataagactatggtcgatgcgctgtatccggctatcgatgccattattgaaacacaaggaagcttaaaagaaatcatggcagctgcggctgcagctgctgacgctggtgcggaacagaccagtactatggttgccagattcggccgcgctaaaaatatgggtgagcgcagtatcggtactaaagatcccggtgctgtatccatagctattttattcaacggtatggcgcaggccttataaaaggcttaattttccgcaggtgcggaaacaaataaaattttggaggttgaaaagcatgaaaaaatttattaacgatcccgaaaatctgaccagtgaattactggaaggtctggctcttgccaataaggatatcatccatcttgaagatggcaacctggttgtaaataataaattgaaagatgctgaccgcgttacgatcgtcactttgggtggtaccggccatgagcctgctatcagcggttttgtcggcgaaggtatggtagatatttccgtggctggtaatgttttcgccgctcctggcccgcaggcctgtatagaagcaatcaaaatggcagataaaggccacggtgttttgtttgttgttttgaatcatgccggcgatatgctgaccggtaatctgacaatgaaacaggttaaaaaactgggattgaacgtaataaaagttgttacgcaggaagatatagccaatgctccgcgcagtaatgctgacgatcgccgcgggttagtcggttgtgtgccgttgtataaaattgccggcgcagcagctgctgcaggtaagtctttggaagaggtggccgctgttgcacagaaatttgctgacaatatggctacgatcgctgttgcagctaaaggcgctactcatccggctacggatatggtcattgctcagatcgaagaaggtaaaatggaaatcggcatggggcagcatggtgaaggcggcggtggcttgactgaaatgaaaactgctgatgaaactgcagctattatgatagatgcccttctgagagatttggatatcaaaaaaggtgaaaaacttttggttatcgttaacggcgttggcgctactacgctgatggaacaactgatcgttttccgtaaatgctgtcattatctggcagaaaagggtattgaagttgttgccaatattgttggtgaagtgctgacagtacaggaaatggccggattccagctctttattgcccgtatggatgatgaactgctcaaatattggaatgcaccctgccgcaccccgtattataaaaactaaagtaatatttttaaggagataaaaatggcagataaagacggtaatattattgctaaagattatggtatcggcatcaagccgcccgcccagcactttcatgtaaaaggtcatgagaatgccggctggggtatgaaggcacgtctgtcacagatttttgcggctgacgggcgcacaatcatgctggcgttcgatcatggttatatcatgggcagtacagctggtctggaaagactggatctggtcattccgccgctgatggatcatgctgattgtctgatggcgactcgtggtgcactgagaacctgtattccagccgataaccgcaaggcgattgctttgcgctgcagtgcagacagctctgttttgaaagacgatatgagtatgggtgtcattggtaccgatattgaggaagctctgcgcatgaacgcttcctgtgtggccgtacagtgctttatcggttctgcttctgaaattgcttccctgcacaatctttcttactatatcaataaaggtgaacgttatggtattcccgtattaggtgtcgtcgccgttggtaaagagatggaacgtaccacgcgttattttgctttagcaacaaggcttttggctgaacagggagcacatatcatcaagacctattactgtgaaaattttgagcagatcactgctgcctgtccggtcccaatcgtcattgccggtggtaaaaaagttccggaaccggaagctttggatatggcttaccgtgctgttaatgaaggcgcagccggtgttgatatggggcgcaatgttttgcaggcagaatgtccgagtgctatgctgcaggcgattcgtatggttgtgcacgaaaatgtcaaacctgaagctgcgtataaggcttatcaaacattgatgaaggacgtgaaatgatgaaacagtttatgcatgtgggagtacccactgataaaatcatggaaggcgctgtttatgccgaagctatcaagacatatatcgtagctcctgaaactaatgaattcaatattgaatacctgcgttttgagaaagatacacctttgccgaaagaactgcagactatggtccatgttgcttataaggtagacgacctggatgaacaggtaaaagcaaatactgttgttgttgagccctggtttgccgatgaaaatacccgccttgcttttattatgaaggacggtattttaatggaattgatggaagtgaaataaattgctgagcggcaaagaacgaactgatcttgtcaacgtggcccggctctattatgaacaggggctgacgcaggatcaggtcgctaagcgaatcggagtttccaggccgttagtgagtaagatgttgacgcgtgcgcgcgaagcagggatcgtacatatcgagatccgcagctcgacagaaggcgatgctgctttgttagaggcactgcaaacaaggtatgccctgcatggaggtatggttctgccggtacaggactcaatggaagaaaatcttaaagcggctgcggattatctgtccggtgagcttttgtatgaacgtaatttaggattgggatgggggtatctgttgggcgaaagcatcagtctgctgacgcagcaatgtaaccgtcggcagcctggtgctgtgctgtcgctgatcggcaaggcacatatccccaataaaggttaccgtgtggacgaactggcagaaacgctggcctcagcttgcggcaggcatgcttatcgtcttgctgtaccggcttttccggacagtttggaagaacggcagcagtttgaaacgactgaagcttatttggaacttgacgctatgtggcagaaactggatgctgctcttgttgagatcagagattttcccagtgttcctgatgaagcaacggcgacacgttttggtgacagtttgaaacgtcagcgggcagtcggcagctttttgtcctattattataatgagcggggcgaatttatcagtggcgaaaatgattttgctgtcaggattccgttaggaactttgcggcattgtcccaaaattatcggtttagcacttggtgctgcgccgaatgccataacaggagctctgaaaacaggtttatttacgcatctgctggtaacggaaagcactgcgcgtaaaattttggagaaatgatataaatgtttttacgcctgtccggcgcttttgtaccggacaggcgtattatttttgaacattttgtgttcgagaatgctgtggggcttaacaaatcttgtttttgagtttatactgtttttgaataattatcacaacagtaaagaaagctggcaggaaaatgcagaaaagcaatacagttttgattttacggggatttgttgttttaggtgttattttgatgcacacaagctggtttttcagcagcggtggcagtgaaaatatggtagcactttcttcaatgctgctggaggtgctgtcattgtttgcagtgccgctgtttatggcgatagcgggttatttgtttacaggacgtaataagcacgcttacatttacagcgctgctttttttaagaagatgctgctgtcggtattgtcgccttatttgttgttttctaccctctatatagtaactgcttttgtttttgacggtcatacatatacgctgggtgaaatagtcgttgatatgctgacgggaagtgctgcggtgcatttgggatttttcagggcgctgatcgggttctatctggtgtatccgtttttaatcaggatttttactaaatgccgtgagtcaggctggctgaaatactattttgctgcggcagctgttttgcagatctcttggaaggtgttgaataatattcagtttgagactgtttggatcagctacctgcttatggggacaatgtttctgcgttatcttgtttatttttcgctgggaatggcggcctactattataaaaaagaatttttagagtggatcggcaggagccggaaatttttggtttggctgctgatcatttttattcctttagttaccgtatgctggttggaaaagtactattggaagacctattatattttggagtttatttgttttccgctcaatatgtttttatatacgattttgatagcgatgctgttttatcattctgaggatattgatagaaaaaataccctgcaaaagcggtttgtgctgtatttgggcaattattcgttcggtatttttcttatccatatcttttttatgtatctgtgtaccgagtatctgctgcctttgctgcagataacgccttcgatgctgactttttatccgctgctgttcgttttgatgctggtattgagtcttgggagtatggaaatactggcgcggcttccttttcacgagctgctgatagggaaggttgaacgccggctgctgctgcgcagaaaaagcggcagaactaatagcttataagtttgatttttctgataattgatgttagaataacgataatctcagtttggaattgccaggctgtaagtagaattttgtagaatggaaggatggtagtaatgaacagaaagaatttacgcagtttagctgcaggtgtagctctgctgctggcagtaggagctttagctggctgcggcggcgaaaagaaggctgacgacagtaaaaaaatggtaacggttggtattgcccagctggtagaacatggtgcattggatgccgccaataaaggctttgtggcaggtatggcgtctaaaggctttaaagaaaatgaaaatgtaaaatatgaccggcagaacgcacaggctgatcagtctaatctgcagaatatcgcacagcgttttgtcagcaataaggtggatctgatttgtgctatcgctacgccgacggctcagacgatggctaatgctacgaaagatatacccattgtagcgacggcggttaccgattatgaggtagcaaagctggctgcttctaataacgagccgaaaggcaatgttacgggaaccagtgatatgaatccgattgaccagcagttggagctgcttttgaagatagcgccgcagacaaaaaatattgggaccgtgtacagttccagcgaagtcaattcacagctgcaggtcgatgttttgaaaaagctggcaggtgataaaggcatcaatgttatcgaagctacggtttctacagttaatgatatccagcaggctgcgcatagtctggttggtaaagtcgatgcggtttatgttccgaccgacaatgtgatggcttcgtcaatgccgactttggtagcagtaacagatgaagcccggctgcctgttatttgcggcgaaagtgatccggtacgggctggaggtctggctactttaggtattgattattataaacttggtgaacagaccggcgtgatggctgctgagatcctgagcggtaagggcaaacctcagacaatgcctgtccagatgcagaaagagtttaaggtcgtagtgaacgagactactgccaaacgcaatgggattacgattccgcaggatattttggctaaggctgagatcgtaaaataaaatacaaaacagggctggtttgttacgaaacagccctgtttttattgttttgtttgtattttgtgataataaatgatagaattattctatccttatatgtgttcgtcaaggatcaaaagtgatactgtagaatggaaggatggttattatgaacaaaaaaatgcgtgctttagcagcaggcattgccctgactttgtctttaggacttttagcgggctgcggcggcgaaaaaaaggctgccgataacagtaagaaagtagtaaatgtaggtattgtccaactagttgaacatgatgctttggatgctgccaataaaggctttatagcgggaatggcagctaaaggctttaaagagaatgaaaatgtaaaatatgatcggcagaatgcgcaggcagatcagtctaatctgcagaatatcgcacagcgttttgtcagcaataaagtagacctgatctgcgctatcgctactccagcggcccagacgatggccaatgctaccaaggatattcctatcgtagcaacagcggttacagattatgaggcagcaaagctggttgcttccaacagtgaacctaaaggtaatgttacagggaccagcgatatgaatccgataaaagagcagctggaactgctgcttaagttagtgcctggtgctaaaactattggtacgatctattgttccagtgaagtcaattcacagctgcaggcggagctgctgaaaaaatatgcggcagagaagggcgtgcaggtagaggaagcgactgtatctaatgtcaatgacatccagcaggctgctcaaagtctggtcggcaaagtagatgctgtttacgtgccgacagataatgtgctggcttcggcaatgccgacactggcccaggtaactgagccggctaaactggccgtagtttgcggcgagggcgggatggtcatggccggaggcgtagctactctggcgatcgattattatcagttgggcgaacaaacaggtgaaatggccggcgatattctgagcggcaagactaaaccccagacaatgcctatccagctgcagaaatcttttaaggtcattatcaacaaggaaaatgctgaaaaaatcggtatcaagattcccgaagatctgcttaaggcagcagaaagctctaaataaacaagcgcgggtttctccttgtttcagaggagagacccgtttttacggatatatcacaggaggaagatagatgatagacttattgatgccaacgatagcacagggacttttatgggcgatcatggcactgggcgtatatataacttacagagttttggatattgctgatttgacggtggaaggaagttttccgctgggagctgctgtagcagcttctttactagctggcggatattctccgtggctggcttttggtgcggcgatgctggctggtatgctggctggcgttgcgaccggacttttacatactaagctcaaaataccggctctgctggccggcattttgacgatgatcgctttatattctgtcaatctgcgtgtaatgggtaaggctaacttgtcgctgctgcgtgtagatacagtattttccattatgcgtgatattggtggtttcagtaatgctcaggctgtattgtgtgtgggtatcgtcagctcacttttgatcggaggtttgatttattggttttttggtacggaaataggagcggctattcgtgctacaggctttaacccgcagatgatcagggcgcagggcgtggatactaattttacgatcattctcgggctgctgataagtaatgccctggtagctttgagcggtgctttagtagcacagaataatggttttgccgacgtcggcatgggtacaggcacgatcgttatcggtctggcttcagtcattatcggtgaggtactgtttggtacccgcagctttaaaaactgcatcatcagcgttgtgctgggctctatcgtttatcgtctggttattgccgctgtactgcagatgggaatgccgccaaacgatctgaaactgtttacagctattctggtagcgtttgcgttgtcgctgccgcttattaaaagtaagcttggtctgcgaaaggcggtgaaataaatgctgcgtgttgaaaatatctgtaagacattttttgcaggaacaatcaatgagaaaaaagctctgcagggtttatcgctgcatttgaaaccgggtgattttgtaacggtcatcggcggtaatggcgccggtaagtcgactttgatgaattctattgccggagtttttccaatcgacagtggaaagatcattattgacggtaatgatattacaaaaacgccggaacataaacgggccaaatatattgggcgtgtcttccaggatccgatgatgggtactgctgcggggatgatgatcgaagaaaatcttgctattgccgccagacggggtaaaacgcctggattaaaatggggcttggacagcgataatcagacttggttcagcgaattgctgcaggagctggatctgggtctggaaaacagaatgactgctaaagtcgggctgctttccggcggccagaggcaggcgttaacgctgctgatggcaacgctgatcaaaccaaagctgctgttgttagatgaacatacggcagccctggatccgaaaacagctgctaaagttctggctttgacggaacggatcgttaacagggatcatttgacgacgctgatgattactcataatatgcgtgacgctttgcgctgcggcaacaggctgatcatgctgcataacggacgggtaattattgatgtcgaaggtgaagaaaagtcgcgtttgacgattcctgatcttttgaagatgtttgagcaggccagcggtgatatgctggacagtgacagactgctgctcagttaagtaaagtaaaataaaaggcgggttcttaatgaacccgccttttattttactttacttatttttccaaaccataggtccaggagctgactgctcctaagtcataaatttttgcatagcctaatgaaatcagggtctctgcagcgattgcactgcgtctgccgctgcggcagtataccactatttcagtatttttatcctgcggcaactgatcggattttactttgatttcatcaaaaggaatcaaaagactgccgggaatatgcccggctgcatattcgtcaggggtgcgaacatcaataacagtaattttatcacctttatcaagacgttctttgacctgagacgcagttatttgctgatagcttcctgatgaagcagtatcgctgctggggctcatagcctgtaaaggacaggcgccgttgttgtagaaccaaagcccgactgctgcaatgatgcaaagtgcgaagatactccatttactcatgctgatgctccttttcttcggcggcaactactgctaattgatcttcagcaacagtttgctggcaatggggacaatagtaatgtgtttctacagtatgattacagcttttatggatcaggcgtttatagcaggtagtaagatgtttttcaccccaaagcaccaggctgttaaaaacgatattcaaatcctcgccagcaggtgtaagtgtataacggtagcggggcggatgcttctggtataaatcgctgctgatcagtccgtcggcttcaagcgctttcaggcggctggaaagcagattgctggcaatctggccttccaggctgttgtaaatctctttataggtctggtgtccgctcataataccatgcagaatgagcagagaccatttgtcgccgataatattgagtgcttgagcgatattacattgaaagggatattgctgactcataaaaatactcctttaatctaaagttgaaaacaaatcatttaaaaattcgctcatagaaggatgtgtataaatattatcccgcagaacggtataatccaggtcggccttcattgccagttggacgatattgatgatttccgaggcttcgctgcagaaaaatgccgcaccgaggattttgttgctttcagcatcaacaatagccttcaggtaaccggaagtgctgccaaacaggcgagccctgggactggctgcttctgcgattttggcaactttgatcttatggccggacagcagtgcttctgcttcactgaggccgacgcgtgcaaaggtagggtctagaaaaacggaataggcgacaggcggccggttagctgttgtacggtcgttttgaccgaaaagctgctctttaataatgcggaagtcatccagggagatgtaagtgaactgcagtccgcctttaacgtcaccaagcgcccagatatgagggacggttgtctgcagtaattcattgacgatgatttcgccgcgttcatttacggcaacgccggcggcttcaagattaaggcttgctgtgcttgctttgcgtcctgtggctaccaatacagcgtcagctggaattttaacggacataccgctgctgcgctcaagatagctgacagtagtcaattcgttttcgtcggttatttcatcgacctgtgcattaaagataaagcgaacgcccagctcttccaaacgtgtttggataacattggcgatatcgcggtcttcacgcgggatgaaggtattgccgtattccagaacagtgaccatggagccataattagcatacatggcggcaaattccagaccgatatagccaccgccgatgataaacagtctttgtggcagggtgctgagttccattaaagtagtactggtataaacacgcttgctcagctgtaagcctgtgattggaggaatgactggttcagaaccggtatttataaaaattttttcgccgtataaagatatttttccgtccggcaactggacttctaccgtatggtcagtctgaaaacgggcggcaccggtataaatatctgcagctgcagcgacattatcatagtttttctgacgcaaaagcgcagttaaagtatttttttcacgaatggcagcagcataaaaattatttttttcagaataatctgcctgctgattttttttagcgtcagctgcagtatggatgagtttttttgtaggaatacagccgatgtttatgcaggtaccgccgtacatcagcggagatttttcaataacagctgttttgattccttttttgccgagggcagctgccagtgtttttccacctttgccaaagccgatgatcaatgcgtcatattttttcataagttaaacacgctcctttactgttcttattttagtttaacactaaaagaataaaaaaaacaagtaactttaaaaaataaagtctaaataaagcgggaaaaattttacctcaacagtaaaatactatataataaacatatgattatgaattataggagcttggcatgactgatcaaaaacaatgtgcaaaacttaaaaatatcaagtgttttttgtttgatatggatggtacgattaatttaggcaatacattaatcccggggatggatgtattttttcagaaattacgtgccgcagaacgtgatttttatctggtaactaataattcctccaaaggacacgagcattatgtggaaaaaatggggcggatggggatacaggtaactcgtgataatgttttgatatcctcggatgcttttgtttattatatgcagcagcttcggccggcggccagattatttgttttagggacggaacagctgaagaaaactattcgtgaggcaggctttaccataacgacgacactggaagaaggtactgattttgttgtggttgggtttgatatgtctttgaattacgaaacactgactattgcctgcagacttatcgacaggggcgtgccttatgtagcaacgcacccggatgtacgctgcccgatcgaaggcggagaatttattcccgattgcggcgccatgatcgagctgattaaaactgctacagggaaggccccgcagcagattttaggcaagccctatcactatatgatcgatgttattacagccaggacaggctataaacgggaagaaattgccatggttggcgaccgtttatcgacagatattgcttttgggctcaataacggtgttttatcaatactggttctgaccggcgaggcaactttagctgacgtggagcatggcagcatcaagcctgacattattttggatcacgcttcagagctggctgactatttttaaagtgagagatttttatggcgatacaatatgagcggattaagaaaactatagctgctttggctgcttacggaacattaccgcagggtgggacgacgcgtctttcctatacggcagagtatttggcggcgcaggcttttttgcagcgggaaatgctggagtcgggcatgctggcagaggtagacccgattgggaatctgattgggacttatgtgggacgagagcctgaactgactgccgtcatgagcggttcacacctcgataccgtaccggcaggcggaaattttgacggagctttgggtatcgtcgcagcactggaatgtgtgcgcagctggcaggaagagggctatcgcccgaaacgaacagtacaggtaattgcgacgatcgaagaagagtgcacagcttttggtatggcttgctttggcgtacgtgtacgcggcggcgaatttaaaaaacagcagccggagtctatcgtgcatttgacaggcggctccctggccgaatgtctgcaggcagccggactgccgcatagcgcgttgcaggatgccgcagtagggtttcaggatctggcggcttttgtagaactgcatatcgaacagggcgctgatttggaggaacgtggcctgacctgcggggcggtgactgctattgtaggctacgatagattattcctgactttacatggagaagctaaccatgccgggaccactagcatgaggcgccgcagagatgctttggctgcggcagcggaagtcattttaggagtcaaggagcttgctgaagctgatgacaggttcgtagctaccgtgggtcagttgaatgtcgctcccaatgctgtgaacatcgtgcctggaaaagtgcagcttgctattgaaacaagggctgctgacgatagggttttagcagaggttcgtgcaaagatcatgagtttactagagcggacggcgagtaaaagcggtgtcgtgattacaaaggagaatgattttcatgtggctgctgtaccgttgtcagagtcagtcaggaaagttattgagcagtctgcggctgagtgcggtgtcagttttcaggccatgcccagctgggcaggacatgatgcacagatttttgcagcaagcggcgtacctacaggaatgatttttgtaccaagtataaatggtgtcagccattccaaagaagagagcagtgattttcagtctgttactcaggcagtaaaagtactggaaaaaactttaaagactttagctgaagtctgaaatatatataactgaacggttaggaaagtgaggcagcaatgagtaatctgcgggacgccattgtacgtatggctttacggcgcccttatttgtatttgctggttactttggttatcagtatcgtgctgatggaagtgctggtagaaatagctgagcatacttttattaagccggcattgcaacagctggagctgcagtttattgcttatgtacagcagtttgttacaccgccgctgacagcagaggtaatgctcgttacggcaagcgggtccagtactttttatcttctggcaagtgcgcttgtctgctgctggtatttatacagcaggcaaaaagacaggctgtatctttatctagtctgtttatgcggtggtggtattttaaatcaggtactgaaacgcatttttgaacgtgtaaggccagatattttccctgtgattgctgaaagtggttacagttttcccagcggtcacgctatgggagcgatttgtttttatggcatcctggcatattttgcaggattaggcttgcgaagtaaaccgctgcgctggggattgatggcggcagccggcatttatatcctgcttatcggcctgagccgtgtttatctgggggtgcattatccgacggatattttagccggttatgcagctggagcgacctggttatttttttgtattacgctgcatcgtatttttagaaagcgttattaaaggcgcagctgctgtcgttataaaaatatgttttggctttgtttacgcaaaatagcctgtgcatttaaatgcacaggctatttttatataagaaaacagatagttaattattttgcagagtccagttttccgcagctaaaacttttgagtcagctgcaggagctatttctttgactgcgtattctttgttcaatattgcctcaaatttatcctcaggcagcggtctgtagaaaaaatacccctggatcatattgcagttgacagatttaaggaaggctacctgttcggcagtttcaataccttcggcgacagttcggatgcttaatttattgacgagatcgataatacctttaataacgatgttgtctttttctttgtggatactttctctgaaaaagctttgatcgattttgagcacatcaataggaatatttttcaaaaggcttaaagaagagaacccggtaccgaaatcatcaatagaaatcaaaaaacctttacttttcagttcactgactgttttttcgagaaaggtcacattatcaaaggcgattgattctgtaatttctatttctaaaaggtgatcagggatacggaatttgtttttgatatcttcatatgtttttacaaaatctgaattgtaaaattgcagtcgggaaacattgacggagattgtatttacaggaaggccagcatcgaggcgccgtctgataaaagcgcatacctttttaaatacatactggtcaagtgatgagataagatatttcttttcaaagatgggaatgaatttatcaggcggaatgatcagtccttcatctgtctgccagcgtaccagcgcttcggcctgtgttgccagacctgtctgcaagtcgaccttgggctgaaagtaaacgaggaattcttcattttccagtgatttcagcatacggttttcgatggatttttcataacgcagctgtttacggatactttcatcataaacagcatattttctgttaagtcctgtttttacagttttacgcgcataatttgcacggtctaaaataccttctatctgcagatcctctgccaggtcctccagatagcagataccgcattggacagaaactgcctgaccaccgtacatatcatgcatgaattctgttattttgatatcgacctgctgctgccggaccataatgtcgtttttctcattatagtaacgcagaataacgaaattatcggcggaaacacgccccagcacttctcctgtacgcagttcgttactaatggtagcggcataattgataaggatctcatcgccgtatttatacccgaaaacgtcgttgatatatttaaaatcagcaaaatcaacatagctcagcgaatattttttagtcgtttgtgtgagtagtttctgagcttttttcttaaatgtttcaaaattataagcaccggtaagcgggtcttttgtcgttatatcataaagtgttttgttgctgctttccagtgaatataatttacgcaggtacaccataaataaggcgatccacatgataatgatgcctgccagcattaaagcagaaagaagtgtcagctggtgacttttggaagtagtatagttatcagcagcgaaaacagtattattggcgatctcaaaatgtacttcgctggactgcagcagcagtggtgaattggcagggttttggcgcacggcgtaaatattgctttttacccgatgccatagtgtattgagggcggaaaactgctgctgataatcaacattgggaattttttccaaaccgtatttaccgtcggtgtttttaaggtcataaatgatatcgtcgatataagctataagctcatcgtgaggctgctgctgcagctcaagcttgacgagccgctgagtagcgcctctggcgatgcccaggtaattgatgagtgttccgtaggattgtactttgctgattgagtaaacagtaaagctgcctacgaatatcgataacaaaaataaaacgataacgcttattttgcctaaatttttcatgggggaatcaactccgaaaaagatttaaaaaattagaataatttgaattataaatactatttatataatcttataatatttgaatttaaaatacaagataataaattttaattataaaaataattttctgctgaatttatcaatttatcgtaaaatattgaagcgataactacgattttgatagctgacgaattttgttatttttcataaatatatgaaaaatataagttagccttgacaaacttagaaaaatcacttatagtgttcttatgtaggaacaatgaaggtgaaatatggatattattgaaaaacttacttattttaatctaaccagacaggaagctacgctgtatttgaccctgctggcagaaggacggctgaccggctatgaagcgacaaagctgacaggtatttccagatctaatacttatacggcgctggcaggtctggtagaaaaaggcgctgcttatgtgcttgaggataaggctacaagatatacgccggtgcccttggatgagttttgcgaaaacagggtaagaagactgcaggaactgaaagaagaattactgcgtgagcttccaagtacgtcacaaagcgttgatggttatattacgatcaagggagcgaccgaaatcatcaataagctcaaaaatacgattgttaaggctaaagcccgtatttatgtttcggcaacagattcggctatagaagctttacgtggtgaattgactgaggcggtaggtcggggattaaaggtggtcattattaccggcaggccttttgttttggagggtgcgattatttattatgcgcataaacccaatagccagatccgtctgatcgccgattcacaggaggttttgacaggagatctggctgatggcagtaattcaacctgtttatattccagcaaacagaatctggtagatttatttaaggatgctttgaaaaatgaaataaaattgatagaattgcttcctgaagcagagaaaggtgagaaagaatgagtaaaaaaccctttgtaagtaaagaaaagttagatgagatcgccgcacagtatgcaacgccgttttatttatatgatgaaacggctatccgtgaaactgcgcgtcgtgtgaataaggcgtttgcctggaatcagggctttaaagaatattttgccgttaaagctactcctaacccggcaatattgaaaatattgcatgaggaaggctgcggtgcggattgttcttcgtatacggaactgcagatggccgatgccgttggttttaaaggcgatgaaattatgttttcgtccaatgcaacgccggcagaagattttcagctggcaaggcaattgaatgtcactatcaatctggatgatatcactcatatcgactttctggaaaaagttgctgatatcccggatacggtcagctgccgttacaatccgggcgggcattttgccattgccaacaatattatggataatcccggtgacgccaaatatggtatgaccagagagcagatgacagaagcttataaaattcttttaagcaagggtgttaaacattttggaatgcacgcttttctggccagcaatactgtgactaatgattattatccggaactggcacggatattgttccaggtcgcagtggaattgaaggaagagacaggagcgcatattgagttcatcaatctgtccggcggtgtcggtattccttatcgtcccgatcaggagggcaatgatattatggttatcggcgaaggcgtacgtcaggcttttgaggatatcctggtgcctgcaggaatgggagacgtaaaaatttttacagagatgggccgttatatgctggctccctatggggcacttgttgctaaagccatccacgttaaacatacctataaagagtatatcggactggatgcctgcgctgctaatctgatgcgtccagccatgtacgggtcctatcatcacattaccgtaatgggtaaggaggatgcgccctgcgatcataaatatgatattaccggcggtttgtgcgagaataacgacaaatttgctatcgacaggatgctgccggaaatcaatatcggtgatctgctctttattcatgatgcgggagcacatggttttgccatgggctacaattataatggtaaactgcgcagtgcggaagtgctgctgaaggaggacggcagtacggaattgattcgccgtgcggagactccggcagattactttgctacttttgattttacaggattatttaaaaatatataggctgaatgaggggaaacagggctgatatttaatatcggccctgtttcattatttatggtaagataatagaaaatacttttttaaaggagtgaaacaatgactattttagagcatgagatcatgatgacagagcagctgcggcgcgtacctgctgatgagctgcaggcacgcctgaataaattcagagccgttatggacagagaatttcccggctgggaaatagccatcgtcaaccataaagtcaatatgtattattttgccggtacaatgcaggacggtgtactggtaatcaggccgcaggacgagattttatgggtcaggcgcagttatgaacgtgcctgcaatgaatcgttgctgcaggatatccgtccgatgaaaagttttcgtactttggctgagttttatcagccgctgcctgctaaggtatacttggaaaataaaacagcgacgctggaatggcagcagctgttgtataaatatttgccttttgcctctgaggcagggatggacagtgtgataagtgagctgcgactgataaaaagcccttatgaactggcactgatgagaaaatcaggttctattcatcgcaatgttttagatgaactggcgccgcggtttattgttcaaggtgtgagcgaggcagaactggcagtcaacctgtatgcagaaatgctgcgtcgaggttcgcacggggtagcgcgttttaatttgcctttaggtgaggatgttgtgggtctggcttcttttgggaaaagcggtctggtgaaaacagcttttgacggccccggcggtacaggcggcacttgtgtcgctgtacagtcgatcggctctgcttttcgtaagctgcaggctgggcgtttagtatatctggatataccctgcggtgtggatggttatcatactgataaaacagtggtgtattattatggagatttagatcaggatcctttcagtgataaaatcagggctgcttatgagcactgtgtttttctggaagaactgacagcatcgctgctgcagccgggcattgtgatcgaaaatatctaccggcaggtaatggaacagtttgatccacagtatgaaaacgggtttatgaacggcggcaaatttttaggacacagtatcgggttggtgatggacgaatctcctgcgctggcaaacggtttcaaagggaagctggaggcgggtatggtttttgctgtcgagcctaagatagctttaccgggaatcggtatggtcggtacagagaatacgtatctggtaacggcaggcggtgcgaaatcactgacagggaaacctcagccgctacgctgtattttataagtattgctattggcaggaaaaagcggaagaagagcgaataagataaagatattattgaaaacaggagcagaaaaatggaaaataaaattttagaacagatcaaaaaatcagaaactgccatgctggatactttggcgcagatcgttaatatcgattcaggctatgatgctttggaggggattgatgaggttgctcatatcataggcgactttttaacgccgtatgggtttgaggtgcagtatatcgaaacaccgaatgcgcctacacatgtacttgctaaacgtccgcgtccgggcaagaaaaaagttatgctgatgggacatatggatacggtttttcctaaggggacggcggctgccagaccgttcaggatcgaagatggcaaggcttatggtcccggtgttatggatatgaaggcagggatagcgatttcactttatacagttaaggcattgttggataatggctgggatgatactgacctgacgcttttcttctgcggagatgaagaaccggcgcacctattgacagatgctgtagaatggtttaaaaaagaaggtctgggcaaagatgctgttttcaatatggaaccaggacgcgcagacggcagtgtagttatcgggcgtaaaggcgttattcgcccggtgctgactgtaaaaggtaccgctgcccatgccggaaacgaacctgaaaaaggcgccagcgctgttttagaactttgccataaaactattgctttacatgcgttaactgatttagaagtcggaactacctataacgtaggcgtttttaatggcgggagcctggcaaatattgtcgccgatcgcgcagaggcacgtgtcgatatcagatttaaaacagctgaagaagctgaaaaagcaataaaaagtgtggaagcaatagcggcaaaaacttatgtgaccaatacaacaactactgtaacagaaaacaggatcgagtttatgccgctggaaactactgacggcgtacaaaagctgtatgatcatttgtctaaacaggctgaaaagctggggctgccagtcccgggagctttatatgtcggcggcagtgctgattctgcctggacggccatggtcggtgcgccgactttatgcgggatgggtccgcaggctgtaggtgctcatagtaataatgagtatttattcgtgccgtcgatgactgaaagagcgcagctcctggcgatgtgtatcatgcatctggatgaaatgcagtaataagcggttaagcataaaaaaacagtatgggattaaatctcatactgttttttattttggaattcatttataaattttctgaaaatatgattttttatgagcaaaaagcaggaaaaaaagcatagtaagcgaataatataagaattatacttgtatttatgcagaggagagttttgatgaaaacgaaaattttagatcagatcagaggatcagagcaggggatgctgcaattactggaagaattggtgaatattgattcaggagcagatgctttggccggtataaatgcggtggcacagagaataggagcgttcttagaagtgctgggatttactgtagaatatctggaaactgatggtgctcctgtacagctgcttgctaggaaagcgcagcccggtaaaaagcaggtactgttttcagggcatatggatacggtgttcaatcaaggtacagcggcggttcgcccattcaaggttgaaaacggacgggcttacggcccaggcgtactggatatgaaaggcgggctggttatggctttatatgtaatcagggccttgctggagaatggctggcaggagacggatatgaccgttttactgtgcggtgatgaagaaatgtcacatccttttactgatgcggtggcacagttcaaaaaagcgggcgcagggaaggatgctgtttttaatctggaatttggacgcgttgacggcagcgtcgttacgggccggaagggaactaccaggccaacgctggtagtagaggggatcgcttcacatgcggggaatgaacctgaaaaaggcgccagtgcgattttggaactggcacagaaaacagtagctatccatgctctcaataattttgctgttgggactacatataatgttggtgttgtcagcggcggtactatggctaatattgttgctgataaggccgttggcgaggttgatgtgcgctttaaaactattgtcgaagcagaaaagtctattgccgatgtgcagcggattgtagaaacgaattatgttcctcatactaagactacggtaactggcaatgtgattaaatttatgccatttgaaactacacccggagtgcagcggctgtacgaacactatgcaagtcaggctgaaaagctcgggttggcaaaaccgggtcagcaatatgttggcggggcttctgacgcggcctggccggccatgacaggtgcacccactctgtgcggtgtaggaccctgcggcgccggggctcacagcgacagtgagtatatagaggtagctacattaactgaaagagcgctgcttttggccagctgtattatggaactggatgaattataagcaaaaagacgagtcctaacggactcgtcttttttatgcaggtttaatttttaccaaaaaatatttccaggtcagtatctacatcagtgattccggcaataccaaagttttcgatcaagacattgacaacatttggcgacaggaaggctggcagagtagggccgagatgaatatttttaacgcccagggaaagcagtgccagaagaacgataacggccttttgttcataccaggcgatattgtaaacaataggcagctggttgatatcatccaagccaaaaacttctttcagcttgagtgcgatcagcgccagcgaataggagtcgttgcattgacctgcgtctaaaacacgggggatgccgccgatatcgccgagcggcagcttattatatttatatttggcacagccggcagtcaggataacagtatcctgtggcagagctttcgcgaaatctgtatagtaattacgtgccgggctgcgtccgtcacagcctgccataacaacaaattttttgatggctccgcttttgactgcgtcaacgactttatctgccagagcgaggacctggtgatgtgcaaaccctcctacaagttcgccgctttccagctgtgtgggaggagggcactttttagcgtgttcaatgatagcagagaaatcttttgtttccccgatttctccatcaatatgtttacagccggaaaaacctaccgagcctgtagtgtagatacgatctttgtagctctctttgggaggcactagacaattggtagtcagaaggatcggaccattgaaggcttcgaattcttctttttgtttccaccaggcgttgccgtagttgcctgcaaaatgaggatatttcttgaaagccggataataatgtgccggcagcatttcagaatgggtataaacgtcgacgcctgtattagcagtctgttccagcagcatttctaaatcacgcaggtcgtgtccggaaataagaatcgcgggattgtttctgacaccaagctcaacttttgtgatctcagggttgccataggtcgaagtgttggcagtatcaagcagtgccataactttgacgccgaagctgcctgtttccaggacaagggatgtcaggtcatcggtactcagactgtcatctaaggtttttgctaaagctttctgcaaaaaggcatcgatagctgtatcggcgtaacccagaacgttagcgtgtttgttgtaagcagccataccctttaagccgtagagggtcagctcacgcagactgcgtaagtcttcattcccggtgtccagtactcccaccttgtcagcttttaaggtcctttcttctgcggtacgatattgccaagaagcggcatcgctcagtcctgtatcgtcatggagctgttcaaacagttcgtcacggctggatagagtttcattgattctgtcgataaaacggtcatcgtcaaaattagcgttagtgatggtcataaacaggttagtagtgatcagccggtcgatggctgctgggatttctttgccttcagagcgcaggcgggttgttatttcggaaagtcccttggtcacataaatcagcaggtcctgcagattagcggtttcaggttttttaccgcagacacctccaaacatacagcctttattgccggctgtttcctgacattgaaaacaaaacattttcggttccataatatcactccttataattatggagatttccttctccgttattgtggttgctgccataacggcagagcagacaaatacttctttcatgtttatgatattataattacagtttaaagtaagttgtatttacaacggaaaagagatttctttattgcgaaaatagttgtttctaaataaaaaactccattccagtataactggaatggagttttaatttcagtataaactgacgactgctttacatggtcaaaattttcatgatgaacatggcgataccagcattcaggaaagaaatgctgagcaggatcggataatgtctggaaggaacgccggcagtgcccagcaaacggcccagatattggatcttggaacccaagaggtagatagcggggataacgatggtaatcgagcgttcatcgatgccgccgtcgttataaagcgccatgcagacaccaacagcgccgcccatggacatgagcgcactgaacagtaccatgattgcttcgccgggaagaccccagatggccataacaggagcgaagaatttacctgccagagtcaggagtccggtaacgtttaagattttgatgcagacataagccatcaaaacgttagggataatattatcaatagcgatgttccagcctttgcgggcaccgcgaacgaagatatccattaaggaaggttttgctaattttgcgttaagttccgcctctgccgcagctgcagcgtcttcgggagcgtggttgattttttcttcactcatgcttatgcggcctccttgcagaatatttttacataggcgcgcatcatattagcgccgaaaattttcataacaaacagtactgccagaggtatggaaataggtactgtcaagaatccaaacagtgcggaaccggaagaaagataattagtgatcaggccgcctgctgtaaactggaaagcactgaaaatcaaaagttcattatcagtgatctgtttttccaaatgtaattgtctggtcatacctgcgccggcgtcagtgctttgcagtgaagaaacgagcgcgataccgcagatacccggaataccaaggatcggacgcagaatcggagtcatcagcttttgagctgctttaagaccgccgtaatgttcaactacttcaatgaggcccattgccagcataacgccgggagccaaaccgaaagcaaacaggaagccgtcgcgtgcaccgctgccgccttgacctgagaatgttgctttagcgcttttcattgtaccgaatttaccgtttaatgtgtcaaagtcgaaaatattcagaccatgaccggcatttgcaaacagaccggagaaaattgcaatggcgataaccaaaacaatatatccggagagcggaaccttatttaaggtttccttaactttgtccatgtgggaacccctcctcaaattatagataagtgcaagtttgccatcctgataagaaacagaatgtgctttacattatatctaaaaaacaactatttgacaagggaaaactgataagttatcagtaaaatttcgcaatataaaagaataagattactcaccctcggccattttacgaagatctttggctaatgtatcgtcggtgaggacataaaggaagtcgcctgcccgcaatcttgtgtcacctataggtatcagttcgctttcgccgcgcttgacgtccacgagcagtgtatgctcaggccagttgatttctttgatcagacgtccgtcgataggactgccgctgcagactgccagttcaatgacgttccgctgtctttcacagtgactgccgtcatttttattggctgactgcagactgcgtgccagcagttcttcatagatcggtttgctgcggcacagctcggcggcaataaaggccacgattgaggcaatggacaaaaccagcatatgctggaaggagccggtcatttccataataaggatgataccggtgatcggagcccgtaccgaggcggaaaagaaagccgccatagagatgacgatgatattggagtaaaagaaagggtcaagaagccctaaagcgatcatgatattgctgatgacgcttcctgtgagagctccgatgacaagcataggcagaaagaagccgccggggacgccgctgccgtagctgagcattgtaaagatgaatttacctgccagcagcaacagtaaagcctgcagagtgtaaggtgttttggcaatattgttgatcaattcgttgccgccgcccagcacctgcggataaacaaagcctaaaataccggcgcagaataatgcgaagactattttgctgaacggagtagggaaaagtttgtagaaacggggaatatttaaaagtccggcgttaaaaactacgcctgccaaacctacgactaggcttaaaagggccacatagccgtaatattccagcggcaggaaaggcagaccgaaaaaatcaaaaatagtgtcgttaccaaagaagaaacgtgaaataaccgttgcagtcattgcggcagccatggctggcagcaggacgacgacggaaaaattgcggtgcagttcttctaaagcaaaaataacgcccgctaacggagcgttgaaggctgccgccaagccggcactggcaccgcttgtaagcaggtaacgttcttcgagccgggtacgtttcagcaggcggctgagtccctgggcggttacggcgccaagctggatcgaaggaccttcccgccccagggaaagaccggctccgatgccgatgatacctgcgagcagtttgacccagaggattcgcagccagcgcattttaatgaagcctaaaatagcgcctttgacctgagggataccgctgccggcagccagaggttcatattttgtcagtctgtctaaagtgaaggctattacagctaaagcgatgaaccaaaaagcggtccaataccagtctgtgtttttaagaaaggtgtaaatatgttcacggttagtttctaccagatgcagggaccagcggaaaaagctgatgatcagccctgaaaggataccgattatgataccttcaataaacagcttcaaacggaagctgcgccagttattgagcgcacggtaggtatttatgacttgatcttttgctagcattttcaggactccttataatcaccgcggccttcggctatttcatagccgatagaatgcagccgtgcggcgaggtcattcttggcttcggcggcttctgctccgctacagagtttattatcataaagaagataattttggcggacatctgccggggaaagattgggcattacaacattggcacctgctaaaataccaagctcacgtccgttgggaacgatggtgccgagagccgttgtcgcaggcagtaataccttgggaaacatcaggcgcaggacggacagcagtgttaaggtctgttccagcgttcctgcgggataatttttaaagggtgtagcatggtggggaatgaagggaccgataccaatcatctgcggctgcagttcacggataaaggccaggtcttcgagcagattagccattgtttgccagggcgagcctaccataaagccagtgccgacctgataacccagttctttgagatcgcgcaggcagcgtttgcggttactcagtttgagttctgccgggtgcagtcgtgcataatgttcgctatctgctgtttcgtggcgcagcagataacggtctgcgcctgcttttttccaaagctgataggcttcacgtctgcgttcgccgatggaaagtgtaacggcacagtcaggataagcctgttttatggcgctgatgatagctgccagatctgtgtcgctgtagataagatcttcgccaccctgcagaacaaaggtcctaaagcccaaggcgtaaccctgctcacagcaggaaaggatttgttcttcggtcaggcggtaacgaacagcttctgtgttgctgcgtcgtattccgcagtaataacagtcatttctgcagtaattggtgaattcgatcagcccgcgaatatagattttattgccgaaaacagcctgagcagtttgctgtgcagcctgagccagttctgcacggatgacagcgtcgctgaaagcggctgtgagcaaggtctgcatttgttccggctgcagctggtgtgtgtgctgcagtgtgtgtatcaattgttttatatccataatatgtgacctctaattaatgatatatgtttattatagcatatgtacaaatgcagcgagtaatcgttgccaaggcaatttatatttgttataattgtaaaacaataagtaattaataaaaaatatgaaagtgagaattgaatggctttaaagggtatggatagtatagaactggaagaaaatatatatccgatagatgcaatcgatcaggagcttgcagggaatttaactatagataaattatttgatgtttaccgcttcgtggatatgaggacacacttagtccacgattataatgacggtaagatgtgtgagccctgccgcaaatgttatgagctgtggaatcgcagtaagccctgtccgaattgttcatccgaaagggctgtccagcagaaaaagcaaatcatgaaaatggaatatctgggagataaaagtattttgatccttagtacgccctgggagcaagatggtaaagaatatgtgctggagctgggacgcgatgtgacaaattctttcagcgtttatgatgctaccagcgaagacagcagtgagctgcgggaactaatcagcagttacagtgaacttgcggcccgtgacagttttacgggcctttacagtaaaggccatgccaataatctgctgcaggaaatgtttgctgttcagaaagaacagttaaagctgacgctggcgctgattgatatcgaccattttaaaagtgtcaatgacaggtttgggcatttatgcggcgatgaggtcattctttatgtagttgacaaaataaatgcgcttaatgagcagtgcagcggctgggcagccaggatcggcggcgatgagtttttactggcctgccctttcagtgataaagactatgtggaaaggctttgcctggaaatgtcggaaacgattacaggtcaccgttttaaaaaggggcacagtgagtacagtatagcaatcagctgcggcgtggcggcttatgacggacaagaaaccctggaagagtttttggaacgtgtcgatatgaagatgtatgaagataaagcgcagaaaaaacagtaaaagacagcagagaattttctctgctgtctttttaaatggtttcgctgataaaaagctggttcatcatttcctgagtaccaatgatccagaggatgtcgcctttttgaaagacaaaggaggcatcaggattgagatgcgtataattaccacgttccaaacctaaagccagacaattgaccttgccgaggtaagaactttttttgagagtggagccgcagagcggcgaatgcctgtcgatcggcatcgcgtaacagaagtaggcggtgccgccatgctttggatcagctaaaaactggtgcagtgtctgctggttatcagtagccagcggcagaatctgcatatcataggattggattgccagttcaaaattctgcagctgtctgggcgtacctgttaaaagcagctgagagccggcatagatagcggcactgccgctggggataggcaggatctggctgccgttttggatttcaagcacgaaaacattataacggcggtgcagattaagttctttgaggcttttaccgccgcagagtgaagtcgctgctacacggtagcgtttgacatgcagctgttcatcgagccaggcaggatggttggcggcgtgttttttctgtgctgccagagttttggcattcaggttaatcataaactgagcctcgatctgtaaatagcgttccacgaaatactctgaggaatagatgaattttgccagaatgcaggctgcagcaaacgcgataaatttgctgaaacccagtatacttgtaaatacggacaggataaaaaacaaaccaacagcgatcttaataaaaagcagaagaaaaatgggcagatgattagcgggtttttggaaccacagacttgctataaggtctgtatgtgcaaccctctggaacatgaccgccattaaaaatggccccatacacaacagcaggataactgcggcaataatatcagctgtatagccgtcaaaaagcctgtggcaatatggaagcagcttactttgtcccagataggcaaggaagctgagaattacacagaaaactgtgaggcgggtaaagtaactctgcagcagttctttccaggcactgcgctgctcgtcgctggcgggagcttcatcaggctgtggtaaaagccgcagcagtcttgcgggaagattacgcagaagccagccggatactttatcggcgtggcgcaggattgaaggcgtaagaaaaatactgataactgaaacagctacgaaaacaggatataaaaaatcgctggtgactttgagggcagcgccgatagaggctacgataaaggttatttcacccagctgcgtcaaactgaagccgcagcgcagcgctgtctgtaggtctttgcctgccagaaggacgcccagtgatgaaaaaatagttttgccgatgatcaaagctgctgtaagtacagcgatcggcagcgcatatttaatgatcagagcggggtctaccatcattccgacagaaacgaaaaagatcccggaaaaaagatctttgaccggcgtcaaaagtttttttgtggtttctgtaaaagccgtaccggaaagcagtgaacccataaggaaggcgcctaatgccgacgaaaaacccattttagttgccaggactaccatgctcaggcaaagacccagcgaaaaaatgagcagtgtttcggaagtcagatagcggctgactttgcggaagaaggtaggcaggaagaaaataccgcagacaaagcagataatgagaaaaaaggccagctcgccgatactgccgagcatttctgtaccggaaatggcagcgcctgccgcggcgatggttgagagcatgaccatcataatgataccggaaatatcttccaataccaggataccgaaggtaaattgcgtgaagcgttctttcaagagtcccagctcttcaaaggttttactgacgactgctgtagaagacatggtaagcatagctccggcaaagagactgtcaataggctgccagccaagcagtctggcacaggcatagccaagcagcgtgatgcctgccagttctgtgacagcggcgatcagcgctgtgccgccgatacttttgattttggcaaaattgaaatcaagtcccaggctgaacaaaataaaaataacgccgatgtccgaccagactgtaatattggctgtatcgactacattcggcagcaggttaaaatgcgggctggcaaagaagcctgccaaaatatagcctaaaaccaaaggctgattgaattttttgcagaaaatggtaactataccggcaagtacaaggataaaagcaaggtcttcgataagaggagcaagttcggacaatgtagcaactcctttataaatatcagtttaaacagatatttttgctggaaattttaaaaatattactaaaatgaattatacactgttgccggtggtttgagaagcagtgtttattcggataaaaaagcgtccgcttcttttaagaaacggacgcttgcttaatttttatctctctgtaatattaagcttgagatgatacggattcttcttcttcggcaggagcatatttgggattgaggaagttgacaaaaatccaggccagcagtgcgcctgatatattatgccaggctgagaaaatagctccaggaacggtagccataggcatggaagtaaaatgagttttagccaggcctgtagccagaccggaattctgcatacctacttcaactgaaagcgcaatggcttttttccagctcatgccggtgatccgggctaaaataaagcctaacagataacccaggcagttgtggcagatgacgaccagcagaatgataccggaggttttgacgatgttatcacggctgacggcgataacgccggcaatgatcagggagatagcgatagccgaaacagcaggcagataatcggtagcctgttcagcaagtttaggcagcagcgctttaacagccagaccaaggcagatcggtataataacgatttgaatgatgctccagaacattcccagcgggtcaaaagcgattttctgtccgataagctgataggtgatgagcggagtaagaatcggtgaaagcagtgtggaaacactggtcatagttacagataaggccaagtcgcctttggacatgaaggtaatgacgttggaggaagtgccgccagggcaggttccaactaaaactacgccggcagttagagccgggtctaaattaaaggccatagccagtaaaaaagccagtgaaggcatgataagatactgggcgcagacaccgacaaaaacatcgacaggccgctttaaaactaaagcaaaatcacggagattgagtgtggtgcccataccgaacataataacgcccaataaggtactcaaaaccgggatgccgccgatattaccgactacccatttaaagctgtcgggtacggtcatgcccaggataagaaatacaacggcgatgataccaaagtatttgcctatcagatgacaaaacgttttcattgtgtaaaacctctttcccttgaataaaaataaaatatatcagatcaacaccttatggtgtagatttttgtctgcggaaaacagcagaggtttgcatatttttattaatacttccaaatattataacaaaaaaattttaaagttaaaaggctaaagataaagtttcgggaaatattgccttatgctataataaaaacagcgtattggaaaaggagtaaaagcattgtatactatcaggaccgattaccgtgacgaaacagttattgagaaatcgcggttcatctgcacgttgaaaaaagtaagcagtgaaacagaagcgcaggatttcatcaaggttgtaaaaaaagagttttgggatgctacgcataattgttctgcttatattattgatgagctggcgcaaagatcgagtgatgacggcgaaccgtcaggaacggcaggactgccgatgcttgaagtgctgcggaaaaatcagctgagcggcgttgcggcggtagtgacaaggtatttcggcgggatcaagcttggtgcaggcgggttagtgcgcgcgtatactggcagcgtgtccaaagctgttcaaagctgcggcctggcacggaagattttaatgggtacttttgctttaagtgcggacgcggcggacgcaggaaaacttctgaatattatctatcagcagcagctttttacagtggcgtcggtagaatatggtcagcaggccaggattttgctgtatatgaaacaagagcagcaggatgaggcggagcggtggctgactgaggcgcttaatacggcaacgcagctggaacaggtcggcagcgaatatgtagaggtacctgccgagagagaaaagtaataacagttctgattatgaaggagagagaaaatggagtttttagagagttttgttgcttttaccaatgatattttatggtcatatgttctgattgtgatgctggtaggtctggggatctggttttcattgcggacacgatttgtacaggtgcgctgcctgaaggaaatggtacgtcttttgaaggaaggcgttggacagaagactgaacataaccatatttcttccttccaggcattttgtgtcagcactgcttcccgtgttggtgttggtaatattgccggcattgcgatcgctatcgtcagcggtggtcccggagcgattttctggatgtggatcatcgccattttaggttcggctacgggctttattgaaagcacgctggctcaaatttacaaagttccgcgtgaaggcggcggttaccgcggcggacctgcttattatattaagaacgtactgggcaacaaaccaatggcggccttgtttgccgttttgatcagtgtgaccttcggtttgatttttaattcggtacaggcgaatacgatcacaatttccctgcaggctgcctttggactggatcgtttcgtgatgggctgtataattgccgctttgaccggtattgtcatttttggcggcgtggcgcgtattgcgaaggtcgctgaatggatggtgccgattatggccggtctgtatcttttaatagctttaggcgtgaccttgatgaatatagagaaactgccgcaggttttcaacgctatcttcagttcggcctttgatctgcaggctgttgccggcggcggtatgggtgcggcgctgatgaccggtatcaagcgcggcctgttctcaaacgaggctggtatgggcagtgtgccgaatgctgctgctactgccagtgcttcgcatcccgtaaaacagggcctgatccaggcttttggcgtttttgttgatactttactggtatgctcggcttcagcttttatcgtgctgttgtctgatggttatactgaaggtaagctgaccggtatcgaattggtgcagcaatccttgtcacagcatttaggaccatgggcgccgagttttctggcaggaatgatctgcctgtttgcgttcagttctattgtaggcaattattattatggtgagatcaacatcgggtttatcagtaaaaattatatgacgctgatgttgttccgtgttttcgtagtgggtatggtactgtttggcagtgtggctaaagttgccctggtatgggatctggccgatctgtttatggcgctgatggcgataacgaatttagtggcgatcgcgattttaggcaagtatgcttatattgctttgcatgattatatggatcaaaaacgtgccggtatcgtagagccggagttcgatccggcgatcttgccaagccagcgtggtattgaggtgtggcagaaagaataactataataatgaaaaaaggacgagcacatgctcgtcctttttgtttgtgtgcttacagcattttctttaattctgcggtattttcgacaatcgtgacgtcgtgggtacgcatttcttcgagtgccgccgcaactgtatcgggagcgattccgcggcaggcagcaaggttcaggatgacctcgaaacctgcggcacgtaattgcaaaacagtattttttacgcagtagtcagtagccaggccgccgcagatcactgtagtgatgccatgttcacgcagatactcgatcgcgccggtagaaagtgtgttggctaaatcatggtaacaggccccatagggatgtttgtcgatttcaatacctttgtagacctgaaagtcgtagttcttaggatcaagaccagtaataaattcaaaacctttggtcccaacaatggcatgagccggccagtatacatcgacatcggggtagccgctgacgggactgagcacaggatgtccgttacctgcgatccagactgcctgaggggaatgggcgtcacgcgagccgatacgcagcgatgctagagctgcctgggcattcagttcctcaacgatctggtcgccttcggcaaccggaagttcgtccggacagacaggagtaaaggtattttgagcgtcgatatcgaacgcggcgattttattttgggcgggtaatttagtaagcatggcaaaatcctccttaaaaaagatgtttgttaacagtattatactctattttggcaggtgattatagagcttctttaaattgcaggtaattgactgtgtgcttgacaaggtttttaaatcagagtaagatgtgaatatgaatttcaatttcaaattaggaagtgctttatgaaaaaacgtaatccttataaaacagctcagcaggaagcgatgctgcaatattttttagaggataaacataattttttaactgtcaaagatttgctgagcagcctgcaaaaattgcagatcgacatcggtcagacgacggtgtaccgttttctggagcggcaggctttggaaggatctgtcattaaaatccagccggttgatggatcgggaacgcagtattggcgtctaccctgtccgcaggctgatttaagagggaagctggtgtgcctgaaatgcagaaaagtcattcctctgagctgtgagcacttagatatgttttcagagcatgtactgcataagcataaatttaatttaagcctgcagcacagcattttatatggttattgtgaagattgtgataactgagcagtctgaggaaagaggtgataaagagtaaaaataaggttggtgcgttctggcaagggcccaccggggagaagtgaagcggcttactgcttaataataaattttagctgcggtaatttgtaggaggtaagaatgaagaagtttttagttgtaatattgggtatggttttactggcggcagtcggctgcggcagtgaaaaaaaacaggctgatggcaagctgccggtagtggcaagcttttatcctatggctgattttaccagacagatcggcggagatctgctgcaggtcgatacattgatcgctgacggtgtggaaccgcatgactgggaaccgacagccaaggatttaacaaaattaggcaatgccaggctttttgtttataacggcggggtcgagaactgggcccggcctgctttagaagctgtaaaggacaagcaggtagccagtgtggaggccggcaaagggctgtttgacgaaaaagctactcatgtagatccgcatgtctggctgagtccgagaaaagctgtattggaagttgctgcaataacggctgctttggtgcaggctgatcctgaacatgctgctgtttataaaaagaacagcgaagcctatcaggaaaaactgctgcagcttgaccagcgtttgacagagctggcggctaaagcaccgcaaaagctgtttgtcacgactcatgccgcctttggtcatctggctgaagattatggtctgcagcaggttgcgatcatgggtatttctcctgatgcggaaccaactccggctgatttgaaaaatctgatcagtacgatcaaagacaatcaggtaaaatatgttttctttgaaactcttgtcagtcccagaatcgctcaaactgttgcggaagcctccggagctgaaacgcttgtgcttgatccgctggaaggtttgagtgaagcaggcagaaacaacggcgacgattatttaaaaatcatgacgcggaatatcgacaatctggagttggcattgggcgttaaataaacggtggatctatggaaaatatcattaaaataaacaaattaggctataattatggcgaaggctggattctgcacgatctttcggtggagattgcccagggagattttgttgccgttattggccctaacggggcagggaaaagtacgctgctgcgtcttttagcaggcattctgcagccgacttccggcgagatagagctgtacggaacgccgctgccgcaattcaaggactgggaaaaaatcggttatgtaccgcagaatcctgctaaacagcatcgcgatttcccaatcagtgtcaaagaggttatcggtctgggccttttgtgtggcagcagtatgtttcagaaaatttcccgggctggcaaagccagagtagaaacgatgctggaacggttttatcttcaagagcttgcgcatcgtaaaataggtgagttatcaggcggtcagcagcagcgtgtctttttggcacgcgctatggtgcggcagcctgaactgctgcttttggacgagcctgctaccggagtcgatccggatgcgaagatcgagctgtacagaatgctcagggatatcaaccgtgagctgggtgtgacgatcgtgatggtgtcgcatgatttggagctggcagccgaagtggcgcataacgctttgtgccttgaccacgatgtctgcttctggggcgacgtacagcaggcgctggtgcatcgtcataagcacggttacttttacagatagaaggtacttagatgttggaaatgtttgaaacagaatttatgcagcgcgcctggctggctggtttgatcgtggcagtgatctgcccgttgatcggcagttttttagtgctgcggcggcagtcgatgatcggtgacggcctggggcatatcgccttcgccggtgtagcgggcggagcgctgatgggctggcagcccgttttgagcgcggcagcggtcactgtgcttggggcgctcgtgatagaatgggtacggaccaggctggcggccttttcagagatgattttagcaattttcttttacagcgggatcgggctggcagttgtttttacgagtatgaaccgtatgggcggttttaatttaagcagtattttattcggcagtctgatgacgatcagcagcagcgatttatggatagtggccggcctggggatttttgcctgtatttttgtggtacttttttaccggccgctgcagtatctgacctttgatgaaacatcggcacgggtggcaggcttgcctgctgaccgactcaatatttggctggcggtgctgacggcgctgacagttgcgctttcgatgcgtatcgtaggcctgctgctggtttccgctatgatggtgataccggtagcctgcgcactgcagacggcacgcagctttgccgggacaatttacggcggtattgcttatgggctcgttatcgtttcaggtggtctgaccttatcttattatgctaatttagcgccgggcggcactattgtactgactggtacctgtatgtttattttgagctgtttatttggcagacgtttctatcagaaaccgcaggcacaggagaacctgacggcagaatgcaagatctgccgctgcaggaaggaggagcagacggatgcaagttgatctgcatatccacagtaccgcttctgacggtacctggactccgccggaagtcgttgcagcagcgcttgcagcagggctgggagctattgctgttaccgatcatgacagcgtggccaatgtggcggcgacacgtgagcttgccgtcgcagcaggattaaaatttattcccggtgcggagatctgttcgacgaaagacgatttctgttttcatatcctgggttatggtatcgatgtcacaaacaaacggctgctggatttattggagcataatgagcggcttttgaacagcaaggatgatgaaagcataaaaatgttgatcgaacgaggctggccgctggattttgaagagtttttgcggtatgattatgatagaagacgcggaggctggaaagccctggctttcttgcaggataaagggctctgcggcgatgtcaatgattttttcagcaggatttttaccaaagaacatgatcttggttttccggtttttccttcgatcaaagaagttgtggatgccatccatgctgccggcggcgtagctttatgcgcgcatgcagccagcagttttcatgggccggggctggcagcgacactgctggaattggcgaaggaggattttgacgggtttgaatgttaccattcgggacacagcagggaagatactgcggcactgctcacttattgccgtcagcatcagcttcttgtcagcggcggcagtgactgccacggcagttttgtgccgtcacgtgcgctgggccggcctgttatcgacagcagcgacctgaatttaccgggattgttataagggaggaatggaatatgacgaaggcaaaagtttatttttcggatatgcgtaccagatatggcgggttgagtttaccgcagaagctgggtaagctgatcgaagcagccgggatcggagatattgattttcagaataaatttgcggcgatcaagatccacttcggcgaaccgggcaatctttcttttctgcgcccaaattatgccaaagtagttgttgataccgttgccgcacaaggaggacgtccgtttctgacagactgcaacactttatatgtaggtcgtcgtaagcatgcgctggagcatattacagctgcttatgaaaatggtttcagtcctttttcaacaggctgtcacattattattgccgacggcttgaagggtactgacgaagcttatgtaactgtgccgggcggcgaattggtgcaagaagcgaaaataggcaaagcattgatggatgcggatatcgtgatttccctgaaccattttaaaggtcacgaagctactggtttcggcggcgctattaaaaatatcggtatgggcggcggttctcgtgccggcaaaatggaaatgcaccatgacggcaaaccgcatatcagtgaacgcaaatgtatcggctgcggtgcctgcgtgcggatctgtgcgcatggtgcgccgatcatcgaaaataaaaaagcgcatatcgatctggataaatgtgttggctgcggacgttgtatcggtgcctgtccgatggacgcggtgaagccgcccgctgatggttccagcatggaagcactcaataaaaagatggcggaatatgcctgggctattttgcacggcaggccgcattttcatatcagcctgatcgttgacgtatctccttactgcgattgtcatgcggaaaatgatgcacctgtagtgcctaatatcggtatgctggcatcttttgacccggtggcgctggatcaggcttgtgcagatctggtcaacgcagcgccggtcatggcgaactcactgctggacgatcatttaaaagctgatccggaaggctgtcagggacatgatcatttccataacctgacaccggaatctgaatggaagacctgtcttgctcatgccgaaaagctgggtatgggaacacgcgcgtatgaactggtaacagtaaaataaaaggagctgacagtatgattgttacgaccacacctgctgtagaaggcagaaaaatcgttgcttataaaggtattgtttttggggaagtagtttccggcgtcaattttatcaaggatatgttttccagcattacggatatgatcggcggacgcagcgggacctatgaaaaggaactgcaggaagcacgtgaaaaagcgctggcggaaatgtctgagcgcgccgctaaattgggcgccgatgccgtagtcggtgtcgatgtggattatgaagtgctgggcgaaactaacggtatgctgatggtcagcgtttccggaaccgcagttaaactggactgagagtatataactaaaaccgtgaagtggtacttgaaagttggataattaaatagagctcaacgctatcagggcctgttgtctgtattttacagacaacaggccctttaagtttttttgtgtgttttgataacaattaaatcgaaaatttgtgcaagaccataaaaagtttgaaatataccaacgtaaatgtcttgcgggggggtacagatatggtaatatatcataagagatacaaaataattaaaaaatattaaataaaacggctgttttgtatccggaaattcaagacctatgtcagaaatttttatttgatcttaaatgatcaagaaaaggggatggtgctgaattttagggtgtatggacagatagttactcattttgcctgtgttgaaatttattgaagaaggtgtagaaaatgttgggtaaaactaagaaaaatttggcactaaaaataacactgggattagtattagctttgccggtaggaacagctttagcggcggatacagcgacaattgttgattacgatgctcttactgtgaagccaaatgcggaatttatataccacggcgagggcgataagaaagcagattttactgctgcagatattaaacgcagtgaaacgcaatgtgtatatggaatttttgttggggataaagccgttttgaatgcggcatcagaaaatataaacatatcggttactaatacggagggtgaagcaagagcagtatatgcgggggctttcactgataaagacaagcatgttataaatggtgggacattaaaccttggtgataatacaactaaaaatgtcacggtgaaggttgacgcgaaaaaagatgctctggggctgaatgcaatacgttcaacggacaacagtgaggttgaaccgggcattattaatgtcaaaggtgaaaatgtaagtattgaagccaattcggcggaaggattagctgttggtatttgggcacaaaataataagactgtaaatgatggcaatccgtccactgtgaaaatagatgctgataacacatatattaacgtaacttctggtaataaagtgccaaccgcaggggaatataataatatcggcattgttaattatagcggtgctaaagtaattattaacggtaatttaacagtagagtcaggaacttttttgagcactcgcggcggtgcaacaacagagatcaataaagatggcaagggcacagttaaaatcaacggagatattaattttaactatgaccaaccgacatcaggaacatcggtagatgcaattgttgatttaaatttaacaacacaagactctgtatttaacggcaatatctttgttaacggtaatccttatccgccagacgggaaaaaagaggttggcggcatgaacttaggacttgccaacggtgcacaatggaatactgatgagaacagctttgttaataaactaaattttaacgatggtattattaatgtgaatggcggtgagggacaggaagttaaacttggtgacattaatggcagtggaggcactgtaaatatgttaacgagctccgatttaaaaaccgccaaattatcaattggtacgatagaatctgatgctgtaaataaaatcgatctcaaagccaaagcggcggccggtcctaaacttacaattaattacactggtatcaccgccgacgatcttaacaatgtggctgatgatttagggggtttagctaaaaatattagtgttgcggaaggtactaatactggtcttacagctacggctaatgtagcagaaggtttgttaaagggttcggtaagcgctgatctggatactgctgccatcggcagtacggtcaaggttgacagcgtcaaacaaaataaggaaagttctactatgacttctatgcgcaatattgccagtgtggcgatcgtttcatggcggcaggaggacagcacgctgagccagcggttaggagaattgcgtaacagcaagggagaccaaggcatttgggcacgtatgagccgcggtgaatttgaatacagcggcgcttataaaaatcagtataatttcttccaattgggctatgataaagcttttggcagctggcattatggtgcggcaataagccataacgacggaaaaactacttacgatagcggtaaaggtgaaaacaagagcacctccctgtcactttatggaacctggctgggtgacagaggacattatactgatattgttttaaaacagggtcgtttatccaacgaatacgataattatgcggcagcagggcatactcatggagattatgatgcttggggaacttctttgagcggtgaatatggtatgaaggtaggcctcgataacggctggtatgtaacgccgcaggctcagctgacattgatgcgtatcggcggtgaggattatactactaataacggtatcaaagtcaaccaggatacactggagagctgcgttggacgagtgggctttgaaatgggtaaaactatcagcgataaaggcagcatttatgccaaagcttcattgctgcatgaatttgcaggtaatgccgatacttatctgaacctgaatagtatcagcaacagctacagtcaggatattggcggcacctggtatgaagcaggcctgggcttcaacttcaaaactacggacaacagttatgtttatgctgatgtagttaaaacatttggcgatgatattaaaactccttggcagtggaatgtgggtgctcgctggagtttctaagcagtattgaaatctgaacagaagagaaataaaaaagcaccgctttcaggcggtgcttttttatttctctgtttttctcatgggcttcgcttttggtattttgggcgcggtcagttcaaagctgtgggcgatcatggcaaataattcgcctttgggtacactgtttacttcgacggtgttccaatgttctttgttcatatgccaggccgggtaaacgcctttgtaagtacggcgcagaaattcggatctgacaggatcacatttcagatttatgcagagcttgccttgaagatgcataatacaggcaaaccatttaccaccggatggatggcgcataatagtgagatcgttatcggcaaagggataatcttcgacagcattaggataagtaaggcaatgagcgatcaaggtttgtttttccatggcagatacctcgctttcgtcaggcggcattaattttatcataattatataacaaaaaagccgacctcgcagtcggctttttattttgtgatatgctaattatttccctgtcagtcttttgatgatttcctgataggcttcttcgacgctgcccatatcacggcggaaacggtctttgtcgagtttttcgttagtatcccagtcccataagcggctggtatcaggtgtgatctcgtcggcgaggatcacttttccgtctgcatcgacgccaaattccattttgaagtcgatcaggcgcactttccgttcagccagaaaggcctttaagatttcgttgatcttcagggcgtaggctttgatttctgcaacctgtgcatcggttgccaagccaaaagcttcggcataatcagcgttgatcatcggatcgccaagatcgtcgtttttatagtaaaattctacgatagggcgtttcataacatagccttcttcgacgcccatttttttggccaggctgccggcggcgatgttacgggtaactacttccatggggatgatactgacttttttacacagcgcttcacgatcgctgagctttttgatctggtgatgggggatgccgtgcttggcaagcaggtcaaagaaaaagctggtgatcgtattattcataatgcctttatctgcgatagtgccttttttgaggccgttcatggcggtagcgtcatctttataatagatgattacttcattggggttctcggtttcaaaaacttttttggctttgccttcatacaacatttttgccattgtctgtaacctgctttcttttaaataaatttattagtagagccggcgaatgtaaggcactcgtcgcctgctaaatcgcaagtgttgatattgttagatggattttttacattgttagtttagcttgtttgcttttcattgtcaatgatttttcggaacatttaatataaaaaatagtaaaaaaaggcgtttttatgctaaaaatccgaacgtttaaataaaaatatggaaaaatatttgctaaaactctttacaaatcctgaaaagtgatttataatcacagcataagcaacagcgaagttgcgggccaaggcctgagttcgccgttgctttttgttttattctgtttagtttcagtgagggggagaaaattatgagcaatgtaccgaaaatgtttggcagcctggtatttaatgaaacggttatgaaagaccgtttgccaacggctacctacaagactttcaaaaacgctgtcttaaaaggcgaagcgctggatctgccaattgccaacatcatcgccaatgcgatgaaagactgggcgctggaacatggcgcgacccattttacccattggttccagccgatgaccggtattactgccgaaaagcatgaaagctttatcgctccgacggcagacggccgcgttattatggatttctccgggaaagaactgatccagggcgagcctgatgcttccagctttccttcgggcggtctgcgcgctacttttgaagcccgcggctacactgcttgggaccctacctcttatgcgtttatcaaggatggctgtttatgcatcccgactgcgttttgctcctataccggcgaagtattggataaaaaagcgccgctgctgcgctcgatgtgctgtgtcgaccaggctgccagacgtatactggcgctgttcgggcaggcgaccgagaaggttgtgactactgtcgggccggagcaggaatatttcctcgtcgataaggagatgtgggagcagcgtaaggatctggtatatacggggcgtacactgttcggagccaaggttccgaaagggcaggagatggaagaccattattttggcatcatcaagccgcgcgtcctggcttttatgaaggagctggatgaggagctgtggaagctgggcgtgcttgctaaaacggagcataacgaagttgctccggcccagcatgagctggcacctatttttactactactaacgtagcttctgatcataatcagctgacaatggaatttatgaagcgcgttgccctgcgtcacggactggtatgcctgctgcacgagaaaccctttgctggcgttaatggcagcggtaagcataataactggtctattgcgactactgaaggcgataatttactgaatcccggtaaagaaccacataaaaatacccgtttcttactgtttctcgcagctatcatcaaagctgttgatgaatatcaggatctgctgcgcgtaagtgtagccagcgccggtaacgatcatcgtctcggcgcgaacgaagcgcctcctgcgatagtatctgttttcctggggacggagctgaccaatattctggaagctatcgaaaaagggaagcagtacaatcctgacgcggcggcgttattgaaattgagcggcgatgttatcccggcactgaccaaggataatacggacagaaaccgtacgtctccgttcgctttcaccggcaacaagttcgagttcagaatgctgggcagcgagttttctatcgccggccctaatatcgttctcaatactatcgttgccgaagctttgaatcaattcgcagacaaattagaaaaagcagccgataaagatgctgccatgaagaaattgatcaaagaaaccatcgtcaagcataaacgtatcgtgttcaacggtgacggttatacggacgcatgggtagaagaggccaaatcgagggggcttcttaatcttaaatccacaccggaagcgctgccttatatggaagcggaaaaaaatatcgaattgtttgttaaacacggtatttttacagcggccgaggtgcgttcccgggtggagatcatgttggaaaaatatgccaaaacgatcaatatcgaagcattgacgatgctggatatgctgtataaggatatcctgccggcggcaacggcttatactaatgacctgctgggcaatgctgcggccaaaaaggacttggggatcaaaaactgctttgaagctgatctggcggcgaagatttccgagttgaccgctaaaatgtataacagcggtgaaaagctggccaaagtcctgaaaggtgctgaaaaatgcgtcgatatgaaagctgaggccaactattatcatgacacggttttaaaagaaatggagctcctgcgcagctatgctgatgctgccgaagagctgatcggtgaagactatctgccgtatccgacctacggcaagctgctttacggcgtcaacaattaaaggacgcccaggggaagctgacaacgcgaagaagcgtatccgctgaggatacgcttcttttttataaatagagctaaaatgattggatgtggggggactatgatgatggaaaaatacgcagcagcggatacgatgtgggtactgatcggcgcgtttatggtattttttatgcagccgggctttgccatggtcgagaccggttttaccagagctaaaaatgccggcaatatcgtgatgaaaaattttatggatctgtgtctgggcagtatcgttttttggatcattggctttggcctgatgtttggcacggatatcggcggtttgatcggtgcgcctgatttttttgtacaaaacgattatggggcgtcttatccgtcctgggccttttttatctttcaaactgttttctgtgctacggcggcgactattgtatcaggtgctatggccgaacggacgaagttttctgtttactgtatctacagtattttgatcagcgcggttatttatccggtctcggggcattggatctggggcggcggctggctcggcgccatgggttttcatgattttgccggttctacggcggtccatatggttggtggtgtagccgcgcttgtcggtgccaagatacttggtccgcgtattggaaaatataatgctgacggcagtgtcaatgccataccgggacacagcctgacgctgggcgctttgggcgtattcattctctggttcggctggtttggctttaacggcggctctacagtttgcgcgaccggtgacgatgtcctgacatcaatgggcaggatctttgttactactaatatggccgctgcctctgccgcgacggcaacgatgttcctgacctggctgcgttacggcaagcctgatgtatcgatgaccttgaacggcgcgctggcaggattggtcgctattactgctggctgtgacgcagtcagtgttccgggagcttttgtgatcggtatcattgccgggcttgtgatcgtttttgcagtagaattttttgaccagattgccagaatcgacgatcctgtcggcgcaatttcggtacatggagtctgtggtgcgctgggcacgctgctggttggtgtttttgcagtagacggcggtctgctgtacggcggcggcagtgagctgctgatcattcaggcgacgggagttgcagcggtagcggcttatatcggtatcgtgatgacgctgatttttcaaatcctcgataaaactatcgggctgcgggtcagcacgcgtgaggaaatcgccgggctggatatggaagagcatggtctggccagctcttatgccgattttatgccggcagcagaagatttccatggtgctgtgactgctcaggaagcagcagaggctggtgctgccgttactcacgttactgccgctctgccgtcagcaggcagaccgaaaatgacgaagatcgtgatcattacttcgcagctgcgttttgagatcttgaaggaagctttggataaacttggtattaccggtatgacggtaacgaaggttttgggttacgggctgcagaaaggcaataccgaatattaccgcggtgcggaagtaagcgtgcatctgctgcccaaggtcaaagtagaacttgttgtttcggctattcctgtggctgcggtggtggcagctgcgaaaaaagtgctttataccggtaagtatggtgacggtaaaatttttatctatgatgtagagaacgtcgttaagatacgtactggcgaggaaggctatgaagccctgcaggacgagccgatagaggcataataaataaagctgacttgcggtactgtcctgatatggcggcagtaccgctttttagtaatcatattttagaaaataatgcaactaataattattattaagatttttgactgtcgctgctttctgtgatatagtgataataacaacaagcgatgctgtcattcattggcagcgcgctgttgatcttgaaaagacaggagttgaaagttatgttgtataccgcagaagacgcgatccagatttatcatgctaaatcatcgactttggaattttttgcggcaaaagtgccgaaagctgcctggcagggtatccgcaaagaagatattgagccggctcaggaatattacagtgacgatattattgtagattttgatttgctggaccgggacgcttatgaagaaaaggtctgcggcggtgctcatagcgatctgcccgatgcggcgtttcctgttctggtgatcgtcaagtctttggattaaaaattttttatactcaaaaatgacctttgcaggtactgcgcttacaaaggtcgtttttttatttacttctactgtttcaggggggttaagggctttaaaatgcaacattcagacctgtaaaaatggcggaaaaagtatttttgtaagcaaactgtaatttttttctagttgatatttaaatattgaaaactttacacagatgaaaaagtgtatataataaaaatcgtaaacaaaacctgctcagcaggaaaggaaagaggtcaatgaaaatgaaaaaatctgtaatcgtagtggtctgcttattattggtaggcatttttggctggtctatcgctaaagccaacagtgccgatatcaaagtccatcttggtgcaggaaccatcgttatggatcaacaagagctggtattaactcctgatgaagccatcatggttcaagaagatacagtatacctgcccctgcgtccgctgatggaaaaaatggactaccaggtattctgggatgccggtatgcaaaatgtttcgatggaaaaaggtgatcagacctattttatgactattggcagcaaccaatatgtacgcaatggccaaaccattactttggacaacgctccgattttagtaaatggcaagactatggtgccggttacattctttaccaacgttatgaacaaaactgttgaagtttccaacagccatgtttaagccttaacgtcaattacatctcatatatagcttcctacaggcaaaacaccgcttttacagaaagcggtgttttgctttttttcggcggcagtaaaaaacagtggccgggcttaaaaaataaagataaaagtatttatttgctaaaagtaaaaatgctataatataaaaaataggttataattaatagcggataatctaattgttttattttgtagaattcagagagcatttgtaaaaaatagaaagaggtagctttatgtggggaaaactgcatcgtgagctgatcgtcataactataatctcagttttgatcctggcggtttcttttgcattcaatttcagtgccagtcaaaaggacattctggaacgccagacttacgattatttgctggacgcagcccatcataccaaggttattctgcataccgagatccagcggcagaatgaattactggatatcgtgctgagaaacgctcctcgatatgaagggcagaaggataatttgatcaatcttttgagtacagtttccaacacagggcatttttcgactgttggacttacttatcgtggtcagaaaaccctgatgagcaatggcgaggaaatcgatatcctggatcaggattattataaaagggccttagagggagaagaagttgttgaagggccggtcgttttgccgtccagcggcagaaaagtagttattctggctaagccactgtataaggatgaagaggtcatcggcgttgtccatgaagcctatgatcttgacaatgcgacgaaaacgctgctggcggtgctgaatatgcagcaggaccgtattacgatgatcgcagatgaaaagggcgacgttattatgggcatcggcaatggcaagcagggaaatttctttaaattcctggagcaggaagccattggctgctcgatgacggagcaagacctggaaaaagctattgccaataaagaaagcggcgctttctattatactgatatctttggcgagacacagtatgtagtctttgcgcctgtagaagttaacgactggtacactttccagatcgtttcaggaaccaatcttctggcagatcagcagatgctgaataagatcgcccgggatacgatgggaaaatatttcctgctcatctgtctgtgctttctcgttatcatctatatctggcggcagatcgaaaaagaccgtttaaaacagatcaacgcggagatagagggtctgcggctgacggcgggcttgatggaaggctgcatgtttgaatttgatctgaaagcatgtaaatttctgatcgtaaaaaataccggtgaaggtgcggccgggcataataccgaaaaacagatactggaaaaattgggcggctttattactgatactattgcggaaaagaatagcagcagtttaaataagtattttcatgaggaagacagcagtgccgtgcagaaggctctgacagaattgcaaagggccggcaggacagtttttcaggggcgcctgcatacttctgatggcgattatcactggtatcgtttttatatggcggtggtatttgatgataagcggcagatcaagcgtgttttaggtaatgttctggatatcaacgatacgcagaataaatttgcacggatgcagcataaggctgagcgtgatcctttgacgggtatttataaccgggctgtttttgaaaaatatgtcaatgaggttttagctgacagctcgaaacggcagcatgcctttttcctgctggatattgatgattttaaaaatgttaacgacagcaggggacatgccttcggtgatacggtgctgtgtgagcttactgccaatcttgagcgcagcttccgcagctcggatctgctgggccgtatcggcggcgatgaatttgcggtgctgatgtgtgatatcaccagtatggaaaatgccctggtgaaagccgggcagatctgcagtctgtacactaaaggcgcggcaaaagaaggactgaagatatcctgcagtatcgggatggtgttctgtgaatctgacgacggcgctgcttttgacgacctgtatcagaaagcggacagcgctttgtataaagccaagggaaaaggcaaaaatgtttttgtcgtatttgatgaaaatatgctgtgagaacagcagggaatattcctggaaaaatgtaaaagcagcttctcatcttaataatggagaagctgctttttgatttaaaaataaatttctgaaaaactattttgaaaaaaatgggaatgtgctataataacataaattaaaatattgcgaatttaaatattgcgatatttaaaatttgtgaagtcgattttcggcaaggtagattgcaaccctctccgccttgtttgaagatattccccaaaaatagacctgccttagggcaggtctatttttttatttgatatttaaatctggtatcttgtaaggtgttgcaagctttgcggcttcctgcaggccatgctgtataataaaatcacggatcgtttcaaggatataggaaaaacaaattgccagataagtgctgaaaccttcaatatcccgtgcttccaggtataaataagcctgccatgtatatttgcaaagagtatccgtcgttcctgcaagattctggcggtgaaaagccagataataaccccagtgcagcagtttattggtttcctgcagtatcgcccgcagcggctgcagctccgtaagttcgatcagggaattgactattaaggccaggggtactttacctggctgaccaaattctgaccgccaggctttctgtgtctggggatcgatcctgccggctgcagccacagcgacaggcttgataataactgacattagctgcaaggcgctgagatagatcagcgtatcttttttgtaacgctcgttctgcatacaattagcggtgatgaaggtaggcggcagcctgacaatagtgcccttggtattgatggtttctgcgaagccgatctcgttgagcagagccagcgatttgcggatcgtggaaatagagactttgtagtttctggccagtacagcttcataaggtaaaagtgtaccgggcttatagatgctggcggcgatcttatcgatcaggtcacgggcgatctgggtatagtaatggtcgcgtcctttttcagcgctccagttataatcataaacaggttcgggaatctctgcctgttggtattttttgtatactttccggatatatttgttgactgaaacagaaaagctgagatacatatcattgaaacgcttattgacaagctggtaatcattactctgtaaagcagccagcagcagccggaaggtttccggatcatacttaaacagtatatttttaggtgccgctaaagtaaccttagaataagttttcagactgttatacagatcgttatagagcagattgttggagctgcgcagcagttcgttcagcagagctgaaaaagcggcatcgagcgctgcagtatcctgacagttattttttttgagcagcttctgataggagggcagctttttgatatcgcagtgtgcggcagaaaaatgaaaaatggacggtaaaatgagccccatggtttgataaacttctgtcagcgactcctgacgcctcagcagaccaacagcatagctttgagaagcactgtttttttcagcccggtaaatgacacgtgccggtttgcgttctgtcgtttggatcaggccttctgtttttaatctggccaaaacatctttgacggtacggatgccgacattataaatggctgcaagctgcggcatggaaggcagagtatcgccaggtttcagatggccgcaggtgatctggtcgtgtaaattttgataaagaaattcaaatagcgtatttttgcttaacatcgccaatatcccttcgaaaatattacaagtaaattataacataaacatttatagtaaaacatatagtaaatttagttatttgaaaaaacgattagatataatttaaaaatactttatttttattaaagaatgaaataacaaatgtaaacgaataaaaaatataattttattaattaatacaaaactacttctgctaaaaatatgaaaaagtttaatatgtgattaaaaacggcttggagcaacatttttatataagatattgtgctggtttttaataaatgctataataaaaacaataaactatacttaatttaattggcaaaataattaaacattaaaaatgttggtgtacagtttgcaattatgatgaaatttgaaatagaaaaacgtgtagaaatgcaggatatattttttttaaggaagctatatgcatacgtacacagtaaggagtggaaaatggaaactttagacagaaaaaaaatagggatgaatatcaaagtaagaaggatgcagaaactgatctctcagacagcgatggcagaaaaattagggatctcgcagacacatatgagcaacgtcgaagttggccgcgctatgcttagcctggagctgctgctgcagctgaaaaatattttaggctgtacgatcgacgaactgctttgtctggaagatgaaaacaaacccaggaaaaagagagtcagggtcattcgttaccttgattaaagctaagcaaaaagatttttaaagaaagtggtgggacgaatatgcaaagtatcgatttgaaaaaaataggcaatgaaatcaaagtcagaagagtaaaacagggcattcagcaaacagctttggcggaaatgctggatataacgcagacccacctgagcaatattgaaaatggcagagtccccggcagtttgaaactgctgttgaagctgcgcagtattttcgggtgcaggctggaggatctggtcgatccggagtgtgatgaagcgccggtcaaagctaatgataaaagaatgcggcgtataaaagtgatcagatattatgaaaatgcctgatagcaggcatgaataaaaaacaggtcagcttttagaaggctggcctgttttttattactgtctgaagtagctgggctgtactgtgagcagtagtgaaaagttcacaagtcagcggaaatttttgtggtatattaataaatagagtaaaagaaaaatcttgttttgagagtgaacgccatgactttaaaacaaagtaattataaatcgataacagctttactgctgatactggttattgctgtcggcgcagtctgggcccctctatatgtagaggccagtcacggacatgactgcagcggaacagcttgccaggtgtgtctgacggtcagcgttatcggcagctgtcttaattatgttctgccggcgctgctgccattgctgctgagtctgtcagttccggctgaaagtgttggaagcagggctttgcctgccagtctggcaaggctgacgctgatcgggctgaaagtgcgtcttgataattgagaattgccaaaatttattttaaataaattttggaggtcgtaccttgaaaaataaatttgtttatctcgttactatcattctggctgtgctgtatcttgcggcggggcattattttgctgtgcagggtttaagtttttttaaagagaaatcgcctactgacgttgttgaggcaagggtagtgaagcttttgccggcagcagccggggctaaatttgagcagataagatttgaagccgaattattgtcaggaaggcaagaaggcgtcaaagtgacggctgcgcagaataaagccggcagttttgcggttgggcgcgatgtagccgttggcgataaggtgctgctgctgccgggacagagtagtcagggtgaatggagttatgccgagcatctgcgcagtaatgtactgatgtggctgtttgctgtttttgctttaagtattatcgcttttggacggatgcagggcgtaaatactttgatctctctgcttttttgctgcctgtcgatctttgcagtttttgtaccggcgatactgtcaggcaagaacgtttactgctggacgatcctgacctgtgcttttattgtcgtgactaatctgctgctggtgaatggcatcagcagaaaaacggtcgcgactattttgggctgtatcggcggacttgtcattgcggcgcttatcagtgcgtctgcagacagttttttgcagcttacggggctggtagacgaggattccatgtacctgctgtttttgaatcctgctgacccggtcgatctgaaagcgatcatattcagcgcgatcattatcggcgctttgggagcgatcatggatgtggcgatggatattgcttcggccctgaacgagctggcggctactactgctgaacctacgaggaaaatgctgctgcaggccggcaataatatcggtcgcgatatcctgggcatgatgtccaatacgctgatcctggcatatatcggcggttcactgacgatagttttgctgttctttgcctataaccattcgctgctgtatctgctgaacaaggaaatggtggtcgtagagatcctgcaggccgttatcggcagctttggcattctgtttacgatcccgtttacttcttttatctgcagcaggctgtatgtaaaaaaggccggaagacgtcataagtcaggcttggaaaataaaatataaattatacggcaaaaatcttgcaggaattgatttgatgtattataataaaccgtgctgaaaaattatataaatttattaattatataataaaaagtataactggtaatacaaaaaataaacgggatgcaattaaaaaataagcaggatgggagcagctgttatgaaaaatgaagatgatgttatcggcaatgaaataacgggtggcgggagcagttccagcggtcctttaaaaagtctgctggaggtatgtccgatctgcggcaaggaattttcctgcaataaaacctatcatgtctatacggccctggccggacgccggcggcagtattactgcagctatcactgctttaaacagcggccgaatcccaaaaataaattataaaacactaaaacaccgtacattttgtacggtgttcttttattatgctgtcgtgcatagatgacaggaagtagtttgcaggatttgttgaatgatatttttgcagtgcttacatatattcacccatatgtggaacctataaagcatgagcaagtaaatcagtatgattgtcctgtagaggggtaaaattatatgatattacaaaaaaatattgctttttacaaaaagcataactacaatattaattagataacgaatagtttagaaaatattaaataaaataattgtaaaacttaaattgatgagagaatttgcagaaatttaaaatcatgagagaagtgaaagcatgaacgctgacagttacggccttaaattgaacgaacaaagcagtgagcagacggtctatgactacaatatgctgatgagtgcgatgaacgtcagtgtcagcaagcacttgatggacgaaaattttaccgtagtctgggctaatgattatttttactcgcagactttatacacaaagcaagagtatgaagcaatctatcataacagctgccgcaaatattttgagcagtacccggaagagtatgaaaaaatggcgatggcagttgaacaggccttgctgaaagggaaaagtggttatgaatgtatctgcaggatgccgcgtaaagatggaagctgttcctggatcaaagtcagcggtatgttcagcgaccaaaaggttaacgatatcccggtcatttacgctacctttattgatgttactgaagccgttgaacaaaaggaactgcagcagcagctggaaaaacgttcacaggaactgcaggcggcactgcaggcggcagaagtcgctaaccgtgaaaaatctgattttctttcccggatgtcgcatgatatcaggacgccgatgaacgctattatggggatgacagatattgcctccgcgcatatcgacactccggaaaaggtacaggattgtctgcggaaaatctcgctttcgagtcagcatcttctgggcctgatcaatgatgtgctggatatgtcgaagatagaaagcggaaaaatgactctggcggaagaagtgatcgagctgccggaggtgatggatactatcgtttcgatcatgcagagcagtgtcaaggccaggcagcagcagtttgacgtgcgcctgcggcatatcaggcacgagcagctgtgctgcgattcgctgcgtctgcggcaggtactgatcaatgtgctttccaacgcttccaagtttacgccgccgggcggtaccgtcagtttcgatatcgaagaaacggcgtcagaaaatgcggccaaagcctggttcaaatttacagtcagggataccggcatcggaatcaagccggagtttttgagggatatttttaaactcttcacccgcgaaaaagacagccggatcgataaaactgaaggcagtggtctggggatggcgatctcgaagaaaatcgtcgatttgatgggcgggacgatcgaggtcagcagcgaggttggtactggtactgaatttacgatcaggctgccgctgccgatcagtgaactggaattgggcaattttaagtttcccgatttgaagatcatcgtagtcgacgatgatgtgatcgtctgtgagcatacgacggagcttttacggcagattggcattcgttcggactgggaaacgtgtggacagcgggcggtgcagaaggtcctggcggcgcatcaggcgggtgagccttacgacgcggtgatattggactgcaggatgccggatcaggacggagtggaaacggcggcgatcattcgccgcgctatcagcgaaccgctgccgatcattttgatttcagcatatgattcggccgatgttgaaacgaaggcgcgtcaggcgggtgtcaacggttttatgacgaagcctgtttttatgtcgactttgtgccgggcgttacagagatatgttttaggtcaagcagctgccgatgaacaaaagagtaaaactgatttcagcggtaaacgctttttattagtggaagataacgccttgaaccgtgagatagcgatggaaatgctggaatctgccggcgctgtggtagaaagtgcctgtgacggcgcagaaggcgcggcaaaatttgcggcggcgccagccggctattatgatctgctgctgatggatgtgcagatgcctgtgatgaacggctatgaagccacgcagaagatccgcgcttctgctaagtccgatgccagaaccgtgccgatcgtggcgatgacggccgatgcttttgccgaagatatcatcgaagcgaaaaaggcaggtatgaacagccatttagccaagcctttaaatttagcgacgctggtgcgtgaaataaataaacagctgcagaagcattgaaaaagagaataaaagttcggggacaccgtatgtgtgattgcatacggtgtttttttatttgtttgagaagaaaagaggctgttgtctaaggctggcaagtaaataattcaaataacaaaaccgtctgcctgggcaggcggttttttgcagttcgggtaccagttgcaagactttcagataggcgtattcacttataacaaaaatgtcttgcggggggggacaaatatggtattatatcaaaaataatctatatagatactattaagtataaagaataagaaattatcaaaacaagaattaattaaaatattgcgaaagtagacaggatgagtaaggttttcaccaagacgttgcgaccctccgtcttgcttgaaaatatttccccataagtgccgctttgcgaaaaaagcagagcggcaaacccaaatacacgctgcgttttaaagacgcagctttgatgaacgtttttagacagggaatacagtcgcttcctttgtttaaaatattatttccaaacaaccctttatgtataatcggggtcttgcaatcagcgtgaaaaatttacagaaaggagcgggaaaggcaaaagccagggcaatcattttcattagaagtcaggctgtaacacgcctgctgcccctgtgcgataaaagataaaaatttgaagtaaaaattgatgatgaaggagtgagacagttgtctaaatccaaaagataccagttagagaaaaaaatcatagtttttttgagcagcagtttgtttgcgatttcggggttttgtgcaggcgacgtttatgccgcggctgtttttgcggatggaaccgggaccaattcgactgttgccggcgtaaataacaacgccagcggtgagaataccaatgctgtaggttataacaatcatgctatttctgataacagcaatgcgatcggcgcgaataaccaggctttggccgaggattccaatgccatcggcagtaaaaacaacacttatgccaatgaatcgaacgcgatcggcagcggcaatatcactaatggcatcgggtctaatgctattggtaaggataatgtggccaatggcttggacagtaacgcttttggtactgccaataaggcgaattcggataattccaatgctttcggtaccggcaatcttgcagatgggatcagcaccagcgcctttggctatttgaataatgtcagcggcaatgaatcagtggcgtttggttttaccaataccatttcggcagcagaggccgtagcaatgggacgcaataatcaggtgatcgctaccggaggcagtgcgatcggtaataataatcaggcaatggcgatgtattctactgcgatcggcaatgataactatgcgatcggagagaattccagcgcgatcgggctcggcaacaatattacagctaacgatgctacggcgctgggaaataagaatacggcttcagggatctcggcaggcgctgtcggtatcagcaatactgccagcggccataatgcccaggctttcggttatttaaacgaagctacggctcaggattcccaggccttcggtgcgcagaacaaagcgacggagcgttatgccagtgctttcgggcatgaaaatgaggctaaggcctatgcgggcagtgcgctgggtgtgaaaaacgtggttacaggcgattttggttcggcggtcggttatgataatacggcttccaactatctggccaacgccatcggtacctcgaatgtggcttccggcgcctatgccaatgcttacggtgtgtataatgaagctactgccagctatgccagtgcctttggctacggcaataaggtcggcggcgagcatgctatcgcgtctggctacaataataatatcgccggtaattttgccagcgctttcggtacggagaatacggtcagcaatattcgcagtgcggccgtaggttcaaataataccgtcagcggcgagatcagtaatgcttttggctataataataccgccagcggcaattatactaacgcgatcggctataataaccaggcgcaggcttttgccgcttcggcgatcggctatcagaacagggctacggccagcgcggtttcggccagcgccgtgggtcgttccaacgaagtgagcaacgaatatgccaatgctttcggtgctttgaacaaggcgtcgggttcttcctccagcgctttcggcgtcaacaataacgcttcggggtcctttgccagtgctctgggctatcagaacacaacggccggctatctcggcagtgctgtgggcgccagcaataacgcgtctgctaattatgccagtgcttttggttatggcaatgcggcctcgggctatgtcggcaacgctatcggcagtatgaatacggcttccggcagttatgccagcgccgtaggctatcagaatacagccagcggcgtcaaatccaatgctatcggcaatgaaaatacagcatcagaagaatacactaatgctgtcggcgccggcaacagagtcagcggctacgcctccagtgccttcggcaacaataacgaggtgactgctgaattcgccagcgcttttggccacagcaataatatcagcggctatgtttccaatgccctgggttatgataacgctgtcagcggcgattattcaacggcggtaggcctttttaataatgtaggcggcaattcgtcctatgcttttggctatggcaataatattgctgctaattccagttccgctgtcggcaacggcaatacgatcagcaccggagctgatgattccttcgcgcttggtaacgataccagtatctcgctggctaacagcgtcgctttgggcagtaattctgcagcgacggcgatcaacagcgttactggcaacagcagctatactaaatgggccggcgtcagcgacgtcgtgggcgttgtcagcgtaggcagctccggggcgacccgtcagatacaaaatgtagcggcagggcaggtcagcgcaacttctaccgatgccgtcaacggcagccagctgtatgaagtagcgcagaaagcagcgcagcaggctactgtttcggcaggcgacagcaacgtcgtcgttacgcctaccacgaacagcagcggcggcactgattatgaagtgaagctggctgacgaactgcagatcggtactggcgtcaatgtcgacggcaccggcgatggcaagatagatgtcggtaacggcaatgtggtcatcgacggcagcgacggctcgataactgccggcggcgtgacgatcaataaagatgatgaaggcacgataaacggcctgaccaatactacctgggacccggacaattatgtatccgggcaggcagcgaccgaagaccagctgaaagcgatccatgataaagctgcggaagcggccgagctggcagctaagcatacaactatggaagctgtcgacaacaatatcctgatcgaaaaaagcactaacgctgacggcggcgaccatcacgaactgaaattgaatgatgtcgttgagatcggcagcggtgccaataaagtcactatcgacggtacaaatggcactgtcagcaccggtaatatcaatatgaacggcaccaacggcatgataactgccgataagatcactatcgacggcggttccggcacgatcggcggtctgaccaatactacctgggacgcagataattacgtttccgggcaggctgcgtcggaagatcagctgaaaaccgtttatgataccgcagtcaaatatgacgtggacagcggcggtaatatcaacaccggtaaaatcacgctggaaggcagcagtggcactacgatcggcaatgtagcggcaggcgaagtcagcgctacctcgatggacgccgtcaatggcagccagctttatcaggtcaagcaggacatcaataatatcaatcaggatatcaccaagctgggtgacgagatcgatacggtcggcgcgctgtcagcagcgatggcaggcctgcatccgcgcttccaggacggtaacaagggcgagctggccatggcctacggcggctacggcggcaaaagcgcattagcagtcggcggcttctacgcccccaacgaaaaagtaatgttctcactggggctgggcatttccgaaggcggcagtaaaatgggcaacttcggcgtcaattttgcactggaccgctctagagaccgcaaggcagaaccgagagatatcatctatacccgtaaagaagtagataattctttagcggcgcaggatgaaaagatccagctgctgctggccaaggtcgaagaacaaagcagagaaatggaaaaacaaagccgtgaaatcgaatacctgcgagcacaggtagaaaagtaaatacagaaaatactatacttgccccggcctgcaaggctggggcaaactttctgagcagaggagcagtaagtatgaaaaagatctggagctttatcctatgtctggtcataagtctgacgatgaccagcgtttgcctggccagcgacggcgctgacctgaacaaacagcagcaggcagtagttaaggtatttgccgccttaaacggtcagaacgggatggaatatgccggcatacgccagctgatgtcagcgaagctgcaaacagagctggatgaaaaaactttcggcagtgtgaaaaataatctgcgccgcagctacggcgagcagcgcgaaaacaggttcctggcctatcagcggtatgctgacggcgaccgcctggcttatctggctaaatacagtaaggagaaagctctgctgtttatattcgttttcgataagcagaacgatctaggggcgttttcctttcagcccataggcgaacaacagcagtaacagtacagtttttcccgttttacagcatttaaatagaaagcagcagcgatattttcagcagaaagcttgctgctgctcatctgatttcaaaaaatgatccctttgccacagcggcagataagggatcattttttgaaattttaaatgtaacagttataaaaattataagaattataaaaaagtgcttaattgtaataaaaatatcttgcaaggtgcaaagaaaatatgttaatatggcaaaaataatccatataaatagtattaagtattaaggtttataaattaattaaactaaaattacttaaattattacgaatgaaaagacgatggagaaagcagaggtcagcctaaaaaacagaacagctttataaaaaatagatgcggggcagatttattgtttcagcatactatacaaagcaagtaactatttaaggaaaagaggtggggaattgtctaaatcccgaaaagttcagttagagaaaaaaattatgatttttttaagcagcggtgtctttattttttcaggcctgtatgcgagtaatgtgcaggcggcgcccgttttttccagtggcagtgcttctgattccactgttgccggtgtcaataatacagcttccgctaattccagcagtgcttttggttatttcaatactgccgggggcctggcatccagtgcttttggctggagcaatactgccagcgccgaaaatgccagcgcttttggttatgtcaacgaggcgagcggcctggcgtccagcgcgctcggtttcaggaataaagcggccaatgaaaatgccagcgctgtcggttatggcaataatgccggcggtgtagcgtcaagtgcttttggtttcagcaatgttgctaaagtggactatgccagtgcttttggctatagcaatgaggcgagcggcctggcgtccagtgcagttggtttcaggaataaagcggccagtgagaatgccagcgctgtcggctatggcaataatgctaatgctctggctgccagtgcagttggctacaataatacagccggcggcgtaggttccagtacgatcggctataataatacggctacgaatgaaaatgccagtgcttttggttacggtaatactgccgggggcctggcgtccagcgcttttggtttcagcaatactgccagcggtgataatgccaatgcttttggctataataatattgccagcggttccaagagcaatgttttcggaacgggaaatactgtttccggcagcagcagtaccgcagtcggtactgctaatgaagttgccgctgaaaacagcactgctatcggcaataacaatacgatcagctccggtgcagaaaattcggcggcgctgggaaataatatcagtatcagcttaaaagacagtgtagctttgggaaataattctacagcgacggcgatcaacagcgttacgggcaacagcagttatactaaatgggccggtgtcagcgatgtcgtgggcgttgtcagcgtaggcagctccggggcgacccgtcagatccaaaacgtagcggcagggcaggtcagcgccacttctaccgatgccgtcaacggcagccagctgtatgaagtagcgcagaaagcggccgagcaggctactgtttcggcaggcgacagcaatgtcgttgttacgtcaactaccaacagcagcggcggcaccgattatgaagtgaagctggctgacgaactgcagatcggtactggcgtcaatgtcgacggcaccggcgatggcaagatagatgtcggtaacggcaatgtggtcatcgacggcagcgacggttcgataactgccggcggcgtgacgatcaataaagatgatgcaggcacgatcaacggcctgaccaatactacctgggacccggataatatcaccagcgggcaggcggcaacggaagaccagctgaaagcgatctacgatacggcggcggaagcagtcgagctggccgcgcagcaaagctcggtatcgacaggcgacagtaactttatcgtcacaaaaaccactaatgacagcggcggcatcgatcacgagctgaagctgaatgaagtagtcgagatcggcagcggcgccaataaagtcactatcgacggcaataacggtacgatcagtaccggtaatatcaatatgaacggtactaacggcatgataactgccgataagatcactatcgacggcggtgcaggcacgatcggcggtctgaccaatactgcctgggacgcagagaatatcaccagcggccaggcggcgaccgaagaccagctgaaaactgtttctgacagcgctatcaaatacgatgtggacagcggcggcactatcaataaaaacaaaatcacgctggaaggcagcaatggcaccacgatcggcaatgtagcggcgggcgaagtcagcgccacctcgatggacgccatcaacggcagtcagctgtatgcagtacagcaggatataggcaatatccacagagatatcaataagctgggtgatgagatcgatacggtcggcgcgctgtcagcagcgatggcagggctgcatccgcgcttccaggacggtaacaagggcgagctggccatggcttacggcggttacggcggtaaaagcgcattagcagtcggcggcttctacgcacctaatgaaaaagtaatgttctcactgggactgggtgtttctgaaggcggcagcaaaatgggcaacttcggcgtcaactttgcgctggatcgctctagagaccgtaaggcagaagcacgagatatagtttatacccgtaaagaggtagacagctctttggcagcgcaggatgaaaaaatcaaactgctgctggctaagctggaagaacaaagccgggaaatagaagaactgaaagcaaaagtaaactaacagcaaaacccctgtctgctaagcagacaggggttttattctgaggataggagcagcacagcacggctgatgatctgcataaaagcagtcaacaaaaaacaatgaaacagctttaaaatttcaaaaaaatttactggaaatcatcttttgaacagagtggagctgtttatatgttttaggttcaaaaggcagccgcagcaggccttgacaggtaatgcggcttttaatctggttttaatcttggcgttataaaataaagacaaagcaaaggccggcgacgtaacggccgttaaggaggtaaaggatatgaaaagaaaatctatagctatgctggcagcagctctctgcaccttggcgatcacagttacagctttagctgccgaactcatcaatgcggaacaggcgcgcagtattgctgctcaatgggtaccggcaggcagcacacatctggtgactaaggacggaagctttgaattcgtgcctcattatgacgttaaattctatgataataaaaccaataccgcctatgaaatagaagttttaagaaacggcggcaaggtaagagagtttaaaatggaagcgcagaccgttctgggcagccctaaaatcgtcctttcagtaaatgatgtgcaaaatctggtccggaaggaattcccgaatgctgtttttactaaagtagaattagaccgcggtgacgggctttatgaatatgaagcagatttttacacgccggaggtacggggcgaaatgaaattcaaccctgaaacaggcactgttattgaaaaagaaataaaatatactgtgttttaagcaagaagcggacagtaaaataagaccggattttccggtcttatttttatttgacagctgcggttcgggtacggcggccagagtgtgctgaaagttgttatatttgtaataagaatactgtttgctgttgagctggcatttaaaaaagtaaaatgtataaaaattttttctgatttcgcaagttaggaaataaaagcaaataatcgaaaataatataaataagaaataaacataaaaaatagaaatgctggcagacgaagaaatgaaatgaattaatattataaaatatgatattaatatacacaaaatagccagtttatcccttgtaattgcttaaatatgcaaaaagagagcaggatttttttgctggatgttgaataaatacggtgaaatttagcatgttttagaaagatgctaaataaatctcaagggggtaaaagaatatgaaaaggatgaataaggttttagtaaaggctgtcgttttgagcctgataatgggcggagtacatatgggggggacttttgtttaaaaaagctatgcggctgcgattggtactggtttggaaatacatgcaggtttaggtgtcatgaatgatgcggatgttaaagcggataaagatgctataaaagctgccggcgccttagcaacacaaaaagatttggaagcagtaaatagggatgcggaaactgcaaaagagactgcagaggcagcagagaaggaagctgctgacgcacattcaaaggctactggagcatacttagaggccaaacaggcccaagaaaaaaatactgaacaagataagactttaagtgagcagggtcaaaagatttcggaaaattctacggcgatagaacaaaacacagcggatattgaaactaataaacaaggcatcgtgaccaacaaagaaaatattgaaaaaaatacgcaggcaatcactaccgaacggacagaacgcatccaggaagtacagcgtttagacgggcggatcgacggcttaagcaaccgcatcgacgagctggatggacgcattgataaagtcggagctttggcagtcgctatggccggcctgcatccgctggaatatgacccggatgccccgactcaattctcgatggcggcaggtacttacagcggtgaaagcgctattgcggcaggtctgttccacaaccctaataaagacgtacttttgagcgtgggtttttcgatcagcggcagtgagaaggcagcaaatgtcggcgctaccttccgctttggcagaagctcggaatcaaaagcccgtaaagtgatagaagacaaacaacgcgagcaggagctggctgcccaggccgcagccgccagacagaaaaccgtttcctatcgtgtagaacagattttggctgaagatacagcgaaagctgaatagcagatgggcagaaaagcatttgataacagcatcgattataaagagatcggcaccaggatcaggatcatgcggctgaagctggcggtttcacagactgaatgcgcctctaaactgggtatttcgcagacacacctgagtaatatcgagcatggccgcagcgggatcactttgcagatgctgtgccgggtctgtgatatcctgcaggtaagcttggattatctggtcagaggcgcagaaaaaaacgacgaaaaaaagcacagcgagatcacgatcgacgaagttgtgcgggtcataaaaatgctgaagggcatagaagaaaaataagtccggcagacagcaagtttatcataaaaaaagagcaaaccattttggtttgctctttttttgtctgagtatttaaattattattttgcggaaggcggcattttccaccattgtaaatcaggttaatgttattctaaaagcagattaaaatataaggaggtattggttatgtgtattatttgtactgatccaaattgtgaccatggtgaaaggtgtggtcgtgtaaaaatttataaggagggaggttctgccagcgatttattggatagcagaggagaatgggaacatgttattccaggcgctgttatccgtggctcagtatttttgcatagccacggagttacttatcgcgattctatgacttatgcgcttgattatgctatccacagagatgctgtggatggtagcggaggagggatcacctctactggcagaagtgaaattgctcagggatgggtaaatgatctgattagactatttgattctgggcaatctgatgaagcgataggcaaggttttttgtgatgaagtgtatgctattgaggctcacaggaaatttacggaaaatgatttctcaagcttagtggcaattttaagaagttatattgataaagggatagtttctcaaagcaaagctgatgaaattgccagttggatgcatggaaggatataatagcgatttttgattacgaattatttccaatttaatattgagagtattattgcgtatggtaagaaaactgtctgaaaaggcagtttttttatataatctataaaaaacttacaagtatatattttacagaaaaatacttaaacccgtttaaagatgagttgttatttctattatttgaataaaggaggtttttattgttttgcagcgtctgcctcaacagcaggcgttttttgtatttttagtatgatttacaggggctgtgctccggcaatgatcgcggcggttaggcgaaacgcaaaagtaacagaaccataaaaaacgcgcagacgctgatagttgtaaagccgctggcgtaatgcgccgggcaagactcgcagactttttacacaggctcaaagcaagtgtcttgcgggggggtacaaacgtggtaaaatatatttcaagtattgcaaatgaatcaaaatatagtaataaagaaaattacttattaatggtatttgctaagctgaaaatcgctaaaagaactaagatatgggggatgcaaatttatgatgatgaaaaaactaatatcaaaaggtaagcttaagagtcaaatattatacgctttaactacaatgcctatagtatacagtgcaatgctaggtatgtcgatagttgaagccgttcctgtacacgaaaccgaaaccgttcatgatacgactaaatcatacgacgatggcagtactatcatagtaagcaatagctacgccgtatatgccgacaatggtgaaactacgaacattacaattacctccggtgaactgactgtagccggccgccacggttttggcgctataagagcaaacggcggtacgatcaatttcggcggtgatacagttaccattaccaacaatattaaagaagcgtggtctgatgccgtaaccgttgccagtaacggcactttaaatttcaacaacaaacaaactattatccggggcgacaattacaacggactgctggtagcagaaaattctacagcttcgagcaacgctttgaccatagaccttgaccggtcgcagggaacattctccgatgataaactttatggaatgatagtctccaacggcagtaattttgaagcagctggagctgtaaacataaatctgaagggttcagcagacgattggaacatcaatggcctcaacctttggggaaatgacgctggcggcacagtcacttttaacgactccttaaatattaccagcatcgctcatgccaatgccgatgcgatcaattacggcatcggcgcctggaacaacagcactatgaactttaacggcgcagttaatatcactgttcttggcggcagtgacaatataggtatcacttgtgatggcagtactatcaatgctgcgggcaaaaccgtgcttactgttgccgacagtttggcgaataataagtatctggataacgataaaggcgataatatggctttgtttttatatgataatgctaacgccactatgggcgaaactgttttgcaggcctttggcggtaaaacggctcatggattagaagccggagttggtagtacagcaaaatttaccgatgaccttacggtagtagccgataatgaaaacggcaatgcaatagggatacatctgtacttggattcagtcttggaaggccaaaatgtaagtatctttaccaatggtaacagcagcggtgcctttcatgtagttgatagttctcagggtacggtaaatggcctgctgaatatcaaagccctgggtgatgagaatggcaatgggttaagtgttggctccggcagcggtgcagctacatttgtcgggcaggatgccttcatagaggtcagcggcgcaaacagcatcgctatcttagcttcgggcgacggcaatgttacctttaatggttctgtcgctactaaagccgctatcgccgctcaagcagaaggcaaaaacggagttttaaatcttaatggcgattttgacactacggctcagaaagatactttgatcaaagcttttggtggcggacagatccacatcaacaactccggcgccggtactgtaaaaatagacggtaaaataaaaacttcaaaagataataaagacaatgctattgatctgcgcatgaataatgccgcttctttctggaacatgactgctgccagcaatctgacttctttaacgatgaataacggtgctgttgtcgacatgcgggcggataaaaatggttacagcaaactggaagtacaaaagcttgtcggtacaggcagtatttttaaacaggatatagatgtacgcagtatggaaagtgacaagatttttgtaaatgacgacttcagcggcagccagatattggacatttaccaaaaagataactacgttccggcagaagacagcaacgaagggcatggactgttactggccagcaccaacggcgacggtgtatttaccgctaaagatcgcgaagggactttgttctatactcattacgatctggcaaacaaacaaagcgatacagctggctatactactgactggtatttagataaaatttctaatctggatcccggcgacaaacctactaccagcgtcgataccattcttgcggccaatgctctcaactaccatacctggcgtactgaaagcgataagcttttacaacgcatgggcgaactgcgccacaacggaaacgagcaaaagggtgcttggttccgcatgcatggcagtaaaatcgaccgcagcggcaaatttggttttgaaaataaatatacggcttatgagctgggctatgacgagctgactaaaaacactgctgaggtaaaacgttatcagggcgcggcgctcagctatactgacggcagcagcggttacagcagcggcagcggcgataacagcggcaaagcgatcagcttctataatactgagataggcagcaagggccactatctggatgtcgtctttaaaatcagcaatatggacaacgattttgctgtttacgataccaacagcaacaaaatcaccagcgactttaataataccggtgtgtcgctgagcgccgaatatggccgtaaaaacactttggaaaacggctggtacgtggaaccacaggcgcagtttacgcttggttatctgggcggcgccaactatacggccaataacggtatcgaagtaagacaaagcggcatcaaaagcgccgtgggacgcatcggcttcaatatcggtaaagaagtaggccgcaaaggcatcgtttacgctaaagccaatttactgcatgaattcggcggcagctacaacgtgacgatgaccgacagcagcggccaggtcaaggtcagcgacgactttaacgatacctggtttgaatatggtatcggcgcggcctttaaaacgggcagcagcagccacctctattttgacgtagaacgcagtacaggcagcgactttaaaaaagactggcagtggaacatcggcgctcgctggaccttctaacgaataaaattatgccctctacattaatatagagggcataattttgataatactctgtttattttacagttctctgtgtttgctgatgatggcccggctcagttcgttcaggcagctggtcagcttatccagccgctgctccatacgcagcagcagataccagctcagcaccatcgggaacccgaagttgccgacagcgctgaagatttctttggtatccatagtcgttatgccagcacggtaacggtaacgaccttgatgcgggcttcgacgaattcattcagccccaggccgccgctggtcagcacgcctgcttcgatgatcctggcggctgctgcctgcgcttcggctaaggtaacgtcttcacgagggtcggcgatgctcaaagtctttttagcgccgtcgcttttggtgaagatgagttctaaagttttttccatgtttgttctcctttacattagatttttgtttgcaggtgggtgttattctgctttgtcgagttcggctttttcggtaacgtaaacgttaactacggcgtggctcataagttcgccgatggcttcggtaactgcgaggcatttggcggcttcggcgtccaggcggacactgccgacagaggtgcttttggtttgcatggcgccaagagtgttggtaccgttttctacgtccatggaaagtttgagggaagtaggatttttgctgacagtcatattttcagctcctttcataatttggttttgtttttgtggtttgtaaccagaggttacatttgtgaaaatactttttagttttctttatgcagctttcttgaaagaaagctgcataaagaactttgcgcactgtgacaattcctgtttaacttcgttcgctgtccggcttccgggcaactcggcattgcagtacagagaaaagctttagctgctgatcgtcaatgcctcaaacagtccctccagcgcttacagctcacagcgtacacaacggaatgtgtcacaatgtgcgctcaaaacccttgtgccgtactattcagctatggatttcataagcagagtatcgaccgcctgatattatcaatatttacggtctatggcagtaaaacgtatgatacagagggttttaaagcgcaatccaaatcttaacagcgctgaaagttctttgctgactttctttcaagaaagtctaaaaaagcttgaagaaaacattaaaagaaaacattaaaagaaaacattgtgttctttaaaaagcagcccttttaatcaagggggctgctttttgcataccacagggccttgcccctgatgacctgtccgccgggcttcatagctccgtcgcctggtgaatcgcgcagataccataagtcccagcgggtttcggcgtcgccgctgtacggtccgtagccgtcgataagcgcggcttcgcagtgagtaaggatgttccttcggtcgatagggatattgagcccctgtgccagcttggcaactaatttacctgcggcgttgatctggcggggtgtgggcggaaacttgccgaactcagtattcctgccgttatgtggcagcgcgccgtaggcgcagcagagagcgataccgatagcgccggtattgcggtgccacgtatggcttttaagctcggtgagctgcgtgcaggtctggtaaacgctgctgccgtcggcgtcgatattgaaatggtagtcgtcgtaaagctggccgtaacgcccggcggtccagtgcagatagatctgcgagatgcggttgtgccccagggcgacaagttcggcgagtttggctgctgtcagcagcggtgctgatgatatttgcatttgcatagtagagatgctcctttcctgtgagtttggagagcaggccattattttaacgtactccgttcagcattttgatgtgctgtggcaccctctcactcttatatggctttttaggccctgttttttaacctgccggcaggaaaaatttaaaaagtgtaaaatttgctcttccaagcggcggataaaaattatttatgtaaagggggttaaaaatgaccttgtaaaaagccatataagagtaggggatattattactgacgcagtaagcataccgaatcttttaaatcttaaagacctttagcatctcttaaagcttttaaatcattaaaatctgtaaatccttcgtacatacttatgattttgacttggaagttttaagtgttaataatggttttgtattactgatctgcgttagtattgatacttacaccctaaattcagcgaaagcaggtaaaaaacatgaatgattctttagcttcacaacaaaaatctaaaaagacgggcggcgatgtgctgagtgcccgtcttttgtatttggcgctgaaatgccccttactgcagggaaaacactgccagacagagactgtacggccagttgagccgcagtctgccagaacggtgaaaccgccgagaaaggacgatgctttagtagagctgcgtatcgttttgccttatggtctgcgcaagcaggcacaggacgagcatatcaactgcagcgctttgttccgcagggcgcttaagcgcagtttaacgtcacgccgcagttcaggcgcaaggtgtgactaatggatcattttacagcgatcgaaaatgcgtggctggaacctccgcagagcctggcggaagccgtgtacagctgtaaattgtgtaatgaggctgtttacgccggtgatttgtatatcgagctggatgggctcattatttgtatagactgtctggacagcctgacggcgcgggagctggcagtagaggtgttgaataataagatcaccgcagcagggtgagataaggggatgtattgatgacagttacttgcacagaaacagcggagtgtaataaatggaccgaaatagtggctttagcgcagcagggcaataaaaaaatgctgggggtgattttgcaggcttttgatatcaaactgcgaaaaatagcacataccagcgcttataaaggttttgccgaggatggcgaacagatcgaaaggatagccgtagtaaaggcactggaaaaatggggacagcggcaggatttcgagaagctgccggcttttatcgtcagtaagtcgtatacggcgatcagcagtgaatggaaacgccggcataaggatgaagaaatgacctgcccttatgaaatagaaagcggctgtgaatttgcagaggaagtgctgacggcagatgcggcgcagacgacgcgtactttttttgaacagcagcaactgcagcaggattttgcggaagtgcaggaactgctggtacagctttcgcccaaacaggaagaattgatcgaactgcattttctggaaggctggagcaacggcgaactggcacagaggtttggcgtcagtccggcggcgatcagcaaaacgatcaaaaaagggcttactaagctgcggcagctgctgcttgcagcgcatcaggccgaaaaacagcgggaagcggaagaactgctgatatagataagctggaatatggatcatcaggcgcaggccggcaggctgttatggcactgccagccagggtgatctgactgggaaatgcgtttgccgccgcctggacagagaaacccgtaagtgcgcctgaccatataagccaatcaaaggctgaaaatattgcgaaggatgtgctgaaaaatggagagaccttatgaacagatacggcggatggtaaaactgtttgaatataacaggctgaagctgcggtttagaaacgaagatgaacgggccaggtttattgatggctgggcagaacgcttctgcgagacggacgatgccgaatggaatattgcggtgactattatgactgcccgccgccgcgaaccgaacttctataatatggaaaaagccctgcgcgaagcgcagggcataaggaaggaacgcagactgcaggatgaatggcgagcaaaagacaaagggatttttcagcaagatcagagagcaaataataacgccgcagaacaaggacgggaaggaaatggaaataatggagcaaacgcccaaataagcactgctgccgaaacaagcggcggagcaactacctccaacacccaaaaaagagccttgcagctgcaaggctcttataatttgaaaaccactccgaaaacacccgaagaaatagcgcaggaagcgctactgaggtacgagaggagggttattttaaaaagaagggatttctaaagtttctagaaatatactttttaaaataatatttttcgggaaagatttctttggctaatatattttccaataagtccaatttatcaaataatcttttatatttgtcatttaaaagtaattcagaatgggatatataataatttttgagattttgtttatacgagtaaaatgattctttcttattatcgattaataataagtgttttctgcttatatcatttagatcattaatgcaatctacaaaatattttgcttcttcataagtggacattattttatattctaaatcaatatttctaaaataacctaaatttgcagataaattatcatatacaataaaaatatttctgtttattggaataaaagggagagcattatttacaggataattaatatctttctgtaatgatagcaataagttgtttatagtttttttgatgacttttatttcagtagataaattaaataacatattatatctttgtacctttttattatctaatctcaaccatgctgcatagccaaaattagagcaagtaaaaatagtacaggtgataatatatagtatgatatcaggttttaatgattccagtaaatccatttacgatacctccatttttatgatatattaaaattataatatatcaagaacgatatgcaaatatcataaaagaaaggtgatgaactatgatctggttagaaatgagtagagaagaaaaacatggcggtggggaatggtcttttcaaaagtgtatttgggcgccatcacataaaaaaggaacaaataacaaatggttattttgggaaaatattttaaatgtaaggaagaatgatattgtaatacatttaagaggtaaaggcgaagaggcggcttttataggattttctaatgtaattagcgacggatatgaaacgaaagacagaccaccacatgcaggagtttgggaatatgctgaaagtttttatagagctgatttgtcagatttcacaaaatttgaattcccgagaaaattaaaggattttttttcaatcatcaaaatgacttgatcagttatttgaaaaataaaaaagaaaggccgttaaattgtttctttgtatatcaggcaggacgattacaatgtttaaatggtgcgtatttatcaaaaatcgatagtgtattattttcacttatcatagaaagcaaaattccaccaaaagataaagaagtttcgatagaaaatgttttagtcaatgaaaaattgcgtgaagtagtacagaggaggggacaggagaaattttcattaaaagttaaagaaaattataactggcattgttgttttcctggatgtgatataaatgacaagaatttcttggttggcgcacatatagacagatgggcagataacgttgaaaaaagaggaaacatatctaatggcttatgtttgtgttgtatacatgacagagcgtttgaattagggtatttttcaattgatgatgaatacaaggttattttgaataaagggaaggatattaataatagtttgttatttcagaaatctgtaaaaccatttaaaaatcagatgataaaactggggaatattttgccagatattgaatcattacaagcgcacaggttgcgaaatgggatatttggaggatattaagagtgattaagttattagatgtttttagaaagattttccaaaggaataaaaaacaaaaagaagagtttttggaggcaatgaatcaggcagatgctattataacggaggctgtgtattcaaatgaaaaagaaaaggttcttgatcacataagaagtttactccaaccaatacaaagaaaatatttagggtgtagacctgatttagtagagttaaactttagggaagtgttttttgattatttaaaagaattaccatctgaaaaattaatacaaccagctaaaaatatcatgacagtaaatctagcaaaagattgtattttaccagttccatggaatccagatcgagccaaagcaataaacaaagtaataatgcaaaatgattgggaacaggatattaccaatcattcaatagagttatggttacctattggagtggcatttgttttaggaggacatcattcaatagcagcaggggtgttatattctaaagggaatattattacagacaaaattttcgatatgaaacttctttatgatcatttttactgtgatggggtcgattataggagaaagaaggatggtcgaaagattagtaaagtaaaatattttgaatttgcaatagtttttgaaattggaagaaaaatggtggaaaagaatatttcttaaaaataaaacagaccaagtatacttgatctgttttatttttattttaacagattgattccttctagcatttgataggtttgtaaagtgaaatcatcagtcattccacttacgtgatcaataatgagatggattcttaaccacaattcataagttctaaaattaatatcggtggtatagtcatttagtgaatgtttgtaagcaattacatatctttttcctagtcgattaaatagacgtttttcaaaatcaaggtttttacaaatgtcattttgagatatagtttggaaatcttcaaagcttaaatttataagacgttggtaatgttttaaaatacctgttattactgcatatccagttaattcgatgctttcagctccaattgatgcatagagggtttttcttgaaactttttttatatctaaaatttttgataattactgatatagttagacacagcttccaccattacaatcttttgtcaagggacagatatatccaagccaaagctttttatataatctggaataggaacagggcaagattgattaggaagttagatagttgattatgcataaaaatataatacctctattctaaaattatgaaattaaagatcgaactctcgatcttacggatgcgaacaggatactttcccagttgagctatgtccataatatgattttattttactcttgcagaggagaatttacaagatattattgtataaagatgatttttacagaatatgcgaaaataagtttggtataatacttgtattttgaaatgttgaagagtataataaagggaaaaataaggtatcaaattattcccagaggtgaatgaatgtgaaacaggtgcatgtaagggttgaagatgaattgtatgaaaaactgaacagttattctgctgcaacggatcagactattcaggattgtgtcagagaagcggtagcctgctatgttacggatatgagaaaaaaacagcgggaagtcattaataagcagttcacatttattgacctgtttgcgggcattggtggaatgagaattgcgttcgacagatccggtgggcattgtgtgtattccagtgagtggaataaatacagccagcagacatattttgccaattttggtgaacaacctgatggtgacattaccaaggtaaaggccgaagatattcccgaccatgacattcttgttgcagggtttccgtgtcagcctttctcgattgccggagtttccaagaaaaacagcatgggtaaagcaaccgggtttgaagataaaacccagggaactttattttttgatgtttgccgaattttaaaagagaaaaaacctaaagcattcatgcttgagaatgtaaagaatctttgcagtcatgataaaggcagaacatttaagattattttggaagctttggatgaactgaattatgaggctttttacaaaatcattgacggacagaattatgttccgcaacaccgagagagaatactgattgttggttttaacagagacctgtatggtgataacatagattttgagtttgcattaacaccgaaagatcccaaaccggttatgcgtgatattcttattgaagaagttgctgataaatatacgttgtctgacaaactgtggacatatcttcagaattatgccgcaaagcataaagccgcaggaaacggttttggattcggtattgcagcaccggatggagttgcaagaacaataagcgccagatatcataaagatggttcggaaatacttattgcccaggaagaaaagaacccaaggcgacttacaccacgtgaatgtgcaagacttcaggggttccctgatgattttaagattcctgtttcagatacacaggcttataaacagtttggtaattctgtagtagtacctttgatggaaaatgtggcagaacttatagtagacaagttgaaggaactggatacccgaatggaaaataaaatggacaggcaggcgatttagatggcagcaggatatgcagaacaggcgatacagtccgtattgaacagttcacagggattctgtaagtttctttcggccaatgatactggagcgacgggcggacaccagtcgggtattctgatttccaaatcagcggtaagtatgttgttcagtgatgggcagatgcaacaggattgcattcccaaacgtactgtaaaaataaaatggcaaaatgattttagcactgaaagctgctttacttattatgaaagtaagaacgaattgcgtattacaaggtttggcagaggatttccctttttgattcctgaacagaccggagcattgtttgtactgtccagacaaagtgaagatgattacagcggatatttcctcgagacagaggaagatattgaagaattcttgaatgcatttgctctcagtcctacgggaacaaacagccttattgatgttggggccgtccatccggaagtgcatgagagaatggctgttcaggaatttatagacagtattagtgtcgagtttcccttgtcagaagaaatgtctgccgctgccagaaatattcaaaacagagtgtataataatattgattatatacgcactaatcctgacaggaaaattgtagaatggacaaatatggaatatactcttttcagagcgttggaatatgccagatatggggatctgattaacaggggatttcaatctgttgaggagtttgttcggattgccaatatggtgctgaataggcgtaaaagtcgcgcgggaaagagtcttgaacatcatttgtcggccatatttgatgggaatgcagtcagatatgaatcacaggcggttacagaaggtcgtaaaaaacctgattttatttttccatcaggagaagcctatcgtgacagcagcttttgcgtagataaattagtttcactggcagcaaaaacaacgtgtaaagatcgctggagacaggttttaaatgaagctgaccggctgagagataaaccaaagtacctgtgtacacttcagcagggaatatcaggtgctcagatggatgaaatgcagactgaaaatgtaattcttgttgttccgcgaccctatatcagaacatatccggctgatcggcaggacagaatctggactttggcgaaattcgtgcagtatttaaaatcaatagaggaataacagatggatataattacagcagaacagcgcagtcggaatatggcggcgatacgttccggaaataccaggccggagctgtatctgcggaaacttcttttttccatgggttacagatacagtattaattcaaaaaaagtgccggggcatccggatatctatctgagaaaatataatacggcggtatttattaacggttgtttctggcacaggcacgaaggttgcaaatattcatatatgccaaaatccagagttgagttttggcagaaaaagtttgagatgaatatcagacgtgatggtgtcgtcaaagcagagctgaaagatgcagatgttaaatgtctggtcatatgggagtgttccattaaaaagatggggaaaaatcctgaattctgcagtgaaatacttagtgaaataacagagttttttaaatcccagaacctatatatggagctgtgagtttgtatgaaaaggcagatcgcaggattgttaagaatatgggatgttttaggggaggcttatgatgaaaaagcttactatgatattactggtttgtattattacagtgggatactcagtttctgcatatgcagctgattggcagtggataacatcaactgatacaaatactttttcttttgataaggaaagtatcagaaagacaactactggaaaatacactgtatggacaaagaatgaatatacagaagcagaatccagaagaatgtctgatgaatttatgtttgataagcctcttgcttatgtattgtcgagaatagaattcgactataaaaatgaaaacatgggttttcaggcagaagcatattatgcgaaagatggaagtgtattatataattatacaaataagtactatgatttaacgcccattattcctgacacaatagctgaatatacattctataaaacatttgaggcatatcaaaggaagtacggaaaagtttagaacttatccagggataaaatttcaattatttgtattacagaacaaaaagccgctgaatattcagcggcttccttcattattaaacttggtggagacgaagaggatcgaactctcgaccttacggatgcgaaccgtacgctctcccagctgagctacgtccccattacataaaatatcttactcctgccggcgcaaaattacaagtatatttttagctttggtgcttgccgctatgtatacacgcgcgcttattgacaacttttgccgctggtgctacactttaaagtaatttcataagtatttgatcgatgatgaggattagtagctttgccaagcggacctcagcgagccggtgacagtgcaagtccggcgtttggcggcagggtgaatggacctttaagatacggcttgagcccgcaagggggtagacgccgtcgggatgcttcgcccgttaccagggaaggggatatcggccatggcccgtatcttagcgagcggactgattattcagtcaagcagggtggtaccgcgaaagttgtgtctttcgtccctacatggggatgaagggctttttttattgcccgatttgaaggaggcttatattatggataaagaaaaaaataccaggctgccgttggtggacctgatcgaagttaaaccaatgcaggacggctaccgctgggtagcgatcacggcgatgctgttcgctatcggcatcattctgcatacggtcagccctaatgtgggcggcgtgacgccgaactggacgatcgccatgtattctatcgttatcaatctgacgaatccgacgctgtcgcaggctgtgggcatcggttttattgcgggcatcacgctggtgccgtcgtcgaagtcggcttttccgctgggtaatatcgccagcgagctttcgggtgcgatcacctgctgcatcctggtcaaggcgatgctgcactgcggtttgggcaagtggaagctgcgccccctggtgacgggatttttggcaactatggccagcggcggtgtgtttactttcattttgaagatcgttctgggcctgccgctgcatgtctggctgtatgccatgctgccggtggtggcgatcgtgggcgcgctgaacggcatgatcacctttttgctgttcgggccggtgcggaagctgttttttgtgcaggaggacgatgaatgatggagatcgttatcaggctggaaaatttttattttgcttataataaatcggagctggtgctgcaggatatcgacctggagatcaaaaagggttcgttcactgtggtggccggtcccagcggcgcgggcaaaactactttgtgcaaggcgatgacgggcatcgtgcctttttatatgggcggacgttacagcggtgatgtgcaggtgctgggcgaatcgactaaaggccgccgggtgtcggatatcgcgatgcgcgtggggctgatgctggaggattacgaaagccagctggtttcgctgaccgcgggcgaggaagtggctttcagtttgctgaatcacggttttgcgccggaggaggtggcggagcgtacccgtaaggctttggaggacgtgggtctgccggggcgcgagagttatcagctggacgagctgtcgggcgggcagcgccagcgtttgctgctggcggctactttggcggtgcatccagagatcattgtgctggatgagccggtatcggcgatggacccggacggggcccattcgctgtatgagctgttatatgcgatccatcagcgttacggcacgacgatcatcgtagttgagcatcgagtggactatctgctgccttatgtgacggacatggtagtgctgaaggaggggcagctggtaacggctgatacctttgctgctgcggcgcggacgatgtatgaggacgaggagctgcgtccgctggtgcctgcgctatggcaggtgaagctgggcgtcgagcgccgtttcggtattactttgggcgagtggcggactgaggcagaggcggctgcggagttacagatgcttggttttgaaggggggaacgcctgatgctggaggctaaagaggtcaattttgcttaccgcaggggtctgccggtactgaacgatatcgcctgcacgatcggtgacggcgagtttgtggcgcttttgggccataacggcagcggcaagacgacgctgagccgtttgttcatggcgcttctgcatccccgcagcgggcaggtgctggtagacggcgaggatatcgtcaattatgagccggccgacctggctgataagatcggttatgtattccagaacccggatctgcagattttggaagatacggtttttgatgaggtggcgtatgggccgagggctaaaaagctgacggcagaaacgatcaaaaagcaggtggaggcagctttggcggctacagggctggccgagctggcgggcgcgtatccgcgtctgctgtcctttgggcagaagcggcgtttgggtgtggcgtcggcgctggcgctcaatccgcgtactttgatcttagacgagatcaccaacggtcaggatgcgatcgagaaagagcggatgatgcagtatttgcagacgctgaacgaagaaaaggggatcacgatcgtgttgatctcgcatgatatggacgtggtgcgccgttatgcgaagcgggccattgtcctgaaggacggcgacctggtgtatgacggtacgccgacggagctgttcggcggtgcgtatgctgtggaggaatggggcctgcgccggccgacggcggctgctttggcgggcagtctgggttttacggcggcgacacccgaggagttctgccgcctgttggtgcggaaaggagctgaggactgatgcggatcagtgcgtttactcaaatcattgtcactgttgctgtgacggcgtgggtctttatcctgccggtcaaggcggtggcgacgatcctggtttttgagctggctttactgctgtcgatcaagcgcgaccgcatgactatggcggcaatcggaggtttggcggtgttcaccgggctgatgatcctgttccagctgctgttcggttcgccgctggaggtggcgctgacgggcggcctgcggatgctggtcatgacgatggcgtttttgtgtatgctggcggcgacgcgtatccaggatattgcccagacgctggtggaccgtttccacctgccctgtgaatatgcttttatgctgacgacggcgctgcgtttcgtgcctaatttcctggctgacagcgagatcacgctggatgctcagtcctgccgcggttattccaaccggggcaactgcgtgaaacgcctgctttcgtatgtcgtggtcatcagaccgctggtcatgcgggcggtggccaagtccgaaacgctggcgctgagtatggagctgaagggtttcggcagcaatacttataaaaatatgccgcgcgagccgctgggagccgccgattttatcgtgctggggttggtcgtggttctgagcacctatccgttctggaaatgatgcccggctgaaaatttaaaatcatcctgcaagcagctgctgccttagaaagggagcggctgctttttttgagtaatataataattttattgcctaaaagaatataaattacagttgataaaaataataaatatgatagaataaaatcagcaaagtatataataatatcgaactattttaaatgtatggatagaaggtggctgcaatggtacaatcgggtgatactctcgttttatctttagctgaattactgggcggcaagcaggtggataccggagtcatcgacagggctctggcggagctctgttctgcttttgattttgacggcgggctgatctatgaattggaccagtacaaccatctgcatctgaaagaacgctgtctgcgtaaggaactgcctttgcggggcagctttccgatcgacgcggtcgacgctgcttaccgcagctatctggctcaggaaacctttgtctggctggagggtggacaaaagaacagtgcggctgagaatgctttgctggagctgtttgcggcgcagtcgctggtagtggcttcagtagtcgatgaaacgctgcagatctatgggctgctggtatttgtacagcagtcggcccggccggtgccgccggcaggcacgcagcagctgctgaagacagtgctgtcgatgtttggccggtatatcggggtgcgggtctatcagaacaagctgacttttgccaaaaattcgctggaaagcattttggataatacgggtatagatatttatgtcaacgatttccatacccatgatattttatatgccaaccgttctatggcggccccgtacggcggtatttcgcagtttttgggacgcaagtgctgggaggtgctgttcccgggtcaaaacgggccttgtgctttctgcccgcagcaaaagctgatcgatgagaacggtgaaccgacgaagatctattcctgggattatcagcggcctttcgacggttcctggttcagggtgttcagcgcggcgttccgctgggtggacggcagactggcccatgtggtgagcagtgccgatatcactgacaataagcgcaacgaagctctggtcgagtatctggccaattatgattcgctgacgaacctgccgaaccgccggatgctggtgaaggaatgcgagcgccggatcgacaaaacgcaggagggcggcgaaggttatctgctgttttttgacatcgacggttttaaaaagatcaacgatacctttggtcacgaagcgggggacgagttcttagtgcagctgggacagttcttttccggtatcccgctgctgcatgacgctatttaccgcaacggcggcgatgagttcatcgcgatcatcgacggcgataaaacggaagctaatatccggaatctggccagctttatccatcggcggtttgcccagccctggcggctgaaaaggggcgaggtgttctgcaatgtcagtatcggcgtggcgcgttatcccgaggacgggaggacggcggaggagctgctgctcaaagctgatcaggccatgtacaaggtgaaaaaagccggcggtaagggtgtcctgtttgggtacgagctgtaaatcttaataataaaagcctttatgactttgtcataaaggcttttttatgcgcagattctgatgatcaggggcggtcagtcttggctgccgccaggtaaaagtccaaaaacagctgtgcggtggcgcttaaccggtcttttttggaccagaacagcgtctgttcaaaatacagttcatcatcagccagcagcagctgctgcaacccttgggggaagtcgtccctgccgccggcggaaacgatggcgatgccgctgccgtcctgcacgaaagcgagtgcggcagtattggtggtggcgataaagcggatcttgggcatgaagccgtgcttgaggcaggctttgcgcagcaggctgtagcagccgaagttacagcagacagggatattctgtaattgtttcggcgtcagcggctgctgtggatcaaggccgcagtttgcctgcggactgtaaacggcataaaaatattctttctgcgttttgtgggcggcaaacagctgcggtgacggcagcggcgcattggcaaaggcaaaatcactgctgttttccgcaatatgtctggtctgggcgctgacggcttcttcccggaactggaagcagatttcgggataggcggccgcaaagggacgcagataggtgttgatgaaaaaggtgcttttggcaggcgaaacgctgaagcgcagtgtgccggaagcttttttattgaagctctgcatatctaaaaggatggtttcttcggtgtggcagatctggcgggccttgcccaggaaggcttccccggcttcggtcagggtcagctggcgtttgccgcgcgcagtctggatcagcttggcgccgtaatagtgctccagtgttttgatctgggcgctgagggccggctgggccagggccagttttttggaagctgtggtcaggttccctgtttcggcgacggtgataaaattacggtaaaattcaaaatccatagctcacctctaaaaaatataagaaattcttattataataacaaagaaatagtattttacttttttataccaccattctacaataaaaatagtttgagagcaagaaggggatggggttatgtacggaagtaaacgcaagcgccgcctgcacagcgtagcggtattgctgggaccgctaagcttcggcttgacgatactgctgctggaatggttctttggcttcaaagcggctgcggcgctggggacgacggtctggatggcgctgtggtggatattgcggccggtcaatatttcggtgacggcgttcgtgccgatcggtgtcaacgcattgtttgacctgatcccgatgcagcacgttatcagtcagtatttttctgagatcatcgtgctgctgttcggcgctgatctggtctgcctgacctgggcgacgacgggactcgacaagcggctggcgatcaagaccctgtgctgtatcggcacgtcactgcggcagcagatagcagtctggctgctggtagcgacggtactgtccatctttctgccgaatgtggtcgtctgtacgatcctggtaccggtagcggtatccatgctgcagtttattggcgaggaaaacatcaaaaacagtaagctggcagtgccgatcctgctggcgatcgtctggggcgcgggcatcggcggcttcggctcgcctttgggcggggcggcgaacctggtggcgatcagctatctggagaagctgacaggacaggaatttatgtatatcgactgggtgatgcgttttctgccgcttttggtactggtcctgctgctgaatctgtttttcctgttccatttgccggtgccggtaaagcgcttggctggtaccagcgaatattttaaggaaatgtacgcgcagctgggcacgatacggctgggcgaaaaaatcagcctggtgctgtttgtcgcggcgacactgctggcttttatccggccgctgtacgccgggtggctgccggcgctgaagcctgcgtatgtctttctgatcatggggctgctggccttcaccttcgaggatgaggacggcaaggccctgctgacctgggaatttgcggaaaagggcgttatgtggggcatgctgtttttatttgccggcggcctggctttgggcagtctggtgacggaaaccggcgcggccctgaaaatggctgaggcgatcacgctgctgccgctgactggcggtctggaaacggtgtttgcttttacgctgttttcgacggtgctgaccgagatttccagcaatacggcggccgccgccattgctgtgcctgtagtgcagagtattgcgcaggcgctggggctgaacccgatcccgtatttgttcgtggcgatcgtcgccttcaacagcgcctatgtgctgccggtatcgatcagggctatcccggtcagctatgggctggacccggccgagctgtttaaaaacgggctgctgctgtcgctgtgcagtgtactgctgatcacagtcgtcggttatttgttcatcaggtactggccgttgttctcgacggtctgaaaagggtctgtcgctcccactgctgcatggcggtgggatttttttgtgcgggcgctggcggcacaaggtttgggaaagtatgagccggaaaaagagttcaccaaaaacaagtatttatttaatattacaatttaaagattgccagtaaaaatcttttagaatataataaaaatagtaacttaatataatgattgtatttattatagataataacggaaaatagaaggcagctggcaatgaaaaataatatcttattaaaaactaatttactcgtcagtgtgattttgctggttggtttcgccctgatcgcgactttgagctaccgcgctaattataatgcttcactggtgaagatcaaacaggtctcctcgctggcctcggaaggtatttattaccgtttgtcgacgatgctgaccaagccggtgaatatctcgcagacgatggcgcatgacagtctgctgatcaagctgctggaggaagagggcagccgttatcaggaggccggttaccaggaaacgatcaggaagtatctggatacctataaaaataaatatgcctatgattcggtgttcctggtttcggcgtccaccaataattattataatttcaacggtctggaccgcaatcttgtccggggcgaggatgaaaacgtctggtattataattttctgcaaagcggcgaagaatacagccttaatatcgataatgatgaagttgctggtgcggccgataagatcactctgtttgtaaactgcaggatcagggatgcgtccggccgggtgatcggtgtagtgggtgtcggcgtgaatgtcgattatatcaaaggcctgctgcaggaatatgaaaaggaatacgacgttgcgacatatctgatcaatgaaaaaggcgagatcgaagtttccagcctttataacggtcatcagacggcggactggttcaaggtcaatgacagcgaagatatccgcagcgagatcctggaatggaaaaacggcaggaccaactgggatatctggatgccgggcgacgtgcagaataacgaaaaaagctatctggtcgtccgctatatccccgatctgtcgtggtatctgctggtaaagcaggataccggcgccttactggctgagctgaatgaaaagatgctggaaacggtagttttgatttctgtggtgatcctgctgatcattctgactatcacttcggtgatcagaaagttcaacgtgcggatgacgaagctgctggaagaacggcaggagctgttcaaggaagcgaccgagcagatctacgataatatttatgaattgaacatcactaaaaacagggcggccagcaaaaagaccgagctgtattttgaggcgatgggcgctaaagacctgccctatgaggaatttctgcaggctgtggccgacaggcagctgctggaagaataccgggccggctatgtggcgacgttcagtatcgaaaacgtgatgcggcactttaaggccggcaataattatctgcagtatgaatttatgatcacagaaaacggcagcgattatttctggatgcggatcgacgcttatattttttattcggaagctgataagtcagtgcatatgtttacttaccgtaaaaatatcgacgaggagaaacgcaaggagctggaaacac

SEQ ID NO: 10014 - DNA, 92489 bp, Unknown
  gut microbiota DNA sequence
tgtgatgcggcactttaaggccggcaataattatctgcagtatgaatttatgatcacagaaaacggcagcgattatttctggatgcggatcgatgcttatattttttattcggaagctgataagtcagtgcatatgtttacttaccgtaaaaatatcgacgaggagaaacgcaaggagctggaaacacaaagaaaggcttccacagatgagatgaccggcgtttatacgaaaaaggcgacggaaaggatcatcgacggggttttgtgcggcaagctgcagggcagctacagcttttttatcatcgatattgataattttaagcaggccaatgatctgcacggccatattttcggcgattattgtatccgggagttcgtggaacggctgaaaaaattctgccgtgaggacgatatcatcggccgtatcggcggtgacgagttcgtggttttcgggacgatatcggatgaggaaggcgcccgccgcaaagcggcccgcctgtgccagaagcttgacactatctgtgaggacagcggcagctgctggaaaatgtctgtcagcgtagggatagctttagcgccgcagcatggcagaagctttgccaagctgtatgcaaaagcagataaggctttgtatcagacaaaggacaaaggcaagaacggctatacgatctatgaggaaaaggaataaagcggaatatagataaaaagcctgcgtttcattagaaacgcaggctttttgatgtgaggaaagaatttttacgtaagtttttgatatttaccaggggcagttggaattagggcattcagtgcggccgtcgccataatagccgcctctgtgctcgccgcggtattcacctttatggtggcggtatttgcggtggccttcatagtaatggccgcctgcatggtaatagctgcggaaatgctcgcgggcagcgtctttttcggcatcactcatgctgtcccatttggcgcgtgcttcttcacgggctttctggcgttcttcaggagtcattttacgccattcttcacgctgtttttcacgttgttcaaagcgttctttttcttcgggcgtcatatttttcatgcgttcttcacgccatttggaatatttttcttcgtgtgccttctgacgttcttccggggtcattttttcccattcagcgcgtctggcttcacgttccttgacctgctcgtcagtcagctgcgggccggggtgcatggggccgccccagtgacggccgcgttccatatggtagggacggccgggataattgtcgccttcgtcgtggtgcaggatcgtgccgacacgctcgcgcatgctgggtttggtatcggcctgctcggccgcaaaagcagcggaagcacacagggcggtgaggacaccggcgataacaagggattttttccaggaagtttttatcataacaacatctcctttaagattgtgatttgaggttcgtttgaccttgtatgcttattgtagagtaaacttatgtcaaaattatgacgatttacagacttttttctgacatttttattttagcatgtttggcaggaagaaagcaatttagctcttttcaaggaatgcttaaagatttttccatgcatttttccagaagcagctgcgcctggcagcaggctttacgggtcaatggaaaatatttttgaattatgtaaataaagtaattgataattaaaatcaatttagacttgtttttataaagagagtagtgtataatcaaattaaaggttagccagagctaactaaaacgaaaataaactgcgatgagccaaagcttttggccaaaggaggatctatatgtataaacaatatcagctgccttatgattatgaggcattagaaccgcatatcgatgcattgacgatggaaacacattattccaagcatcatgcggcgtatactaaaaacctgaatgacgcagccgaaaaagccggcgtggcaggacgggacatcaccgagctgctggcaaacctggacagtatcgctgacagcggtctgcgtaaagctatcagaaacaacggcggcggttattataaccgcaacctgtatttttcgactatcagccctgacggcggcggtgaaccggaaggcgcgctggcgcaggcactgaccagagaattcggcggctttgccgcttttaaggaacagctcagcgcgctggcgttagggcagttcggttcaggctgggcctggctgtctgcggctgccggcggcaaactgctgctgtctgccagcccgaaccaggacaacccgatcatcgaaggcagcagtttcatgccgatcctgggcatcgatgtctgggaacacgcttactacctgaaatataaaaatctgcgcgccgattatgtgcaggctttctacaatgttatcgactggaaagcggtagcggctaattacgagcaggtccaaaacggctgattatccggccgatactgaaaataacagaatttataaatcttgaggaggaatctatcatgtctaaaaaattatatgaaaaaatgaatctttatcttgccaatcaggaagtcgcttatatcaagctccataatctgcactggtatgtgaaggggcgcagcttcttcactctgcatgcaaagctggaggagctgtatgaccggactgccgagatcatcgacgcggtagctgaacggctgctggcagttggtcaggcgccggtcgccaatatgaaagaggctttggcgctggcgacgatcaaggaactggcagataagccgatttcttcggaagaaactgtgcaggggctgatcgccgatgtggaatactggatcagggatactaaagagatcgtggagctggcagatgctgccggcgacggtgtgactgcggaccagttcaatgattatttaggggaatatcaaaaactgctgtggatgctcaaatcctacattgtctgaaactgaacggataaactgcaaccctcgctgccataaggcggcgagggtttttctatgcccgcagataaattttgcggataaacatttttttgacacatctttgtgttatattgattgcagacaagtgcggaccttataatatacttacagggagctgagctgtgcggagaataatttatccccgtatgccaaaataagtatataatggtaataatacatttacgaggtgcagcgatgaataaaattttgattgctgacgataatcagcagataacttctattttagcaaattatgcccgcaaagagggtttcgagccattggtagctctggatggacagcaggcgctggagctgtttgagcagcatgaaaaaaaaatcgacgtggtactgctggacgtgatgatgccgaagctggacgggttcgaggtctgccgtgagctgcgccgccggtcgatggtgccgatcattatggttacggcccgcggtgaagattttgaacggatcatggggctggatatcggcgctgatgattatatcctgaaacctttttcagcaggcgaggtcatggcgcgtgtccgcgctatcctgcgccgggtccagccgcgcgaagccgagcagcagaatctgtacagcgtcggcaatcttgtgatcgatctggacaaatatctggtcacgatcggcggcgcggacgtaacgctgacgaaaaaggaagtagagctgctgtggactttggctaaaaacagcagtaaggtgttttcgcgtgagaacctgctggacagtatctggggttatgattatttcggcgacagccggactgtggattcacatatcaagcgcctgcgggccaaagtggataagtttgaacacgaggagtgggagatcaagaccatttggggcgtaggctaccgtttcgaggagaaagagcatgcgcaataaaatcgcctggaagctgacgctgtattttgcagcggtactgctgatttttgctttggtcgtgggcggcacctttatgcattttttcggcaagcatacgctggatctgaaaaagaaagagatgcaggtgcgggcaacgaagatcgccgaggtactgcaggataatatgtcgcggctgcagaaccgttacggcggcatcggcagcagccgtttcatccgttatatcgacaatatcacgatggaaaacgtgtgggtagtcgatgagaataaaaatgtcaaaatgcaccgtgaggacgtcggcgcgctgcccgaacagcacggtatgatgcacggacataagcggatgctgatgcgtcagcaggaggatatagccgaacctgccagtgattttgactataacgctctgtcgccggaaatcaaaagagcggtggaacagggctttaccggacagaactttgtcatggaggagattaatcccgtactgggcgaactggtggtcacggtaggcgtgcctgtcagcgatgccggcggcaaagtcagagctgtggtgctgctgcattcgccggtgcagggcatgcgcgaagctgcctgggaggggatcaggatcctgattttatcgtgcgtcgtggcgatggtcctggtgtttgtcctgagtatgcttttttcgtggaagtttaccaacccgctcaataagatgcggctggttgctgaaaagatgtcggagcatgattatacggagcgctgcaatatcgaccagaaggatgagatcgggcagctggctcaaacgctggacggactgggcgaaagactgctggaagcagatcaggccagtaaaaagctggagcagctgcgccgtgattttatcgcgaatatttcccatgagctgcggacgccggtgacggtcatccgcggttcgctggaagcgctgtgtgacaggatagtcaccgagcctcaggaggtcgaggattaccaccggcagatgctggcggaaactttgttcctgcagcggctgatcaacgatctgctggatctgtcacggctgcagaatacggattttccgattgaaaaggaacctgtgaatttatgcgatgtggtgcaggacgtagtgcgcagcagtcagcggctgggacagcagaaaaatattactatccaactgtccttggacacgcctgtatatatcattgaaggcgattatggacgtctgcggcagatgctgctgatctttttggacaacagcatcaaattttcatcggaacagagtaaaatcgaagttactctgctcggcagcaggctgacggtaactgaccacggctgcggcgtgaagcaggaagagctgccccatgtgttcgaccgtttttataaaactcggggtgaaacgaataagagcggcagcggtctggggctggcgatctcgaagcagatcagcgaacgtcacggtatcggactgacaatgacaagtatacccggcgaggcgaccagcgtagtgctgcagctgccgccggctctgaagaaaggaagtacagattaatgaactatggttgtgaaggcaaggtcgcctttatcagcggcggtacgtcgggcatcggcaaggctgtggccgagctgctgctgaaagacggcgccgaggtgtggctgctgggacgtgatgccgaaaagggtacagaagcggcggtcacgctgagcgcttatggcaaagtgcattatgtgcagggcgacgttaaagatctggaagcctgccgcagtgcggcgcagaacgtgcgcgagcagcgtgaaaatattgatctgatcgtcaatgcggcggggatctatcaggaacgccgtttggagaaggtgaccgaatatgattttttttcgatcatggacactaatgtcaaaggaacgatttttttgacgcagaccttgctgcctctgctggcggcagagggggcgagcatcgtgaacattgcttccgacgcggggatcaatggcaattatggctgtccgctgtactgcgcatccaagggcgctgtcgtagcgtttacgaaagcgctggccttggatctggcgccgcgggtacgggtcaactgtatctgcccgggcgatgtggcgacgccgatgctgggtaaacagctgcagcaggcggacggcagttatacgctggaggatgtggagcaggcctatccgctggaacgggtcggggagccgctggagatcgcgcatgtgatctgctcggtgctgtcgccgttcaacagttttatgacgggtagtatcattcccgtggacggcggcctgacagcgaagtaattaattgcaaatgcagatgaaaaacagggacaataaccttttggttattgtccctgtgctatttgctgcagaaatacttcataattgccgattgcggcaaagagcataaaaaagacgatggcgaacagtatgtagcgcagccgtccgaccggttctgcttcgatatgggtaccgcaggcctgatcccagatcgtcgagccgctgtcacgcagcacctgccgcgcaaaccaggcggggacgaacatcatgatcgggatgcccagccacagccctttgacataggcccagaaggtacgtttccaggctaaattgaaatccagcggcgcagacggtgaaactacacgcagtcccagaaagcttttgccggcggtagtgcctgtgcgggctagcataaaggcttcagcgctgatgacgacgatcagctgcagcgccgagtaaagaaagatattgttgagcgcgaagatagaattacggctcagaagcaaaaataaaaagccgatcaggaaataatcgaacatccgcgcccaaaagcggcgccagctatggtaattgacaggagagatggtcaaatgcagcacatccttttcagtgtgatttgattagcttgttgccctcttattgtaacacagaattatttgcagatatagtgtgctattttatgaaaaaaagcatataatataaataaagctcagtgaaattttatgcgtggaaacaatggggttggagggataattatgcagaaaaatgcacctatcggagttttggattcaggcgtcggcggtttgtcggtcttaaaatgtctgcaggcggcgctgccgcaggaggattttatttatgtgggcgatacggcgcgtacgccgtacgggccccgcagtgaagccgaagtacgccggtttgtaggtgagatcattgattatcttgacggccgcggggtgaagctggtagttattgcctgcaacacgctgactgttctgggtgtggacacacttaaaggcagccatgcttttgagatcgtggggatgtcgaaaggcgcgcagctggtacttgccgccagcagcaggaaaaagatcggtgtgtttgccactgaatttacgatcaacagcggtgcgcataaggccgcgatcctggcagctgatgacggtgcggatgtctatcctcaggcctgcccgaagtttgtaccgctgatcgaaggcgagcagtttgacggcgccgaggtcagggctgctgttgccgaatatgcggcgccgctgaaggcggccggcatcgacacgctgattttgtcctgtacgcattatccttttatccaaaaagagatagaaagcgagtttggcagtgaggtgactgtgatcgacccggcggacgctaccgcgcaggatacgaagacggttctggctgcagaggggcttctgcgctctgaaggagcaggtactttggaggtctgctttaccgccgatgtggaacgcggcgcgcggatcgccggcagagtgctgccgcaggggaaatgcctttttaaagaaataaaattataagcgattcgtcgcaattagaaaaaattcctgctatttgagcaaatttgctgaaaaatagcaggaattctgcgatttttgtctaatataaaataaaaataaaaacatagaataagggcaagattttgcttttgccagggatgctgtaaaactaattagcagaccagtgtctcaggaggttctgtttccgatgctttgcaacctaatcagccgtacgaagggctgaggacgaagcaaaaaacgacatcgggacatttcgacccgtcttgaaactgtcgctatctatgcagaattgtatagagactttgcctaccggtttcacaaagacgtggaagcggtatttgtattgcttgaaataagtttgctgtgaaaagaagggtggttgctgtggagaaagagagtgttttaaaagatcggacgatagtggggtctccgctgacgcatttattttccctggggatactgatgtttgttttctggctggcgctgtcaggagattttgcagttaaatttgtcgtgtacggacttatcaccagcgcggtggttgcctggatctgttacccgctgctgcttttgcccaatgccgacggcaccaaaaaatattttgcactgggtgtttcgccgattgcatttttatgctacagtctgtggcttctgaaagagctggtgctggcgaatatcgatgttgtcaaagcgacggtacggccggagctcaggatcgacccgaaggtgatcagcttcgtgttcagggcagataatccgatggcgaaggtgctgctggcaaattccattacgctgacgccggggacggtgacgatcaacgtaacgccggaggggatttacgaagtccacgctctgactgacggggcggcggaagggctgctgtccggggctatgccgcggaaagtagcagagcttttcggtgaaaaattcgattttatggtattgaaaggggagtagcatatgcattatatgattatcgcgataatgatggcagtgattgctgttatcggtatgatgctgcagcgtgttttccagggcccgacggtgtacgaccggatgaatggcctgggggtgacgggtactgatacgatccttttgataattttgttcggttatctggacggacgtccggaaatgtatgtggacatagccctttcgtatgctattttaggctttgtcggttcggtgatcatagcgaaatatctgggaggtaaggatgtatgatgtttgagcttactgcacgagaattgatcgccgagatatttctcgccggcggggcgttctttttactggcttcggctatcgggatgctgaggctgcccgatttttactgccggctgcatgcttccggcaacagtgagactctcggtatcatgctttcttttatcgggctgatgatctatgaaggtatgacgatagtttcggtgaagctgctgctgatttccctgctgatcgttttgggcaatccgatcggcacgcatattctgagcaaggcggcctataaatcaggccatcatgtctggactttggaagaagacgcaaaggaggataaggaagatgcagatctacatcattgaagccctgttattggtattccttataattactactgtttgcgttattttctgcaaggatatcctgtgcgcggctgtcatttacagtgagttcagtttctgtgccgtgctgctgtatctgatgatgggcgcgccggatgtggcctttacagaggccgttatcgggacgatctcaacgatctattttgtagtgtcgctgaagaaaatagacaggtggtgtaagtaatgcgcggtttagtaacagttttactggcagtgatcacagggatgttctgttcctttgtgacatatctgccgttcatcggcgatgtcaattcggcgccgaaccagcatgttacgcctgtttacatcgagcgcagcgtgcaggacaccgggtcgcccaatatcgttaccgggcttctggccgactatagaggcttcgatacgatgtgggaaactacagtgatgtttctggccgggctgacagtcgtgatgctgctgagcagcagtacgatgggacgcagaccggaaaaggaggatgaggacgcatgaagaaacctttcggcggcatagtccttgatacggcgttcaggcttatagtgccgttttctctggtttacggagtgtatgttctgattttcggcgaggccggacccggcggcggcttccaggcgggcgcgctgctgtcgatcggtgtggttttatccagactgatcatgggcgatcaggcatcgttcaatatttcgataaaaaattcgctggtcctggccggcgtcgggaccttcatctatgcggctaccggctggctggcaatgcttaacggcggcaatttcctggattacagttatctgccgtttaaagcagagcataccaacgagctgcatgctttggggattttatttattgagatcggggtaacgatctgcgttatgatgacgattctcaatattctggatgctgttgtggaaaggggggacgaaaatgggagcgctaaatgaatttttacagaccaaggggatctacacgctggtcatgatcttgttttttctgggcgtgtacggtatggttctgagcaaaaattacatgaaaaagctgatggcgatgaacgtcatgcaggttgctgttattttcttcttcctgtgcctgggacaaaaggaaggcggtatgattcctatttttgaccccaatataccgcatgccgcttcctatatcaatccgctgccgcattgcctgatgctgacggcgatcgttgtcagtctgggtacaacgggtgtggccattgctttgctgatgcggatcaaagaagtttacggctccgttgaagaagtagaggttataaggagggccagcaaatgatccagcattgtcctgtactgatcgtgctgctgcctctgacggcggccctgctctgccttttattcagcaagttcaataaaaatctcggttcctggctggtcatcggctcgattgccggttcgctggcctgctcgctgcaggtactgcatcaaactctgaccagcggcgaagctatccattactggatgggcaactgggaaccgcctttgggcatcgagtttgtgatcgatccgctgagcgcggtgatggcggttttgatcaccttcatttcgctgatggtcgcggtgtacagcaagccttttatgcgtaaggaagactggctgcatatcggcggttattacaccttgtacggacttttgacggtgggcctgtgcggtatggtcatcaccggcgatatgttcaatctgtacgtttatttagaggtcatgtcactgtcaggttacggactcatcgccatgggcggtaaaaagtccatgctggcagctttccgttatatgctgatcgggacgatcggcgcttccctgtatttgatttctgtcgcctatctgtatgcgatgaccggtactttgaatatggccgatctgggcgaaaggatcatgccttatctcagttcgccgccgttcgctttagctgttgcgtgtctgtttatcggtttcggtatcaaaatggcactgttcccgctgcacggctggcagccggatgcttacaactttgcccatcccggttcggcggcctttattgccggcgtgatgagcaaggttccagcttacgcaatcattcgtttcttcttttatattttcggtgtcaataatccgatcatcagcacggccttaacagttttaggcattcttggcatcggcggcgtgctgatcggttcgatcatggcgctggcccagtacgacttccgccggatgctggcttattccagtgtggcgcagatcggttacattgctatcggtctggcgatcggcaatatgtatggttttatcggcgccgtactgcatatcatcaaccacgcttttatgaaaagcgcgctgtttcttgttatcggcggtatccagtaccgtttcggcgagatcaatctgtaccgtttaggcggtctgaataaaaaaatgactttaagtacgattaccgttacgttagcggctctgtcgatggtcggtatcccgccgacggcaggcttcttcagcaaatggtatctgatgctgggcgcttatcagggcgggcagtatttctatatcgttattcttgttatcagcagcttgctgaacgcagtttatttcttccgtattcttgagcagatgtttgttcagcacgaggcgtcgctgacagaaatcaacaggcatgaaggcaagctgggcctgccgcctgagatggcgatcccgattttgtgtgccggtatcgggattttagtcctgggcttttacagcgtggatattgttgacgatattctcaaatctggactgccggaggtgtttctgagatgacgatcatggattgcagacccttcttggcagtaggcgtttccttcctcgcggcggtgctgatctcttttagccgcagatatcctaatgtccgcgaaagctggagcgttattgcttcatttattaaattcggcttgatcatatctatggtaccgggcgttctggcgggtgtgacctatgaatggaccctgttccagatcactgatacgatcggctttaccctgcgtgccgacagcgccggtattctctttgcctgtctggctgcgcttttatggataccgatcaacttctattccattggttatatgcgctgtaacaatgagcatgagcaaacaggctattttgccgcttttgctatttgtatgagttcggttatgggcattgcgatggcttctaatctgctgacattcttcttcttttacgagctgctgacgatcgccagttatccgctggtcttgcataagcgcaacgaagaagctctgctggccagccgtaaatatctgatctacactttgatttccgggcagctgtttttggccggactggtggcagtttactgcatttccggtacaatggatttcaaggcaggcggctttttgacaacggatatggcgcctacctggcagctgcagctcatcttcctgatcatgatcctggccgggtcggtaaaagcagctgtcatgcctctgcatggctggctgccggcagcgatgatcgccccgacgcctgtcagcgccctgctgcatgcggtggcagttgttaagaccggtgttttcgctgtcctgcgtatcatcggcttcgttttcgggcctaagcttttggcggatatcgggactgctgatatcctggcctggtttgcggccggcagtatcatcatttcctcgctgatcgctattcagcaggataatctgaaacggcggctggccttttcgacgatcgggcagctttcttatatcgttttaggcgcggcgctgctgtcgccgctcagtatcaaaggcgcgtatctgcatctggtggcccatgcggtcatgaagatcacgctctttatgtgtgccggtgttattattgtcaggacgcaccgcagtaatatcagtgagatgtacggtatcggcaaaaagatgccgatcacgatgtgctgctttacgatcgcctcgctgggtattgccgggatgccgtttctggtcggctttatcagtaagtggaacctggcgctgggcgctttgcagtccggcaagcccttatatgttgcagtactgatcgcaagcgcgatgctggcgcttacttatttgatgccggtctgtcaaatggcgtattttaaaagggacccgcaggaacaattccgtacttatggtgagatcagctacagaatgctgctgccgatctgtttcacaacgattctggcgcttgttttaggcgtgatgccggaaatatccccgaatttctacgcaatggcttcgcaggcagcagatagtatctgccagggctggactggaggtggctggtgatgaatctgacgaaaactgctttgtataagctggttcttatagtagcggtgcttgccgctgtcctggagtttttcttcgctcatcctcattatcacgaatggtggaacactaccccgggttttaatctgctgtttggttttgcaggctgctggctgttgatttttgtagctaaaatagttatgacgccgctgctgcagcgtccggaagattattatgatgacggaggtgacgatgacgatgagtaatctgcaccccggttttatcctgatcgctgtcggattgatagcattgtttgttcctaaaagtctgcgccggccggtgcttgcggcaggtccgcttttgggattaggcgcggtgctgacgctggcgccgggcacgaatgcgacgctgccatttatcaacgggataacgctgcattatctccatgtagacgcgctcagctggatcttcgccctgattttctgtatgatggcggctatcggcggtatctatgcctgccataacagtaacaggatggaagccttctgttcgatgacttatgccggcagcgcgctgggcgtaactttagcccaggactggctgactctgatcttcttttcggagctgatggcggctacttcgctgtttcttatctggtgtaaaaaaactcctgcttcgcggcaggctggttatcggtatttattagtgcatatgctcggcggcaatctgctgctggccggtattttcttaaaggtcagcgccggagattatttagttatgccgctggcacagggaccatgggatactgccttctggctgatctgtctcggcatttccatcaatgcggccgtagtgccgctgcacgcctggctggttgacgcttaccccgaaggtacggtcaccggcagcgtttttctgagttcgttcactactaaagtcgctgtttattgtctgatccgcatttttgcaggcactgacttcctgatctggttcggtgtgctgatggctttatacggagcctgctatgcgatcatggaaaatgatatgcggcgtctgctttcttaccacatcgtcagccaggtcggctttatggtcgccggcgtaggattgggaacggctatggcgctgaacggcgcaacagcgcatgctttcagccatatcctttataagtcactgctctttatgtgtgccggcgcgatcatttatgcgactggtatccgcaaaatcaaccagctgggcggtcttgctaaaaagatgccgtttacgttctggtgctttgtgatcgctgccctttcgatttccggtgtgccgctgttcaacggcttcatcagtaaatccatcacgatcagcgccgccgctgctgcccattacggttctgttgagctgctgctgcagctggctggtgtcggtacgtttttatccatcgccctcaagatgatctacttcatcttcctggcgcctgacaacggcgtggtcatcaaacgtgaagttccgaagaatatgtatgtagccatgggtatcggcgcgactctgtgcgtgttatacggcgtttatcccgagcttttgtacaggtatctgccctttacgatggaaccataccacccctttacggtcgaccatattactcagtctatagaaatgctgggaatggcgatgctgccgttcatgatgtatctgccaaaaatggcgccgcatacagctttatcactggatacggactggttttaccgaaagccttttgcgggcatcgtgaccgggctgtcttatctgtgctgtgcagtaagccgggcgcttggcaatacctgggaggtattatatgaaaaatccatggagctgagtcataacccaatggaatttttggatgccaagcctttgcgcaacagtcccaaatataatccggaaaattaccgtacttcgatcgccgatccgatcatgataacattaacaatattattctgttctctgtgttattttatggcgatcatttaataaaaaataacgaaccgtaccagtatttaaagccggtacggttttttattgactaaatcccgccgctggcgtacaatgaaatctattgatatttaaaggagtgcagtttatgcagctttcatttcgcctgggcgtgatattcattctgctggcagcagcagcctggggactgggcggcgttgccggccagtttttatttcaattttatgatgtaggcgctccctggcttatcgcggtaagacagatcattgccggcgtggtctttttaggctatctgctgtgtcgcggcgagaatatctgggcagtgctgcaggataaagaagatcgtaaagatctgctggcattttcttttctgggattgttaggggcacagtttggtttttattacacgatctcactgtgcaatgcggctactgctacagtgctgcaatatacggcgccgatctttgtcatgctgtggatgtcctggaaaaaccgctgcctgccggaagggcgtgagttcgtcggtattttttttgctctggccggagtttttctgatcgctactcacggcagcctggattcggtggtattgtcgccggcggcgctgaccattgggataatttctgctatttccctggcgttttatacagttatgccgtttcggctgctgcaaaaatattcgacgactttgatcatcggctggggacaatttttatcaggcggatttctctgtatcttcatcaatccttttgagcccagcggccattgggatggtgcggcagtcgctgctatggtctatctgatcctgggggctacggtactgagctatagtgtttttttagtgggattaaaagtagtcggcgctactaaagccagtcttatttcctgtgccgaacctttagcttcgatcattgccgtagtgctgtggctgcaaacgccgctgacggtcgaagatctggtcggcatgacctgcattattttaaccgtggttttattgtcactgcctaaaaaataaattaaaaaaatacatggacggagctttccgtccttttttatttgtcatagtctatggtacaatagagttaacaaaaataaaggagttgattgtatgagcataagtcattattcctataaatatggtcatggcagtaaagagttttctctggagtccgaccgtgttatcaaagaggtcacagttgccaaaatgccattgctggaggatgtcaaagcggcgattttagatgccgtctatcatcctatcggcagtgcgccaatcaacgaactggtcaaaccgggacagaagattgcctttatctgcaatgatccgacacgtgtggccaacagttttgtctttatgcccattctggtcaacgaaatgaataagctgggtatcaaggacgaggatatgcatatcgtttttgccttaggcacgcatcgtaatatgactcatgaagaaatggtcgaagccgtcggtgcagaggtggcagggcgtttaaaaatgtataacagtgatgccaaggtcagtgaggattttgagtatttcggtgatacctcccgcggtacgccggtctggctcaataagcatatctgtcatgtcgatcacgttattatgactggaacgatcgtacatcattatttcagtggttacggcggcggacggaaagccattctgccgggtgttgcagctatggaaaccgtacgtgtcaaccacagctttatgctggatcctaatgcaggtctgggtaaaactgtcggcaatcctgtttatgaagaccaaatggaaggtgtggccatgtttgccaaaaaccattccgtatttctttttaatgcgatcctgaatgctcagcatgaatttttaaagatttttgccggtgattatgtaaaagcacatcaggaagcctgcaaattcgtcgatcaggtctacggtgtcgagatcccgcaggcggcagatctggttatcgccagctgcggcggttatcccaaggatatcaatgtatatcagctgcagaaaacaatggataatgcctggtgtgctgtgcgtgaaggcggggtagtgatcattatcggcgaatgtgaagaaggtagcggttcgaaggtgctggaagaaacctgcaaacgtttgggaacggcagacgctatcaaagccgacttggaaaaacattttgagatcggtgccaataaagctttcgcggtaacacgtcttaccaaaaaagcaaagtttattttagtttcgtcactggacaaagagctggcgcatgatatgctgttcgaagcagtgcctaccgtggaagaagctctggctgaagccgaaaaagtaattggcaatgactataatattattctgatgcctgaaggcagcttaacggtaccacttcttccagcttaaagacaatagtttaaatatcaatttaatttgtatttttataacttatgcctatatttaaaaacgattacaaatatttttatgcaagaaagtattgctttagcctgaggtttaagttataataaattctgcgaatgtattcttagatattaaaaaaactattgcctgctgtatctgcaatttcgtaaatgcagattaaattaaaaggagttgtgaagaaatgaacattgattacaaagctattggggtcagaatcaaagctgcccgtgcgcgtaaaggcgttacccaaggctatatcgcagaagtgaccggtctgtctacaccgcatatcagtaatattgaaacaggaaatactaaattaggcctgcctacgattattcatctggctaatgttctggatgtttccgtagacgagctcctctgtgataatattcaccgcagcgagaagattttccaaaatgagctggcagaattattgcagggctgcgacgcccatgagctgcatctgattactgaactggccaaggttgttaagaaaaacagtctggacggagtgaaaaaaaccagaggccgcaaaccgaaaaataaaatctgagcaaagctttttaaacctgcatttccaaaacctttatgttataatataaatatcagtaaaagctgtagtgaaaaggtggacggaagttatggataaatttgttcaaacagaattagaaggtgccggcgttaatgtcgaagaaactttaagacgttttatgaataatgaaatgctgatgataaagtttctgagaaaatttgttgacgacgaaaatatgaataaactgcgtacactcatcgctgataaacattataatgaggtactgcctgtagcgcatacgctgaaaggcgtcagtggaaatcttggtcttattaaactatatgagattttttccagaatgtgtcaggactgccgtaatgatcagtatgaagatttggacgggctgttcgctcaggctgaagcaaattattctaaagtcgtagaggcgattaaaaaaatttaaatgccagacccggaatttattccgggtctttttttatgttttaaggatttttaattaaagctattgccaagtaacatttgataaagtataataaagcaacaagagtattgaaaaataggaaaccgctaaaaataattgttattgataatttaaagggtcatttgcggagggaaagtatgcagctgaacgttactactgactatgccataagaatagttttgtatttggcaatcaaaaaagagatcactacatcaaaagaaatcggagccgcgatggggattccgaaaaattatgtactgaaaataactcataagctggtagaggctggaatcattgaaagactggtaggagcgcagggcggcttttcgctggcacagaaaatagatgatatcactttattggatatcctcaatatcatggaaccgacaatgagggttaaccgttgtctggaagaggataaattctgcagccgttatgctactgaaaattgtccggtccgcgggttttactgcaagctgcaggaagaactggaaaaaagtttaaagaaaatgacgattaaaaggttgctggcagacgcaaattgaaatttgttgttaaagaaacttataactgaatatggatatttaggcggagtataaaatattccgtttgaataactccccggttacccgttttgtttttttaagcaaaacgggtagctttttttatgcgccgttgaaaaacggcgctttatttttgagcttggttaaagtcagattggtaccagttgcaagactttcagacaagcgtatgcaattacaacaaaatgtcttgcggggggggacaaatatgatagtataatgtaaattaaagaataagaataaaaatagcaatacaatatattaataaaatattaaggaaaaatattaacaaacagataaacaatatagcggataagtgaaaggaagcgataaactggccaaaacataaacttatcactataagtttatataaaaaatcaaaggggcgataaaaatggataacaagaaagctttaagaatggcggtcacactggcgataataaatatgccgcttttagcgcaggccgcagatgtaagtcccgtaaggattacagacggcagtacctacacgatgacagctgattctgtaataaataccggttctaatacaacaggtatttttgtcgggtataaagatggcggtacgattgttggcgataatgtcaccgttaccagcgacggttatggtatccaaatccagacttatgctacagggggcgttgcaggcagcggcgattgtagtattaagcttggtaaaacgatcgttgaggctaaatcttctgcggtacgtgtagactcaagcagctatggtcaaaaggcgacagttattttaggtgccggcagtattttaaattcatcagctaattctgctgtgtacgttacgggtaaagattctctgctccaaataggcgatggcagtacagttaccggcaacagttatggtgctacaggggcagcgcttgcttcctccagcggcggtaagattgaaatcggcaacggtgttacgatagggcacgataatatcagaggctatgatgtcaacagcattgcggtattatcgatggatggcaatgcgagccaaggccaaagtaatattacaatcggcgacgacagtacgatttatgccaaagggaaaggttatggcgcaaatgccgttcaggcgggctatttatcatatactggttttaacggtgttggtactaaacaggggagctccggacagataagtgtaggcgataaggcaactatctggacggaaggggacgagtcctttgctgtctatggtatccatgccgattccacgctttatgttggcaaagatgccgagatcagtactcagggcgataaggcttcggctgtccgcggcggcaatattactaaagtatatgattttactgctgccggcggcaaaatcactattgatgaaggggcagaaatcaaaactctgggggatcagtcacatggtgtagacgcccgttatgacggcactctgatcgaattaaaaaaagacgcggtcataacgacagttggcagtgagtctcatggcgtaacggcgcttgccggcggcacggtaattttacaggacgctgctgttactgtggattcaacaaaagatgcttatgctttcagtgcggaaggtaaagatagtgatacagctgccgtcagtactattaccggcagtggtgtttataatattgtcggcgatatcagggctgcggacggcggcattcttacattagatctggcagaaggttcgcggtttgagggaaaggctgtgctcgacagcggcaatgattcacagagcaccttaactatggctaaaaactcgctgtggactttgactggcaattcacagctcaacagtttgcagaatgaacagtctgtgatcgatatgactggcgataataaggctttcagtacgctgtctgtggaaacgctgacaggtaacggtgggacgatcattatggatattgatggttcccaggttgatgccagtgataaaatttatgtcacaggtgatttcagcggaagccagacactgtcactgaaggagataaatggactcgacagtgatccgggaataggccaggcggcagaaaatactgttttagccagtgtcaacggcagcggtacttttacggctgatgatcaggaaggcactttgtactggcagcgttatgagctgggacaaaaagacagtgctgcttccggttatacgacagactggtatttgaaaggcattacaaatcttaacctgccgacaaccagtgtagaggctatcgctgcttcgggagcactggcttatcatacctggcgcgaccatgatcagctgctgcagcggctgggagatctgcgccagcatggtagagaggaagagggcgtctgggtaagggtcaaaggcggtaagctgagccgcagtgaccagtttgaatttgagaataaatacacacagtatgagcttggctatgaccaaaaattgaagtcaacgccggcgtatacgcgttatgctggtatttccttcagctatttggatggcgacagcagttacagcagcggcagcggcgagaataaagttaaagctttaaatatttacggtacgcagatcggtgctaagggccattaccttgatttagtgttgaaatacagtcagctcgataatgattttaaggtttttgatacctccggcaataagatcaccggcgactatgaccaaaatggattatcgataagcgcggaatatgggcgcaaaaacaatctgaaaaataattggtatatcgaaccgcaggcccagctcacttttggcaggctgcgcggaactgactacaccacaagcaatggcatcagggtagatcaggatggaatcgacagttttgtgggacgtattggtttcaatattggtaaagatatcaatgaaaaaactaatatatacttgaaagctaatctgatgcatgaatttggcagcggctataatgcctcaatggttgatgccagcggtacaaaagcaagactggatcgtaattttgatgatacctggtttgaatatggcttaggcgcagcagtgcagactggtaaaaacaattacttctatgttgatgtcgagcgcagtgccggcagtgattataaaaaagactggcagtggaatgtcggcgccagatggagtttctaaatagttgctttgattttcggcaaggtgttgcaaccctccagcttgcttgagaatatccccagcctccgttccatttttatggaacggaggtttgtttatcgacgggcagtaattaaaatcctgctgagaaaatgagctgttgcaaacagggtatattgacagcacttgccgggttgcgttatactatatggcagagcttattatgctctgaaccgctactgtagctcagctggtagagcatctcattcgtaatgagagggtcgcaggttcaaatcctgtcagtagctccaaaaaaagatagctcaagatttttcaaaactatgaaaaatcttgagcttatttttttataatatattttctggtgcaatcatagaggctgcagcgatttgattattgttgtgagttgctgcagatgtgtttcttccgtatcccaggaatccatcataaataaatatatttttttcttaaaaacaatgaaggcatttgattttacaaaaggaagctgcttatcttttttgtatatttccataggcaaagaggcgttcacaagaagtacataatgagggcctatatttttacagtcggcgaaagtgatattatatttacttgatgcctgtttggtcatcccgataaatgcgtcaaaatattcatttaataattctttaggcatatttctcaaagttgcgttttccttttcgtctataaccggagaaacgcctacccttacagtgctttttttatcgtctgaagccgtaaatatcagcaccataccgccttcctgggtgctcttgtctgaaaggttccagttatcgccgatatcgatcagaaaatcattttcgatatttttatagatcgcggcattacaaatattgttcgtcagtaaaagtatcataagaacaaggaacatttttggcataaattacctcccttttgtagtaatgttttaggttctttcaagtgaatggagtacgttcagtaatctgttcaaaaatcaataccgctattattatatacttacgcaatgaaataaacaatataaaagaaaatgcttgacaggaatatttgctcgtgcgtgttgcgatcgaggtggttctgataattattttaataaaagcatgtccgaaaatggcgggaattatagaaatgttatgatataattaaagcgatttcaagtaaggaggcaaacggtgatgcaggaaaatatcaagggattgtacgcggcttttaaagccaaagatgcccgttttgacggacgttttttcgttggcatatcgtctacgggaatctattgccgtccggtttgcaaagccagacagcccaaagcggaaaactgcacttttttcaggacggccgccgctgcggaacaggccggctacaggccctgccttttgtgcaggccggaacttgctcccgggacctctgttactgatgctacggctgatttagtttaccgggctgcgcgaatgttggaaaggaattgcggcagcggccagagcctgcgggaaatagcagaacggcttggttgtacggacagacatttgcggcgcgtatttactgcggaataccacgtttcccctgtccaatatttacagacctgccgcttgctgcttgccaaaaatctgcttaccgacaccgatctttcagtgctggaagttgcaatggcggcaggatttggcagtctgcgccgttttaacgatttatttaaaaaacattatcagcttgtgcccacagctttgcggaaaagacaggcagaagcaaaaagccataacggtgagatcaccttggctcttggttaccgccctccttatgcctgggataaaatattaaagtttttggcaggacgggcaataacaggaatagaagttgtaaataatgatgaatatctgcgtacggtaaagctgcaaaatgcggaaggccagcagttctgcggctgggtgcgggtcgggcacagaccggctgaaaatactttgagcgttacggtcagcgaaagtcttctgccggtgcttcctgaggtattggcccgcatcaagaatttatttgatttatattgtgagcctgaggcagtatatgaaacgctgcaggtgatgaatactctgcagcccggtttgtgtgttttaggaaccagactgcccggctgcttcaatgtttttgaaatgtcggtgcgggctgtactgggtcagcagatcactgtaaaagctgcaagtactttagcggcaaggctcgtcgctgtgtatggaactcaggtccagacaggtattgaaggtcttacgcacagctttcctgcgcctgcggcgatacttgcactgggagaaaatatcagtgagcatttgggaaaattaggtattatctctgcgcgtgcgaatacgatttatcaactggcacgggtattggcagacgaaaaaaatgattttggattttgcggcaatccggaggaagaaatgcaaaagctgcaggctattcgcggtatcggcagttggacggcgcagtatatagccatgcgggcaatgggctggcccgatgcttttctgccaacggatgcaggaataaaaaaggcgctgccggatcatacgcctaaagaactgcaggtactgtcggaagcttggcgtccctggcgcagttatgctacggttaatttatggaatacattatagaggaggccctatatgtactactctacgacttatttatcgcccctgggaaaaattacgcttgcgtgtgacgcttgcggtaaaaatcttgtcggcttatggctggaagggcaaaagtattatcagggtacgctgaaggaagctttgattgaaaaggatgctgtgccgcttttcgatattgcaaaaaagtggctggacagatatttttccgggcagaagcctgatgtggcagagctgccgctggcaccacaaggcaatgcgtttcgtcagggcgtttgggaaattttatgtacgatcccttatggagaggtaataacttacggcagtattgctaaaaaaatggcagtgaagctgcagaaggaacggatgtcaagccaggctgtcggcggtgctgttggacataatcccatttctattattattccctgccaccgggtcgttggtgcaaacggcagtcttactgggtatgccggcggtattgaaaaaaaaataaaactgctggagctggaaggcgtagatatgtctggattttttatcccccaaaaaggtacggcattgtaatatactaataaaatcggagggaaattatgattacgtataacggcgaaaggatagtggatgcggcatttgctgagcaggtgtatgaggcagtcgcccggatacctcgcggtaaagtggctacctacggacagatagcggcgcaggtcggtgatacgctggctgggcgtgaggtagggcacatcatgagctgcgctccttctggacggaatttgccctgtcacagggtcgtgaaccgtaccggggctctggcacctgactatgctttcggcgggcaggaaaaacaacgtgctttgctggaagcggagggcgtaaccttccttgccgacgggcgaatagatatgacgctgcatttatggggcaaatatgaacaatttaatatttttgatatgagctgacaggccggtcgatatttcaaaatgctctgcagtgaaaatgttgacaaatatttaaacagatgctaaaataaccttgtttttacggaaacacctcggagggcagtactgccggataagagatattctcttatccggtttttttattagattaaaggaggaaaaataatgcttacggaaaacgcttcaaaaatccagcagaaatatttaggcgcaaagggtttgatcgtactgatcgctgtgatgaatatgtttgtaccgttgtcgatagatttatatctgccggcactgccgacgataggtacagaatttgctgcgacacctttgatggtcaatttgacgctggtcagttttttcttctttttcgcagtggggattctgctgtttgggccggtaagtgataaatacggacgccggaagattttactgctgggaatagttctgtatacgctggcaagtggtctgtgcgcctttgccggcagtatttacagtctgatagcgtacagaatcgtgcaggctttgggtgcaggcggcatggttgctgtgtcgatggcggttgttaaagatgctttttatggcaccactaaaaatcgtgttttggcgctggtgcaggctatggccgttattgcgccgatggtcgcccctgttatcggcgcatttctgctgcagtttgtcagctggcgcggtaccttcggggtcctgatcgccaccggtgctgttaatctggccgccagcttcttttttgaagaaacgctgtcggaaagcgaacgttataagggcagcttttggagtaccttcggcagattggcagttgtcggtaaaaatgttggttttactggtgtactgactgtattttcactgctggcagcaccttatatggcttacgtggcagtatcttcctatgtttatgtacagtattttgggcttagtgagcaggtctacagttatttttttgctgctaactcattttttgccgttgtcggtccgtttttatatatgaagttgatcgggatcgtatcgccgcgtcaatttacctatggctgttttatttttactgtagtagcagcggcagcgctgctgacagtagggagtatttcaccgtggtggtttttaatagcctttttaccggtcacgatcatggaaagcgctgccaggcctttcagtacggccatattattggatcagcagaagacggatatcggctctgcctcgtcgctgatcaatgcggtgaatactgtttttggcagcttgggtatgatgctgggtgcattgaactggagcaattttattgaagggctggggatcattaccgctgtttgcgtcaccttggcaattgcgggctggctggctctgctgcattttaaaatcagggtagaaggtttataaaaatcagtcaaaataaaaaatacctgccgttaatcaacggcaggtattttgctttgcagcgaaaatttcagtcgctgcctataggggaaagatgcccaagcaatccactatttaacgatcaagaccggtatttccgcatacatggcaactttggagctgacgctgccgaggataaattctgcaacagcgttcatgccgcggctgccgatgaggatcatgctagcttcggattttttggcggcggtcaggatttgctgcgcggcgttgccaactaaagtttcataatgaacgggaactttggcggcagctgtctgtttttttgctgcttccattaattcctgaccggccagttcatataattcattggtttgtttgaccatagcggggtttaactggttcaaaatggtcgatcgtttgctgtaaggttcgattacgtggactacttttacttctgcgtcaagcttaccggccagattgataccataagcaagcactttactggacgaatcagaactgtcgatagcgattaaaattttctctttcatataaatccctccctgaattttgcatcctgctctttacttgactgttcttcttttctttaatattattataacaacaataaaatcatacttaaaatacttatttttgaaattataatacctaaaaagtatgaatggaggaatacttatgaatttgcagcaaatgcggtatttcgtaatggtagcgaggctgggcaatgttacagaggctgccaaagcgctgcatatcgcgcagccgcctttaagcagacaaatcaaacagcttgagcaggaactgggcgtggtgctgttcgacagatcaggccggcgtctgcatctgacagaaaccggtcatatgctgctgcatcgggcagaagaaatcttaaatctaacggatcggactgtatgtgaattatccagcagtgagctgggacaggagggtattttatcactgggagttgtcccttcgatgagcctgatggtattaccgcagatgattgccgcttttaaagagttgtatcccaaaataacctatcggttgttgatcggcgaaagtttacgggtgatcgaactgctggaaaagggggtcattgaaactgctatcgttcatttgcctgtggacgaggattattttgcaagctataagctgccaactgaacgcttggcattagtctatgatgcggcgttttttccgcagctggaggggacttttgaactgcctgtaagcaggctgcaggggctgccgcttttatgccaccgccgttataaggaactgttggaacagtctgctgctaaaaatggcatccaggcatattttttctgtctcagcgatgacagtaattatctgattgcctgggcgaaagccggtttgggactggccgttatcccagaatcagcagaagcaatcgccaggcatgaagggctggcctgtgtccgtatggacgacccggaactgacgactacggcggcagtggtatgggggcgcaagcattatcactcgccgacaacacgtaattttatcagctttataccgcagtattttgaacagtgcaaaaagttctgctgagtgctgttgactgtagatcagagaaaatataaataaaaagcccccggaatttttaagattccgggggcttagtttttaattatttccaggccggtaaaatggtgccctggaagtgttccataatgaatttttcattatcagctgattggtaaatttctttcagtttagcgatccggggatcgttttcattggttttcttggttacgaagatgttgacaaacggattgtcagcagattccagaatgatggaatctttggtagggttcaggcctgctggaatagcgtagttggcattgattacagcaaaggtaacgtcgggcaggctgcggggaatggtagctgcatccagttccaggaatttgaagttatgtggattttcggtgatatcggcaacggtggtagtaacgtttttgatatctttgactttgatcagcccggcattggcaagaactaaaatcgcacggccgccgttggatggatcgttaggaataccgattgtggcgccgtcaggaatggcgtcgccttttttcaaagttttggagtaagcggccatcgggaagttaacggttttgaaaacttctaccaggtcaaatttaggctctttttgcagagtggcatctaaataggggcggtgctgcatgctgttggcaaaaacctcgccttggaacagtgctacattaggagttacatagtcgttgaattcaactacttcgattttcagaccttgtttttcagcaagttttttgacattgtccataatttcagcatgagggcctgcagtaactgcgattttgataggcgcatcgccggcaggagcttttgctgcttcttttttatcgtcgccgcagccgaaggtggtcagggcagctacgcataaagctgccgcggtcagtattttagctaattttttcatgataatttcccctttataagatgattttatagtttgtttttattaagctttttggaaaagtagtcgccgagtgactggatagattggaccataacgataagtacgacgacagtgatcagcataacgtccatttggaaacgctgatagccgtaacggatcgccagatcgcctaagccgccgccgcctaatgtaccagccatggcggaataaccgatcaaagcgataacagcgagggtgatacctaaaacgatggaatgcagtgcttccggcaaaaggaccttgcggataatctgcatggggttggcgcccatggcctgagccgcttcgataacgccgtggtcgatttccagcagcgaagattcgatgatgcgggcaataaagggtgcggctgaaatagtcaaaggtacgatggaagcggtagtacctatcgaagagcctactaaaaggcgggtcagaggaatgatcgctaccattaatataatgaagggagttgagcgggtagcgttgacaatagcgcctaaaacgctgtttacaggagcgttgggcaggatatggtttttacgggtgacggttaagatcacgccgagcggtacgccgataagtgtggcgagtattgtggaagccagcaccatatagcaggtttcccaaaaggatttaagtaaaagagctaacatttcaggagacataaccgatcacctcaactttcagctgctgttcatgcagatagtgcagagcatttttgatacctgcggcgcttcctgaaatctcaatgaccagggtgccgaagggtatatccttaagcgaatcgatattaccgtagatgatattgatatcgacatcgaattttttgaccataccggaaacgatcggatcgccggctgagttaccgatgaaggataatcgcacgatcagtttgctgccttcggtgtagactgcgctgattgaagaagattgcagcagtgcaggcagttcgatattgttgatgcttttgacgaaatctttggtagtgggcttctgcggatcggtgaaaacatcgatcatggaaccttcttcaatgatctcgccgttttcgataacagctactctgtcacagacttctttgactacttccatctgatgtgtgatcatgacaatagtcagattcaggcgtttattgatatctttgagcaggtcgagaatagattttgttgtctgcgggtccaatgccgaggttgcttcatcacacagcagtactttaggatcgctggccagagcacgggcaataccgacacgttgtttctgaccgcctgacagctggctgggataataatcgccgcggtcctgtaattgtaccagctccagcagcggctgcacccgctttttgatttcagactgcgaaataccctgtatttccagcggaaaagcgatattatcataaacagtgcgggaggccagcagattaaagtgctggaagatcatcccgatattttggcgtgctttgcgcagttcctgattgttcattgcagtcagttcctgtccatccacaaagacctgaccgccggtaggtacttccagcatattgatgcagcggatcagggttgatttaccggcaccgctgaggccgatgataccgaatatttctccggcgttgatatgcagatttgttttctttaaagcgtggatatcacctgcattgctgtaataggttttttccacattgcgtaaatcgatcatacagcgttcctctttcttttctaaaatcgtaaaaaaacccttcacacaggtgaagggtaacgaaagcgtttcgtactgcttcatctgtcggatttacatccgttggatttggcaccgttcacgtcgtgatggttgccgtagcttcatagggccagtccctcggctactcttgatgaaataccgtttgaagttgttaaacaaaataatacacttacaatcggcacttgtcaataaaaattttaaaatttttgtaaaaaaccttgcctttcacaagataaagtgataaagtataaaagaaaaaaggtgctagcaccagctaaatttaaggaggcaatcatggctgcaaaaaccagagaccatttgaccgatcaattatttaaagcgattcttagcttaaaaagtgaagagcagtgttccaacttttttgaggatatttgcacgatcagcgaactgaaatccatggcgcagcgtttggaggttgccagaatgcttgatgcaggctgtatttatgaagagatagtagaaaaaacaggcgccagtacggcgacgatctcacgggttaaacgctgtttggtttatggcgctgacggatataattcgataatgccattattaaaaaaggaagacaagcacaatgctgaataataaagctttgcaggtgccgtatggaactagggacgtacttccgggtgaagccggcgccagaaggataattgaaaataagcttgcctctacctttaaagcctggggctatgacgaagtggtcacgccgacttttgaatatctggatacttttgccgcagcaggtcagctgtcagacagcagttttaaattttttgaccgtcgtaataatattttattgctgcggtcggacatgacgactcctttggcgcgtttggtagctactcggctcaatgagggaccggcggtaaaacggcttttttatctggcgaatctatttcgctatgaggaaacacaggccggacgccagtgtgagtttaatcaggccggtgttgaaatgatgggtgcggccggaccttcggcagatgccgagatgctggctttagcagtagcttcgctgcaggcagcagggttaaatgattttgtgatcagtgttggccagatcgattttataaatggcctgattgaagcggctgaggtcactgaactgcaggcgcaggagctgaaacgctgcctgatcgagcatgatgtggtacggttggaagcgttggcagatggcagcaggatgtcaccggaacaaaaagatttgtttaaagagctgccgtttctgcatggcgggctggaacttttagataaggttgaagcctgtggtttgaacaataaaagctccaaggctgtgcaggatctgcgcgaaatctatgctttggccgaggtctatggtgcggctggttatctgcgttttgatctggggcttttgcgcgaccttgattattatactggaatgttatttgaaggctacgctgaggatatgggtttcccgatcattggcggcggccgttatgatacaatgatggaaaattttggcagatcctgcccggcaacaggatttgctatagggatagacaggatcatgttgattctgagtcggcgccggcagctggacaatatcagcagctgggatgttctggtggcctggcaggcaggctgtctgccacaggcgatcgcgcagtgtatgcgtctgcgcaggagcggcaaaacagtgaagctggctgccgagccttttaaccagagcgaagcagtggacgcgcagcgtgctaacgcctgcgatacgctgctgtatatcgaagattgataaaggaagtgccgtaatggattatattaccgtagcgttgccgaagggcaagctgtttcaaagatcagtagagctgctggctaaagtaggctatagtgctgataacgtaactgaagattcgcgtaaacttgttatcagtaacgaggatagcaaggtgcgctttataattactaaaactgtcgatttgccgacctatgtagaatacggtgctgccgatatcgggatcattggtaaagatgtgctgctggaagaacgcaaggacgtatatgagctgctggatctgaaatatggacgctgtcgtttgatgctggcagttcctgagcagatgcagcggcccaggctgactgattatgcgcatctgcgggtagcaactaaatatccgaactgtgcccaggagtattttcgcagtctggggattcagaccgagatcatcaagcttaacggctcgattgaactggggccgatggttggattgtcggagctgatcgttgatattgtggaaacaggccgtaccctgaaagagaataaattggtggaggtagattccatctatacggcgacagcaagactgattgccaacagggtgagctttaaattgaaatttgaccgtctggataaactggtccgagatttgcgtaaggtactggatgaggaggaagagcaatgcaagtaacagatgccagaggaatgagtgctgttgaaatagcagctttgatgcagaaaaaagcttttgatgaatgtgagctgtcccccggagttcaggcaggtgttaccgctatgtttggtgcgccgctgacagcagcccaggtcgtcgaaagaattgtgactgacgtaagggccggcggtgatggaaagctgctttattatactaatctgatcgataaagcaggcttgagtgtccaaaatatccgggtcagcaaggctgaatttgcagaagcccgacaatcagctgatgccgaagtggtagaagccatcgaacgtgctattgcaaatgtgcgtcgctttcacgaagaacagctgccaaaaacctggctgactaaccgtgaatgcggtgctatgctgggacagaaggtaactcctgttgactctgtgggtatctacgtccccggtggaactgcggcttatccttcttcggtgattatgagtgctgtaccggctacagtagcaggagtaccacggatcgtgatggcagtaccgcccggacgtgatggcaaagtcaatccttatgtgctggttacggctgaattaataggtatcagggaaatttataaaatgggcggtgcacaggccattgctgcgttagcttttggtacggaaactgtaccaaaggttgaaaaaattaccggcccgggcaatatttttgtgacgctggctaaaaaagctgtttacgggcactgcgacattgatatgctggcaggtcccagcgaaatattgattatagccgatgatggcgctgatcctaaatatctggcagctgaccttttgagccaggcggaacatgatcctctggccagcgctattttagttacggacagtgagctgttgggcaatgctgttgcagcagagattgagatgcagcttgctgctttgccgcggcaggagatcgctgcattgtctttagcaaatcatggcaagatcattattgcgtctgatatggaaacagtaattgagatggcgaatatatcagcaccggagcatttggaggttatgacgaaagagccttttgctctgctgccttatctgcgtaatgccggtgcgatctttttgggcgcttattcaccggagcctttgggcgattattacgcaggaccgaaccacattctgcctaccggcggcactgcccgtttctactcagttctgaatgtggagacgtttatgaagaaaacaagtatcattgcttatacgcagggcgccttgactgctgtgggcagtgacgttattaaaatggctgaagcggaagggcttcaggcgcatgctaacgctatccgcgtgcgtatggaaaagaggtgaggagatgactggatttaatgccaggaccggcttggaagaattggaagaatatgctgtagaacatgtggctgccgatattatcgtcaatgccaacgaaagtaattataatctgccgcggccgattgagcaggctgtagcggcgaagctggccgggtttccttttaaccgttatccgccgatgcaggctgaaacgctgcgcgggctgattgctgaagatctggcgctggatgcagacaatatcagaatcggcaacggttccagtgaacttttgcaaatggcctgttatgcttttggcggcaatggacgtaaaatcgcttttccgtatccgtccttttctatgtatggcgtttataccaagcttgccgacagtatagccgcaccgtatccgctgacgctggcgggatatgtcgatccagataaggtcatcgaattttgcagggcagagcagccggcgctgttgattgtctgcaatcccaacaatccgacgggaaattataatccgcttgaattaatggagaagattttagcaaatgtcagctgcccggtagtaatggatgaagcctatatggagtttgctaaaggcagcggcgttgatccgcaggatctgcgcccgctgaataaattaaagctggtagcaggttctactttggctctgacaggtaaatacagtaattttatgtgcttgcgtactttttctaaagcttacggactggctggactgcgtgtaggttatgctgtcggcagtgccggtatcatgcgtgttttgggaaaaacactgctgccttatcatgttaatgcctggtctttagctgtagcggaagaggtttaccgccaaaaagacttatataaagaacaactggaaactattatcgagcagcgtgatctgatgcgggaacaactggagcaaatgggcttgaaaatctggccgtccgcaacgaattttctgacctgttgcccgcagggcgaactgactgcccgtttagcggctgcctgcgagcagcaatatggcagccagggtgaaaaaacacagcagatgctggcaggaatgtacttataccgcaaactgctggagaagaaaattttggtgcgcgattataccagtcatcctgtattgcagggatgcctgcggatcacggtaggcctgccgctggaaaatgctgaaatcatcagccggctggagctcttatgcggagaggaggcaatatgatgcggcaggcagttaaagaacgaaaaactttagaaactgcggtcagtgtcagtattgggcttgatggcagcgggaaagcggatatcgctacaggcgtcggtttttttgatcatatgctgacactgctggccaagcatggttttcttgatttgcaggtgaaagcacagggagatctgcaggttgactgtcaccatacggttgaggactgcggcatcgttttaggagaagctcttaaagcggctgttggcgataaaagcggtattcaccgctatggcagttgttttattccaatggatgaggctttggcacaggtagtactggatttttccgggcggccgtacctggtttttgaagccgaaattcctaaaataactttgggtaactatgatacagaaatgactgaggaatttttccgcgccgtagccgtggccagcggcatgactctgcatattcgagtcttgtatggtaaaaatgtacatcatattattgaggcggtttttaaagcttttgcccgtgcgctggcagaggcagtagctgcagatccgcgcgttcagggcgtgatgagcagcaagggggctttatgagttcgaagatagtcattgttgattatgggatgggaaacctgcacagtgttaataaagcgatcgctgttgttggcggcgacccggttatttccagtgatgccgcagttattgcacaggctgataaactgattttaccgggagtaggggcttttggcgattgtatggctaatctgcagcgcagcggtctggtaccgatactgcagaaatatttgcacagcggcagaccgtttttaggtatctgtctgggaatgcaggttttgtttgaaggcagtgatgaagctcccggagtgaaaggtctgggctattttcaagggcaggtgcgcagactggatacagctttgaaaataccgcatatgggctggaacaagctgagtttacgcagcagttctccgctgctgcaggaagcaggagatgaatatgtgtactttgtacacagctttcatgttgaaccgcagcagcaagagctcattactgccgtatgtgattatggtatggaagtaacggctgccgtcggcagcggcagtgtgcaggcttttcagttccatccagaaaaatcaagtcgggcaggccttggcctgctgcgcgcttttaaggagtggcagccatgataatttttcctgctatagatatccgcggcggccgctgcgtcagattgacggaaggtcgttttgaccaggaaactgtttttgctgatgatccttcggaaatggctgcccgctggtcggcagccggagccgaatatttacatgtcgtcgatttagacggtgctttggccggtgcgggacgtaatctgcctgcaatccaaaaaatcctggagcacgcttctatgccagtgcaggtaggaggcggaatcagaagtctggcagctgtagcagaattgctggaactgggggtcagccgtgtgattcttggatcagcagcagtgcgggaaccgcagctggttgctgaagcctgtcgggaatttcctggtcaggttgttgcaggtatcgatgctaaagacgggaaagccgctatcgaaggctggggtgtcagcggtggtatcgatgcggtagagttggctctaaaaatggctgctatcggggtcgagcatattatttttactgatatcagccgcgacggtaagctgagtggggtgaatgtagaagccactgccgctttggcaaaagcctgcggtgttaaagtcattgccagcggcggtgtggcatcgttggaagatatacgccggctgcagcagcggtcctcctctgggatcgagggctgcatcatcgggaaggccatttataccggagctgttgacctgcgggaggctctgcgggtcgcaaaggaggtctgagatgcatactaaaagaattattccctgtctggatgtaaaagaagggcatgtagtcaaaggcactaattttgtggaattgcgtgatgccggtgatcctgttgaactggcggccttatatgacactgaagctgccgatgagctggtttttcttgatatcactgcgtctgtcgagcagcgtaagtctatgctggatgtcataaaccgtacggcgggacaggtttttatgccgctgacagttggcggtgggatcagcacggtgcaggatatccgtaatgctctgaatgcaggtgctgataaaatttctgtaaatacggcggcagtaaaaaatccgcagctgattgctgatggtgcaaagctgtttggcagccagtgtatcgttttagctgtagatgcaaaacgctgcggtacagataaatgggaagtttatgtacatggcggacgtactcctacgggaattgatgtactggactgggtcagaacggcggcagaattgggcgccggcgagattttactgaccagtatggatgctgacggtacaaaaaacggctatgatataccactgacccgggcggttgccgaagcggtgaaggtacctgtgatagccagcggcggcgcaggtaagttggaacacttctatgatgttttgacggaaggtaaagccgatgccgttttggcggcatcagtctttcattataaagagtttactatcaggcaggtcaaagaatacctgcggtctaaaggtgtagaggtgagattataatgcaagtagatttttctaaaataaaatttgatgaaaaaggcttgattccggccattattcaggatgcagcaaccaatgccgtgctgatgctggcctatatgaacggcgaatcactggcgaagactgtggaaaccggttatacctggttttggagtcgcagccgtcaggagctgtggaacaaaggcgctagcagcggccatgtgcagaaggtcgtcagtattgattatgattgtgatggtgacagtctgctggtaaaggttgaacaaaaaggtgcagcctgccataccggaaattattcctgtttcagttatccattatggaacagcggtgcaggcagaaatctgccggtacctgaaccggatggtattcacggtattttggctgaattgtaccgcgtcattcaggacaaacgcgtccatggcggcgaaaaatcttatacccgttacctgtttatgtcaggacaggataagattttgaaaaaggtcggcgaagaagctgcagaaactatcattgcttccaagaataataacggcaaagaggttttgtatgagatgtctgacttgtggtatcattgtttagtgcttctggcatatcataatatcaatccggcagaactgctgaacgaattgggtggtcgccgcagtaaagaaaataacagtaaatattaaaaaaagaaaccttctgcagtctgcgggaggtttctttgcttaaaatttactgctgacagttttattttgtgctacaatgacaagtaagaaatacggggataagaaggtggaagcatggaaaaaacggttttagttatcggtcaccgtaatccagacacggattcggtctgttctgccatcgcctatgcttatttaaagcagcagctgggtttgaacgcagttccggcacgtgcaggcaagatcaatccggaaacacagtttgtgctggaacattttggcgtaccggtaccgaaattagtagatgatctgtatccgcggttaagtgatatacgcctggcgcagccgccgacagtggggccagatgcgtcactgcgtgatgtgggcaggctttttgtagagcacgaaggtttaaaatccgtaccggtattggatcaggaaaataatatcgtcggcatcattactgtcggcgacctggcgaaacgttattataatgagctgtcaattcaagatctggacgacggcgaaacagattacagaagtattgtccatactttagatggtcagctgatctgcggtgatctgacacatacctttaatggtaagatcaaaattggggcttcggagcctgaaacacttagcacggcaattaaaaatggagatctggttatcatcggtgacagagttgaggcgcagctggcagtactggaggccggcgccgcaggtttgattctgacgcgggatacggaaataacgccaatcgtactgcagacggccctgcgttataaggctgttgtcatcagcacgccttatgacacttatactacggcccggctgatcaatcagagcattcaggtcaggctggtgatgacgaaaaaccttgtgactctgaaaacgacagacttactttctgatgtcagagaaaagatgctggcggcaaaatttgtcagttacccggtgttggagcgtggtaaatatgtagggatgatggatcgtggtatgatgctggttcccgatcgtcaggaggttattttagtagaccataatgaacgcagtcaggcggtggaaggcattgaagaagcgcatttgctggaaatcattgaccaccatcggctgggcgggctgacgacaggcgcgccgatctttatcagacaggagcctgtaggttcaactgctactatcgttgccaaccttacctggcacagaggtatcgaactgccgccggctttggcaggtattttatttgcggctatagtttctgatactttgtatttccgttctcctactgcgactctttttgaccaggatactgctaaacgtttggcagagcaggctggcatcgaggatgcggaagcttttgcgatggaagtactgcgtcatggttctgctattggtacgatgccggtgcaggatattgtgcgtaatgatattaaggaattcgattttggcgaacaccggattacggtcagtcagatcaatattatggatcggcagcaggctttagaacggttaggagaactgcagaaagctcttaatgaatttcgtaagcaggaaggttatgacctgtcgctgctgatggttactgatattttgggtgaagcgacagatcttttagctgcaggaagtcctcagacacagcttgttcacgcttttggcgaagctgctgcggaaggatgctatcacctgccaggcgttttgagccgtaaaaaacaaatcattccgcccttgacagaagcctttagaaaacaggactgaattatagaaaaaagactgcttcttaaagaagcagtctttttttactgttaattagcagggaagaaaggccaaacaactgggattacaaccagggatacgataaaggctacgataacgaggccggtaccgcattttacgtagtccatgaatttgtagccgccggggccaagtaccaaagtattcggaggagtgcctaccggagttgcaaaagcacaagaagcagcaactgcgatcgccatcaatactgctttcggatcagcgccaagctgtttagcaatagcaataccgatcggacacagcaaagctgctgaagcagtgttggacataaattgggtcagaccgcaggacagaatgaacagaatagcggtcactactaaaggagacggacttccgcccatcaggccgacggtccagtcagctatcaaagcgccggcgccggtagtatccatagctgctgaaacaggcatcatacctgcgaacaggaagatggttacccagtcgatagaagcataagcttgtttttcggtcaggcagccggtcagtacgcaaacaagcgcgccggtgatagcagcgatttccaaagatacgccagggataccaacagccatggtgatgataaccaaagcaaggatgactccggagatgatttgtttggtagaagaagtggaagcggcttcgatttcctgttcaatttcctggtcagcggaaagatctactttcggaagcaggtatttgcctacgaacatcatgtacagcataccagcaatagaaaccggaataccgatccaggcaaattcaaagaagccaaaaggttcaagaccggcagaggtcatagcgccgactgcaataatattaggcggcgtgcctaccatagtaatgataccgccccaaccgcaggcaaatgccagaggcatcagttgacgggaagcggggatcttagctgcggcacaaataccgagcgcaactggcagcaggcaggctgcagtaccagtattggacaggcaggaagataaaaccgtaccgaccatcattaagccaaacatcaagctgttctcgcctgtaccacacatttttactactacaccgccgattttttgagcaagaccggtgtagaacatggaagcacctacgacgaacatacctgcaaacaagactacggtagagtcggataaacccgagaatacctgttttgcaggaataaaacctaacaggccgcaggaaatcgcgcctgccgttgcagtaattgccaagggaataagttcagttacgaataagagagcaactactgccaacaaaattaaacattttactgcttgggacatattattcctccttttaaaattttaaaatgcgttaacagaatagcaaattttgaaaatctcctctgttgcgacggcaacatttttacgtaaaatttattataattattcattttcgcaaaaaaatttacctggattttacttatttcttagataaatgataggaaatatcaactttagataacctatttaaaagaaaaaaggtaattgataaaatgaaaataaataaataatttttaataattagccaatttatatgcttgccgttaaaaataattagaatgattaaaactatataaggtactatagtaataaaaagaacgcagatattttatctgcgttcttttagctttcaaataaggtttttatgccgccagactccactgtgccagcgataaataaatatcagtgcccttaaacattcatccatcatcatagcgatccagatacctatcaagccaaaatcgaggacgataccaaaaaagtaggcacctgatacggaaaccagccacatggaaagcaagcctattgttacaggacctttgatgtcaccggcagcctgcagtgacatgaccataaccatgttgacggcacggccgatttccagaaaaatttcaatgagaaagatgtggcgtcccaactccagcacttcggggttatcagtaaagataccatagatatggtcgctgttgaaatataagagcgttgtcagggtaccgctgatcagcaccgctaaccgcacagtttgccagactctttggctgactgcttcctggtcgccgcggcctagaagaaaaccaacgatgatttgcgtcgccattgccagagcctgcgaataaatgtatgagaacatagcaatgatataggcatatattttggtcgttatgactactaaacccatcagattgacaaatttcataatcaccatctgcgacagctgatacgaaagcgactcaccgccggaaggcagacccagatagaggatattgtgcaaagtttttttgggaaaaggacgaagatatttaaaagacaagggcagattgataaaacgacggaaaaaatatagaatcagcagcagacccagtactttactgctgttggttgaaatagtcactcccaatactcccaagggggggatgggcccgaagccatgaataaggaaaacattacagataatattgataacattcatgatgatagaagtcatcatcgttacttttagcagtgaataaccgcggaaaaaagaaataaaagagatgtatactgcctggaccactataaacaagccgatatagcgtagaaataagccggcttcagaccggatgtcatcaggtacggccagcagatcaagaaagaagttgtcgaaacaaaacagaattgaactgatgataagtccgaaaatgaagtttgttaaaagagctacggtacaaacttccgtgactttttccttattaccggcaccacggtattgggcaatcaggattgttgcggccatacttattacgctgagggcaataataacgatgttgatgatttgattggcgttaccaacggcagcaacggatttttgagaataatgactgagcatgaattgatctacattgccgaccatcatctgcagcaaaatttcaatgaaaatcggccaggtcattttgaaaacagaaagcttggccgcggtagtttcgatagaacgcattgtcaaacactcctgaaaaaataaatctgccttcctgaaggcagatttgacccaggaaggcaggcgtctttgcttgcgtcatacattatagcacggtgcttaacctactgcaatatttttgagttatattttacaattatattgacaagtaaggctgttttctattataatcttaattgtcttgggggcatagctcagctgggagagcgcttgaatggcattcaagaggtcagcggttcgatcccgcttgtctccaccaattgaaaatgtagaatccatgcagactttacggtttgcatggattttttgttttgaaaataaatgggttggcattgaaagttgaatggcaaaaatataaaattatcgtaataaaggcaggcttccagtaagtttagcaaccttcttttttgagccgcagattgcaagaccaaaatattttaaagcgctttccggtacttgagtcattttttgagtaaaatcatcataagttttacagctctgcgctaaatcagaaaaatcaacaacgagcaggtcatgaaaatcgtcttgatagagttgttccctgatatatttaagtttttctgcagagcttttcaagacaggaacagggaattttataatgccgagatgactcttttctgtctgatcgcttacatcaggaccgactgcttcaggcatggttttgcctagggttatccccaatatcacagcagtatttgcaataattcctaacggcagcgcttcgtcaacgacgatgacacatttttcattttgcagattcataataagcctcttttctatacaatgttttataagctccaagcattacaaaactattgtaacgataaagtaaagaggtgtcttgtagaatattggcaatgaccaaaatattgcgttgatatattagaatagtgattataaaaactaaaaatttgacgacgctaaaaaacagggagcacgatttgtcttaagtctctttatagccatctgccaaaagatcaagtttacccgtatgggggtcaatgataagtccgtggataggtatatcattgggaataaaaggatttgccttaagttttttaatgactgtaagtacatttttggcggggtcggtgtaaggatcaagccaaacttgaaaatctttttcaatcagttttaattgctgctctgagacgcctctgcttctcatattatgtaatatgtcttttgatgatgtcagagcgacaccgcaatcataatgtccgactatgaaaatttctttgatatcaaaaacatagatggttagcaaaagactttttacggtttctcccatttctccgattaaagaggttccggcattttgaattatttttgcatcgcctcggtggatgcccagtgctttgttgatcagttcaacaagtctggtgtccatacaagtgagcagggcaaactttttctgcggatatttggatatttcttttgtatacttgttatttaccaaaaattcatggttgtttgtcaatatctcttgtagcagcgttgccattttatcgcatcccctcggtttttgcacttttttaaatgaagtgtattttatttaagattatcagtgaaattatcatatttttattttatcatttatcaactgtttttgaaatgaaagatatttagtaaggttttgtttacatttgtctatacagaagtggaattattaaaatacgtgcattattgtacttagcatagaaatataaaacaccgcagatttctgcggtgttttatattttaattatcaatagattattttgcagtatttttagttatctgcaacaagtaatttttcatagttttccagctgcataggacggtaaaaataaaatccctgcgaatatttacagccaatttcctgtagtgttatggattgtgcctgtgtttcaacaccttcacagattacctgcataccaagctctccggccatatggattacgttgccgacaactattttttcacgcatacctgtaactccgtggcttacaaagctgcggtctagttttaaaacatctgcagtcagttgctgtaattgacctaaagatgaataaccggagccgaaatcgtcaatggctattttgaattgcatttctttaagtatctgaaaaacctctgcaatagtcgttgattcttccaataggacactttcggttatttccaattctaaaagatggtgcggaacattccaacggtcagcgatttcacagattcgtgcagggaaatcactttgttgaaaatgtagtcttgaaaaattgcaggaaacagggaaaagcggatagcctttttctgaccaagtgcgcattgttttacaaacttcttcaaacagccacaagtcaacttttttaaccataccgtttttctcaaagatagggataaatacgcctggcatcagaaaacctttgtcaggatggttccagcgaattaaagcttcgcttcctataatggagccatctttcatagaaaccttgggctgataatagactacaaattcattttcctgcagagcctgatctaagcggctttccaactgttgtgctaaaagtgcctgagcacgcattttttcatcatataaaacaataaaactgcctggagtatcttttgcgtagcgtcttgaataattggctaaatcaagtttttgatgaaggtcaatagtagcatttttttcaatcagacaaacaccaaatacgaaatcaattttataaggaatatcggttttcgctttacgccagcaattcagctttttaacaaagttttgcatgcgtttgtctaagtgttcccagcaattatactttagcaggagagcaaaatggtcggaggatatccttccgcagaattcatcatcttccaggatttcctgtaatattttaccgctggcttgcagtacctgatcacccgtagcaaaaccaaagttatcgttgataaatttaaactgacaaatatcactgtagagtaaaacaaatgactgctgttttttgggggtattattttcttccttctttttccagaaaccattataaagtacaacaaaagactgttgtttggagggagtgttattttcttcccatttctgatagaatccgttcatattataaagaccggtcagttcatccttatacagcagatcctgaatacggcggttactgcgtaaagcgtttcttaaattactgcctatcagcagaattattatgctcaggaccagtatcacaatacagcctacctgccaaagatgctgctcaataaattccagcatactgacttctttggtattggcagaatgcgttacaagataggcgtctacctgctctgtaggaagatattggatacacttattaatgatcgaaaacaacttcggatcgcccgacgcagataatcctacacacatttcattgattggctgagctaaggttatagtgcgcataccctggtaagctgatctgcttagataagcgccggcaacatgagtgtttgtacaggcagcatcagctttattgtgcaaaactgcgttaagacagtcttcgatagaaggatagtatttgaaggtataatatggatttgctgccttgatagcttcagaaagctgatacccttgaggcaaagcaattacttccaatttatctgaatcgtatctggtgatcattgaggtaggtgcacgtagataataaagtgtggaattgatattgtttctaccgtcccaaaggtaatcaccgtcagataaagccaaagcagatattttcccctgctgtaaaagttgcagagcttcagtttgattatgtgcttcaaattcaaaacgcagaccgctgtttttggcaataaattcaaaaatatctgcagttacgccagtaatttgcccgctttttttactctggtatgttaaaggcgcaaaagaagggtcataagatactaatatcggtgcagcctgttttatatattggagttcttctttagtaaaaacaggcttttggttaacgcttggggcaagatacttatcatacaaatcccggctgtaaccaggattagccaatagaatattattcatggccttgttgatttcagacagtaactcgggatttgtcttggttacggcaaaatataaaggactgggagaaaactgggctacactgcggaaagtactgttttttccaaggtgggtaatggcaacaccgtccagtgtaccattatcaagtgcctctaaaagtacacttgtttcgtcataatcaataatatttaaaacaagattatgctcacggcaaaaacttttaaacctttcgccgtctactccgccgcggataatgccgacattcatgccctggaaagctttaaaatcttcataatcatagcgtggatcattcatacgaacgtttagggtagtataaatactgcacattggttggccggaaaagaaaatttcctctgcccgctgttctgaatgataaactgccggcagcagatcgatttcacctttaaccagcatatcatatgcagcattccagcttgcaatatcaaccatttcgaaaggaagtcctgattgtttggaaattttttgtagatattcaatattatatccgctatattctccgctttgacttttggacatatagtcgccgtcctcataatagcctactttaataggacttgcatctgcggctgcggatagtggtggcagcaccagaacaaacaataacatgactgtaaaaaataaagctattgtttgtttgatcttggtattcatatatatacctcgcccataattacctaatttttactgcaataagattaaaataatttgttataatataaatattgtatcattaataatagaaattttctatattttgttatggttttatagtataaaaatatattagtttttttatagtggtttgttagcttttagtaagtgattatagaaattgacaaacgatttggaacgggcaatagaagcttgcagcataaatcagaaaagtctgcagttaaaataaatagaatcagcacataatctctgatagtcttttgattaaaatataaattctaataaatgtataataaaatacatataatttaattatttttaatattattattcgaaataattgcttttttgaatcattagtaggataatagattaaaatagaaactaaaatttataataggtattattatgactggaagagtggggagatggacaggggtgaaaaaagaagttgtaattatgctttatgtcttgtctcagactatcggatgttatgctgctaaccagcttccaagcagtgacgtccagcagaatgggatgtctgataatatgcttaataatcagcgtgtcgttgtacataaagatgatatttcggaacatgcggaaaaatcgcagtcgatggtgtatgttaaaagattccaacttgatgttagtggaatagaggagcgtttgcccccccccaaggcacttttggaaaaatacagtggacgcaatttggctgttaacgatttgcagcagttgacgaaagctttatctgtctattacagaaaacagggatatcctgtggcaactgcatttttacctcggcaggatattgtggctggtattgtaacaattaaggtttttcctggggtattggataagttaagagtgaaaaattctacaagtctggaagatcgttttgtggaagggtttttaaaaaatttatatgctgggatgcagttacgcagtgatattttagaaatgacgctgaataatctgaatgcattgcccggtgtgcaggccaaaggtgttttagagcctggtgataagattggcagcagcagtttaacaattgttttagaggcatcgccaattgtggaaggcgctgtttatactgacaattatggcggtaaatattctggacgttaccgttacggaatgcaggtcattgttaatgagccgctgcgcagcggagacaggtttgttatcggcgggatgcttagtaatgagaagatgaaaaattataatttaggctatgaaacagcagttaatagaacgggaggtcgtttaggtatcagctgcgcggagtcggattatactttaggggattattttacgcaggcaggtgctgtaggaacggctaaaacggtgagcctatatggttcgcagcctttaagcggcaggaaatcaggaaatttacggttgatttacggctatgagcataaccgtttgaatgatgaactgcgtgtttttgattatacggcacgtaaaagcagtgatgtgtttcatcttggactgactggaagtctgcaaagtgctgttagttatagtggttacagtgctgtcttacgtgccggtaatttaaagctgcgcagcggggaagctcaggctgctgatgaattcagcaggacggaaggcggctttaaccgctttaattttgatgttaatcatgtcagtaaattaagcaaagtgacacagttctatatttttgcacatggacagctagcaaaccgcaatctagacagcagtgaacagttttatctggggggtgctgatgcggtgcgagcctatccgcagggtgaagcaggcggtgacagcggttatcaggcaacggcagaattaaggtatcaaactccggtcaaaggtatgagtatgacgttgtttgctgatgtaggtgaggttttggcacgaaaggacggagatacctccgatccgcatcgcaggctggcaggttggggtattggcgcagtttatagcttggatcgcagcttgtacgcaagactggattatgcacgcaagataaagggtgaatcttatcgcagtgaggcggaagataaaaacggcaggttatggttcaggttatacaaattgttttaagaatatcgtgagcggaaaagagcggattaagatgaaaaacaggcagagactagggaaaacaacggtcgctatagtagttagcactttggctttttctaattgcgcatggggattgccacagggtgggacggtagttactggtaacggcagttatacgtccagcggtaatcagatggatattaccggtacaggcaatgtgtcggtcaagtgggatagttttaatgttgctgctggagaaacggtaaattttaagaatatgaacgctattttgaattatgttaccggcagacagggcagtgatatttttggcgctttgaatggacaaggggtacatgtttttttgatcaatcccaatgggattttgtttggtaaaacggcacaggtaaatgttggttcgctgacggcttctactaagagcttatctgatgtcgatgcagctttacaaaattttaaaaacagcgctggtatcagtgattttgggatagcgggaactgctgagcttgtcaatatgggtaaactggaagcagacacactgcgttttgagggcagccgtatcgttttagatactgataatataaaattgggcggagatgattttgacggcagcaatgctgttattaacggagattttgccaatggtaacgttgtgttggggtataccgctcatgatgctaacggttatgcaggtaaggataaaaattttgatatcaatggcggagctcagagtgtaaaaggttatatgtgggtgacaaatgctgagcagctgcaggacattaatactaatctaagcggcaattatgctttaaaaaatgatattgatgctagcagcattaatagttttatacccatcagcgctgacagtacgtttaaaggaacctttgacggtctggagaatgagataaaaaatgtaattgtaaatggtggaaatggaagctacaaagggttgttcggacaaactgcaagtggcagtgtaatcagaaatcttactttatccaattgtaatattagtggataccaggctgttggagcagttgtaggtcagaataacgggttaattgaaaatgttgcagtaagtggtattgtttcaggaacaagtaaatataccggaggtattgttggcattaatgcaggaataataaagaatgctgaagttgatataacagtaaataatactagcggcggttattccggcggcattacagggtataattataagggtcttggggagattgatggtatagttggcaagataaaagttattaatagtacgggtggttatacagggggcatagttggctataatgctggaagtgttaaaaatgtagatgcagaaattgatttgactggcggcggtgttgggataggtggtattgctggacaaaatacttctacaggtactattgatggaattttactaaaaggaaaaattgatgctggaaataatagtgctgtaggtggtattgccggagctaatacaggtattataaatagtgtccataactatgcttctgttagtggcaatagtactgttggaggaattgttggacagaataatgggaatatctctgacggtatcaatgatggaagtattaagggaaatgaacttgtcggcgggatttgtggacaaaataaagtaaatggttatgtatataatattgaaaatagaggttttgtaggcggagctcgtgaagtaggcggagctattggtgaaaataacggaactgtgagcaaagcgcttaataaaggaagtgtttttgtaaccgatggtgtgagtgttggttcaagctattatattggtggtgtactaggttataatgatgctgaaggttccaactatgtcagtgaattaaaaaatgaaggtacagtaaaaggttatagttatgtcggcggtgttattggctgtaatgcttctggacaaataattgtcgatgccatcaacaatggtaacattagcggattagatagtgttgggggaattttaggatattattattgtgatgatgatatgcttttagagaataccaataattcagggacaataacaggaagaacagcagtaggcggtattgttggtatggggggcggcgtgtctatgtcaggacctcccagtgccggtattggatgtgtatctgtcagtagggctgaaaacagtggtgctgttagcggtagcggtaatagtgttggtgggattataggagtaggtacatcttctaaaagcattgataatgtgttaaatacaggtacagtccaaggcagggaccaggtaggcggaattattggtaattctgttgaagggatagtagagaatgcactgaatttagggcaggtcattgctacagacggtaatgcacagtattgtggtgggatagtaggatggggaccaggtgcaattgtttctgataaggctgtttatgcgacgaccgataaagatggcaatacttacgatatttctaagtataacgacaaaggtgttggcaaggcttatgcagatatctttccggcaccgccactaccgcctgatccaccagaactgtctgaagatgagcatgatattactaaactgcctgaatttgaggataattatcatagtagcagctctgctgtaacttctgagctgcatacccctgtaataataaatccaagtggtgaaaacacgaatattggtgtcggaacaattgaaatacataacagtgatgacagcctgaatgcaagtggttctggcagcagttttagtgctggtttcgagaatattttagatggtgccggtcaggaagaacaagctgacagcaattctcgcagttccgatacaggcgatgtgcaaggtagtcagatggataatctggctggtggtaacgatactgatttgagtatgtcttctgatagtgataccgaagatcaggacgaatagaataacgaagaaaagtaattaaaaactcacatcttccggggtgtgagtttttaattactcgtaattcgcatattgcttttctgaaaaccacttatttgtacggtgagtactaataagtagaactatagctataacaagccgtaattttatataaaatatataattatttcatataaatagcaaaatatttgaaatataaaaaataataaaattcattaattttaagtgcatttacatatttaaagacatataatttctttgcatgtataattttattttgtataaatgagtaatatagtgcacgtatgtgctgtattttatacagcaaatgcattttttttgtaagataataagtataaaactaatatctataaaagtttaattgttaaggtgaaaaaagtcatgtttgctgagaaatatagaagtataggcttaaatattttatattacagaagactgaaaggtttaagtcaggaagcattgtctattaaagccggtttgacccgttcctatatatcaaaaatagaacgtggtgctgccagatgcggtttggaagtattttttcttattgcacaggcacttgaggtagatccggctgaacttatcagcgatctgccgccaggaacagaatcggcgcaaaaataaatttatttagtaacaggtgatgaaggaggtatctttatgaatcccgattataaggaaattggtaagaatatcaggttaatgcgtatcagacacggtatcagtcaaagtgaacttgctcagcgtttagatgtttcgcagacgcatatgagcaaccttgagcacggccgcgtcagtgtcagtctgagggtattgctacgtttggcgcatttctttaagtgcagtgtagatacgctgcttggcagtgttttacagggacatgttgtaccggaagtaaataatgacggttacgatattgaggatctggctttgttgctgaaggttttgaaacaaaaaagagtagaagtgatgtaaacaaaatacgaaaggctgccgcagtttttaattgcggcagccttttttatgataattatttgcattgcagccattcgctgatgacggcaaataattcttctagatgaaacggtttggtaatatgagcattcattcctgcttcacgttcttttttgatgtcatccaggaaggcattggcagtcatagcaacgatcggtaggctctttacatccttgcgtgatagtttgcggattgctttggttgcatcgtacccattgagtttaggcatttgtacatccatgaaaacaagatcgtaatggttttcaggtgcctgagcaatttttgtcagtgctgcagcaccgtcagtggcctcttctatcatggcaccggtcataccaatcaactcacaggcgatttccatattgagcggattgtcttcaacaagaagtatccgcttgccgctgcagttaggttcattagcagcagatggcagcagatgctgtgttctggttgtgtttgtctgatgcattttgttgagtacctgtgcaaggttagtagcaaacagaggcagaatcaggagtgcgtcaaaagaatagtctttaatggtctggctgagatcggaaaaggtgattgccaaagctatctttaatgttgatgacagttggcgtaatccgtttaacattgtttccagatccagctgtgggttatagactatgattgctgtcgtatagtcactgcttgtttttatggcagctgctagtttgttatttgcttctttaagactgtgtactgcttgaccggtaatttgcagttgctgtagctgctgcaggatattagaggcataagtttgatcatggtcgatgaccagggcctgcagttcggaatgaatggcagaaaccgggacgggctgcttgtcagccagcttcagtggcagggtgactgtaaaggtggttccagagcctgcagcactggtgacttcaatagtaccacccatcaaatcaacaatatttttagtgatagccatacccaggcctgtgccttcaatactatcagtatttgaggtttgggaacgttcgaagggagtgaacaggtgcggcagaaattcctggtccatgccaatgccgttatcgctgaaaacaaaacgaaagtgtccataccctgttggcgccagcgttaattgcttgatctcgagtttgagctttcctcctcgaggcgtaaatttgatagaattgctgaggatattagtgaagatttgattaaggcgtacagtgtcacccagcagatattcgtcactgatattatatgtctctacatgcagttcgtgctggtgttcttttaactgtggattgatgagtgagatcagattgtgaataagctcagccagattgagcggcgattccttaagtgataatttgccgctttcgatcttagacatatcgagaatatcatttatgagctctaaaagatgattggaagccagctcgattttgctgaggcagctgttaatacgaacaggatcgtgcaggtattgctgcgcgattgtagtcataccgatgatggcgttcattggagtacggatatcgtggctcatatttgacaaaaaagcgcttttggcggtattggccttttcggcagaaagcagggcagcttttaatgcctgctgttgtctttcgtaggccagtttttgtgtatggatattccggaaagcgataacgcagcctgtgatagttccttcggtatttttaatggcctgagcttccagacgtacccattcgtatttgtcgttggcaaaacgccgcagcaactctatttcgacagagtttttattgttttgagtcaatgttgtataaatattttctaaagcaaaagcctctgataactgtttgcggaatttcacatgaacaaaattattgacgaaggtagtccaggcttcggtatgatcttctaatcctttcagcatattggcagtgatgatttcggtaagccgcagaatataaaatctatgttcctgcaggtcgacataatatactgcatagtacatttcagccagcgcattggcgatattatgatggcgcattctgtcggcgctgagtaatgcaagttcatgttcctgctgttttttatcgtcgatgttacgcagcagcagcatgattttttcgccttcgattgtagatatcctggtactgtaataggtataatagtgaagttttttgtttttatcccaaatacgcagttcaccttcggcataggtttgtctgctgtaaagtttggcatcaaagatgcctgacagaagcgctttatcactgtccagcagctgttggtggaattgggcatagaaatcacggtaacggccacgtttttgcagcgagagtatctcttccgaataatggatacagttataaccctgatgctccatatcgacgctgattgccagtgcatacatatgcgcaactgccattttggcagttttttcactgagtgaatgttcgactttctgggtcaggtcttcaaaggccagtaccgcataaggataagcgtcagagtagcctggtgccggaatgatcttgacactgagccaaaacccctgcttatttttaaaaatatgctcaatccggttattatcgttggcaaactggtcaatgatgtaggtgctgttggtaatttttaagagtgtctgctgccatttagggtctacaaattcgtttacatacatagaaaactgtttatcatagcattcttccatatgtacgatttttttgaactgttctggcacacgcaagccgcgtaaagtgttattacttagattaacaaggtaaactgcataatattcttcacttaactgagcgatccaggcggtctgttcgcgttggctcaactcaaattgtttttgtttttcaatattgcggtagcaccataatactttcaggtacccggtttgagcatcaatagtagatacgagatgagtttcaatccattcaaagctatctggcgcaacaagacggcgcagttcgccaacgatatgcatattttcctgcggcatattctgacgcaggctctttgttgaagtcagttcccagaatttctgccggtcttcaggatggataagcattttaccgtaaagatcattggcctgagtaaagtcgccggcatgaggaaatgccgaagcacaagggccgagcttcggagaaatataacggtcgtcgacaagatcaataactacatattcgtcaaagagaacatcgatgccctgcaggagatctttggaatggtcgtgcctgatcttgacttcgccggcaaaaatatgaggtgtgacagagattgctaaggcaggaatctgtctgccctcatcgtcccaaagagttcttttcactcggacatctacgttgcttcctaaaatagatttttcagcaaaatactgataatcaccctgatgaaaattgacggcatcaaagctgagagtgtcaggatgatagaatacacctctcctgaaacctgcttttgcagcagtctgattgcagtaaagtatctgcagagttgactgatctacgacgaataatgttagattactgatatcgttgataagtttgaggacgtttctttcggaattcattataaataccttccgtatcctttataattgaaggaaaacttttataaactaattataatataaaaatataataaagtgaaacaaatattgtggtgattattacaattaaaacaaactccctggacatatttgcccagggagtttgttttaattttcagcagtacctaatatttcgttggctaaggcagaaaggcttttgtgatccaactcagcaaagaacaattgtcgggaaggatggggtgtcatttttttggacaaagcggcgttgtattcggcgccgcgcttaaagtctgtttgctggcattccagctcgctttggcaatctgcaaaaagtccggcgcctttttctgtattgacgaggaccagcgtaacacccttatcgtcatcaaaaatcgggaaatgcttattgacgccccaatagtcggctatcgtcagatcagccaggctgtgtttattgttaaaagcgcagtcggaacaggaagggcgagtactgacattattcaggaataaacgcatatatggaccgcggcgtttatgtgttgcaaagatatggttttcagtttgaaaaacgatattaaagcgtttccaaccgggagttttatcgcggaaattgacttttattaccggtgatgacgaaagctcggtgacttcgtccagtcgtttctggtagactttgggactgggaaccccatggcagactacgtcaatggtataaagcctttcatagtctttacgcagatatcctttcaagcctccgatctggcacggcgtaccgctgaataaaacagtatggcctgcctgaagcagtttttcggcgtcctggtaggtagtgctgatatcgctttgtacatatttggaaccgcgtaatttattcattgcattgacgcttgtgacagcgatatgtctaacgtgccagttgtcgtcaaaggccgccccgaagactgtcccctgacgtcccaggattttttcggcagcgagggagaaaaaaccgccgctggagctgacaaagcgaacggcttcgtttttatttttacagccgataacagctaaaatctcatgaggttgaggtttgtgcagcagaggacaaacgcgttcacacaaaccgcagtggatacatttgtcagtatcgaccagcggataattgaagccttcttcgtctggtgccatagtgatgcaggaggtcacgcagcgactggcacaggctccgcagccgcagcagtcggttttgttggtaatggtaatcataatttcaccttcttaaacaatttttgaagcttaggaatgctgtgaaaaatagtttaaaaacagttgggcgacattggaaagtggacgtcctttaacaatagatagcgttttattaaggaatagtctgtcatcgcggatgatcttgcaaatcagatcgttgtcaaaaatttcacccggtgaagccggtacgacggcgatgccggcattttcttttgcccaggctattgtagacagtttagtagaattaatgctcaggatctgcgggaagatcatggaatcggaacaaacgtttaaaaataaagtcgaacagccgcgtgacaggcagatgggcatatcttccatatgtgccaaaagcagagctttgtcgtctgccggcagccagggattgtctttgtgcattactgcaacaaggcgctcctgcttggtatagatagtatcaaaccggctttcctgtgtcagcggagcattggcaacgccaatctccgttttcccggtcagcatctgattgatttgctccaagatggaaacttcgtacagctcatagttgatctgcggatattctttggaaaatttgctgaggtaagtttgaataaaggaaatcgacatcgaaggcgacaggctgactcgcagagtacctgtatagccgttgacgcagtccgatatttcccgttgggtatcatcttccagcgaacagagatatttagctttgttataaagaatgcagccggcattggtcaattctatattatgtacgccgcgacggatattgactagctgagtgccgaattttttctgcagcagcttcagttgattactgagggccggctgggcaacgtgtacgcgcttggatgccgctgaaagacttcctgcttcgacgatggcaataaaattgcggtaatattccatgtccatagtctgctctcctcctgttactggcaatataaatttaagtttaagctgactgtagtttgtttatcgtttaactacattatagatgataaagcagcttaaacctatctttttctgaaaaaatttttataactttagataagcatataaataaaacttataaattatatcaattattttgatgtttaaagatagatattgtcaatgaaaatggcaaatgttgttagaatgaattttttataaaagtaatattacatcaattgaattttatgaatagaaataaagaaaagtgtaattttaaactcgaaaaccaaatttaaacatatcaaataaattaatattttctattgctttttggtattttacgttataagtttccggaattatactgaaagtgaagaaaggtgtatgagaaatttaaatctgggaaagaagggatgaaaatgttagacagcacgagattaagaaatccgcagttgtttgacaaaatcgttactccggaagaagctgcggcgctgattactgatggaatgaatgtgggcgtcagtggttttaccccatccggctatcctaaaaaaacaacgatagctttagccaaagctatcaaagaaggtaaacgctgccgtatcaatatctggagtggcgcttctgttggtccggaaattgaagaggagttggcggcagttggcgctataaaaggcaggatgccgtattatgccgcgtccaacaaaagcatgaaaaagggcatcaatgaaggcaagattgaatatgtggaccaacatttgagccatttcggacagcaggtagattatgggttttttggtaatgtagatgtagctatcattgaagctacggcaattactgcagaaggtaatattattttaggtcctggtgttggtaatgcgccgatttttgtgaagcatgcgaagaaaatcattatcgaagtcaatacttcgattcctttgaatctggaaggtatgcatgatatctatattccggcgatcccgccaaatagaactgagattccaatttatcatgcgggggacaggataggtaaaccttatgtagaatgcggtatcgatcgtatcgattgtatcgtggagtctgatattctggatcatgtgcgtgacttgactgctcctgatgcagcaagcatcaaaattgctgagaatttggtggaatttttagagtatgaacaaaagatgggacgtttgccggagaaaatgctgcccttgcagtccggtgtcggcagtattgccaatgcggttcttttaggactggccaaatccagatttgaaaatctggaaatgtattccgagattttacaggattctgtattccgtctgatcaagctgggcaagatcgctaaagcctccggctgcgcgttcactccttcgccttcggtttgggagatgtacaaggaagatcctgatttgtatcataagagtattgttttaagaccgcttgatatcagtaatcaccccgaggttatcaggcgtttgggagttattgccatgaatacgccgttggaatttgatatctacgggcaggctaattcaacgcatgttatgggctgcacgatgatgaatggtattggcggcagcggtgattatatgcgtaacggtttccttacgattttttcaacgccgtctacagcgaaatgcggctcgatttccagtgtagtacctatggtcactcatgcagaccatactgaacatgacacgatggtttttattactgaacagggtgtggccgacatccgtggtttgagtcccgtcaaacgtgctaaagctatcataaataactgcgcacatcctgattttcggccgcagcttttggaatatctgaggtttgcacaacaaaaaaacgcccatatgccaattgatttggcacattgtttcgatatgcagaaaaaattttatgaaaccggcactatgctgtaaacagcggagcggaatgagaaaggggtcaatgacatgactaattatgaagaaatcaaacaggggctggcggattatgaagcaaaggttgctaaagctaatgccaaatttcctgaaagaaaagagtttaaagaaaaacacgtgtatactcctttggatgtagaaggttttgattactgctctaaaagcgggttccctggacaatacccttttacacgcggcgtacagccgactatgtatcgtgggcggttgtggacgatgcgcgcttatgcaggctttgctacagccgaggaaaccaatgcccgttataaatatttgctggaagcaggtcaaaccggcctgtcggtagctatggacctgccgacacagatcggacttgattccgatgcggagctttcgcatggtgaagtcggtaaagttggcgtggctattgattcgctggctgatatggaaaagctttttgaaggtattcctttggataaagtcagtacttctatgactattaacggcccggctgcagtgcttttggcgatgtacgttgctgttgccgaacagcagggtgttaagccggaacaattaaaaggcaccattcaaaatgatattttaaaagaatatattgcccgtggcacatatattttcccaccacggccttcgatgcggctgattacagatacttttgaatattgctctaagagtattccaaaatggaatacgatcagcgtaggtgcttaccatattcgtgaagccggtgcttcctgtgtacaggaaatcgcttttgcatttgctaatgcgatggcttatattgatgcggcaatcaaggccggacagaaggtagatgattttgctcctggtatttcctggatctttactgccggacttaatatgtttgaggaagttgctaaattccgtgcggcacgccgtttgtgggcgcgcattatgaaagaacgttatggtgctacagtaccgaaagcacagatgctgcgtgtgcatgtgcatactgccggcagtgttctgactgctcagcagccgcttaataacgtagcccgtattacctggcaggcgttgtctgccgttttaggcggtattcagtctatggcctgctgtgcttatgatgaagcgattgctttgccaactgaagagtcggctactctggcactgcgtactcaacagatgctggcttatgaaagtggtattaccgatactattgatccgctggcaggttcctattatgtagaagccctgacggataggatggaagcagaagcttatgaatatatcaagaaaattgatgctatgggcggtgctgtagctgctatcgagcaaggctatatgcagggggaaatgtcggctcatgcttatgaagatcaacgcgatatcgaaactaaacggtctatagttgtcggtgttaataagtttgttgataataaacaactggcggaacaggatgttctgactgctgaccttagtgttgctgaacgccagattgccaaagtcgaaaagatgaaagacggacgtgatcagaaagccgtcgatgctgctttaacggcgctgaagcaagcttgcgccggcgaagaaaatttgatgccttatctgattgacgctgttaaaacttatgccactttgggagaaatatgcggcgtgatgaaagaaatattcggagaatatagacaggacggttccatgttctgatctgactgacaggttgtgagtgaaagaacggagttgattgttatgacaacgaaagcattggctgattttgtggcaagcgtacaatatgataaattgagtccggaaacagttcggattacaaagcagtgtattttagattggctgggagtctgtattcgcggttcgcaggaaaaaccaatccaaatcattcgtaagttgctgctggatggcgggggtaaggcacagtctacagttttggctggacagacggaacaaactactgctttaaatgctgcattttgtaatggaagcgcttcccattcacttgattttgatgaccttcataatccatctattatacatctggctacagtagttgtaccgccggtatttgccattgctgaggcggagcataaaagcggtaaagatatgttggcagctgtagtagcaggatatgaggttggcggccgcgtaggcgaatccgttatccctgagtcctatttattctggcatactaccggtacagcaggtaccttaggcgctgccgcttcggcagcgaaggttttaggtcttgatgcggctgcgacgctgcaatgtcttggcagtgctggtacacaggcggcagggttgtgggaatttttgaaagagggcgcaatgagcaaaactctgcatgccggtaaaagttcatatgccggcgtactttcagcatatctggcccgtgctggttttactggtgcgacaaagatattggaaggagaaaaaggcttttgccgggctatggtcacagagccgcatttggaaaaattgacggatgggctgaatgatggtatatataagattgataataattcgttcaaaccttatgcctgctgtaaacattctcatgccgcgctgtatgcgatgcaggtgctgcgtactgagcatggattgaagcctgatgatgttgaagcgatagagattttagtcaatgagatcactgattttctgatcaataatcctcagcctgaaaatccgtatggctgcaagttcagtatccaatattgtgttgccgggatgctcaaatacggcgatatgggtgttgatcgcttcctgacggaagttattggtgatgctgaagtccgtagcttgatggcgaagaccaaggtcatgcgtgatgctgcgatcgaggcggtacatgctgctgatgctgcaaaactggcatcaaagcttatcgttcgctgtaaagatgggcgagtattggagttacaggtagattttccgaaaggagatccgcctaatccgatgagctgggatgaaagtgttgcaaaatttatgtctttggctgctcctgtttacggcgaagaaaaaacagccaagctgtgcgggcttatcgataatctggaagcaagcgcagattttgcagcagacctggctgaatgtctggcataagacggcgttaaggaggaactccctgtggttgaagcggaaaagatcaaagcaaaggtcagcgaaatttattcgcataataatttcatgcaggagtgcggtatttacatcgtagatatgtcttgcggcagcgctacagttgcagtaaaagtagatcctgagcggcatgctaatcttaatggtatggcgcatggaggactggttgcaacgctggctgataatgctacaggaattgcaggtgcaacgataggtaaaagggtagtgacatcaactattgctacagattttatcaaaggtgcaccggttggtacgacgatcagcgctacttcacggataacacacgctgacgacagattggtaaccatcaatatcgaagtgcgcgatctggacaatgatatcctggtggctaaggctacagcggcgatgattgtagtggatacattcgctgggattcctgaaaaatggtaataagagcagggagtattattcggttgttgtgtcgttgcagttaaatattgctgtttgggcattagcagaaggcaattttgtaagagtgtacagtttgctgtgattttctaaaaaaggcggcttaagccgtcttttttgtgtttatttcgataccgaaagtagtatttttgagaccttgtttaaatattgcaaaagaaagttttctaccaaatatggttgcatgtgcaaaataaaacacaacatctagtaatttttggctttacattaacaatgcgctgtgctatgatgataatgtaaattttacgcataaataataatttttgtttggcgttaacgataagaaattatgaaagaaggcgtcagttatgaaagtaatcaaacgtgatggcagtactgccgattttgacagcagcaagattatagttgctatccagaaagcaaatcaggtagtcgaaccggaagaccgtatcgatcaggaacgtatcgaagctatcgctcattatgtggaaagtaaaaaccgcatgcgtcttttggttgaagatatacaggatatggtagagcatcagcttatggacgaggggaaattcaacctggccaagtcttatattatttaccgctatactcgcgctttggtgcgtaaggctaacacgactgatgaatccattttatctctgatccgtaacagtaataaagatgttatggaggaaaactctaataaaaatgctgttatggcttctactcagcgcgatctgattgccggcgaggtttccaaggacctgacccgccgtctgatcctgccggagaagatttctaaagcccatgatgagggcgctatccattttcacgatgctgattacttcgtacagcctattttcaactgttgcctgatcaatgttggcgatatgctggataacggcactgtaatgaacggtaaactgatcgaaagcccgaaaagttttcaggtggcttgtacagtaatgactcagatcatcgcttcagtagccagcagccagtatggtgggcagtctgtcgatattcgtcatttaggcaaatatctgcgccgcagctatgaaaaattcaaactgacgatcaaagctgaggtcggtgacagtgttgctgatgaagttgtagagcgccttacaaaaagacgtttgcaggatgagctgcgcagcggtgtgcagacaattcaataccagattaatactttgatgacaacaaacggacaatctccgtttgtcactatcttccttaatctgcaggcggacgatgaatatctggaagaaaatgcaatgatagtagaagagattctgcggcaacggttggaaggcattaaaaatgataaaggcgtttttgtaacgcctgctttcccgaagctggtttatgtgcttgatgaacataactgcctgaagggcggcaagtatgattatattactaagctggctgtaaaatgcagcgctaaacgtttatatcctgactatatctctgctaaaaaaatgcgtgagaattatgaaggaaatgttttcgcaccgatgggctgccgtagttttttggctgcctggaaggatgacgaaggcaattacaaattcgaaggccgtttcaatcagggtgtcgtatctttgaatttgcctcaggtggctattttggcacatggcgacgaagaaaaattctggccattgctggatgaacgcttacagctttgttatgaagctttgatgtgccgtcataactcattaaagggtattcgcagtgacgtcagtcctgtacattggcagtatggagcgattgcacgcttggaaaaaggcgaagttattgataaatatctggaaaaaggctattctactatttcactcggttatattggtttgtacgaaatgactaagttaatgaaagatgtcagccacacaacacctgaaggggaagaatttgctttgcgcgtgatgaaatatctgcgtgctgcctgtgataaatggaaaaaagaaacagggttaggttttgccttatatggtacgcctgctgaatcattgtgctatcgttttgcccgtattgacaaagaacggtttggtactattgccgatgtaacggataaaggctattatactaattcttaccacgtagatgttcgtgaggatatcgacgcctttagtaaattcaattttgaaagccagttccagcgtatttcttcgggcggcgctatttcctatgttgaaattcctaatatgcgccataacctggaagcaatggaagatgttgttcgctttatttatgacaatattcaatatgctgaatttaatactaaatcagattactgccatgtgtgcgggtttgatggtgagattatcatcaacgatgatttggaatgggagtgccctaactgcggtaataaaaatcagactttaatgaatgttactcgccgtacttgtggctatttaggtgaaaatttctggaacgtgggtaagactaaagaaatcaaatcccgcgtcctgcatctgtaagcgggaggcgttataaatgaattacgctacgatcaagacccatgataccgccaatgggccgggagtgcgtgtgtcgctgttcgtcagcggctgcactcaccagtgcaaagggtgttttaacccggaagcatgggactttaattatggtgctccttttacagaaacagaggaagatacaatcgtcagaggattggagccctggtttatccgcgggctttcgcttttgggcggcgagccttttgagccgtctaatcaacaggcacttttgccgttgctgcgtaaggtacgtaaggcttatcctgaaaaaacgatctggtgttataccgggtatgattttgaacaggatcttcttacgggtcgtttatgtgattggccggttactgaggagttgctttcttatatagacgttttagtagacggcgaatttaagctcgatttaaaaaatcccaatctgcgttttcgaggcagttctaaccagcgcgttattgatttaaaaaaatcgctgtatggtgatgaactggttttatggtcagaagcttattaaaattaaaaccccttccacatataataatatgggaggggttttttgtatgatatcgtaactaaataattaaaatatataatttgcgtagcttgtctcttcaattaaatagctttataatattatcaatagataataattttaattttgatgtggagtgaagtgcatgttaaatgtgtttaaaaataaactttcacagattcacaagcaaagtaaagaagcgaaagaacttttgcgttttatcggacctggtattttggtaacggtgggatttatcgatccaggaaactgggctgctaatttggcggccggcgccgattacgggtattctttgctgtgggtcgtaacgttatcaactctgatgttgattttgctgcagcataatgtagctcatctgggcatcgtcacaggtgaatgtttatcggaagcagcgacaagatttttacctaagcgtatttcacgtccaattctggttactgctattatggcggcgcaggcaactgctttagctgaaattttgggtgcggcgattgcacttaatatgttgtttggcattccaattatggctggtgctgtgattaccgctgtcgtttgcacactgatgttgtggacaaattcctacagtcgtttggaaacatggatagcgggttttgtttctgttattgccatgtcttatttatttgaaatttcaatggtacatgttgattggccgcaggccgttgtcagctggactgtgcctaatattccagcaggctcgatgctggtggtaatgagtattttaggtgctgtaattatgccgcataatttatttctgcattctgaaattattcaaagcaggcattggaacctggaagataaggcattgatggaaaaacagctgcgttttgaatttgtcgatactttattttctatgagtatcggctgggcaatcaacagtgccatgattttgctggccgctgcaacattttttgttcatggagttagtgtcagtgaattacagcaggctcaggagctgctggtgccgcttttaggtgagaatgcagcacatatttttgcaatagcactgctttttgcagggattgcttctacaacaacggcgggtatggcaggtgttactattttttcaggtatgttcggtgaatcttacgatatgaaggatattcattcacgtgttggtttgctgctgacatttgttcctgctgttatcgttttatatttcatcaatgatcccttctggggattgatcgtcagccagatgctgcttagtgtgcagcttccgttgactgtatttatgcagatttggctcacttcttcaccaaaagtaatggggacttatgctaataagccttttactaaaggtctgctttatgcggtaggatttattgttacagcactcaatttgtatcttttatatgttagtttgcaataaaataatgatgcggtatgaattaaaacggttcagcttagctgaaccgttttaattattaatctgtcagtttttattgcccagctgctccagcatggtagcaacgctgaacggtttattttccagtaaggcatctatgcgcatagtaatcaacggatgctggctaagtctgcgtgctgtgataagtgccgcccgcaatgctggtgtaagctgttcgtgtccccattcttcaagaatgatagaagcagcgccgcgcggccaatcgtaaatagaggtcaaagcggctgtgactataggaactccggtaccagggtgcgtttccaggtatttcagcgggatcaaaagcgctgtttctgattgtgtataggtattgatgtttttttcgataaaagtcaatactttctggggacgttcatcgttttcaaagcctagaagataaggaaacaaagcactttccagagggtgctgcttaagataatcgaaaagacgttcccatatatcaatatccagttcaaaggcaaattcagcagtagtgtaatttacgctgccatcttctttgaataattgtgcttgcacttcctcataccagtcgcggctgtaaatcagtttttcacagcggcttaccagttcgtggctggcgttagaaggtaatgctgcccagttgctgtcggtgataagcttttgcagtccaatggaaatgtttattattccaatcaggtcagcaggagttttatcatatcgttcagcatggcgcagaagctcgctgatcagagtcttagaatcgataccgctgatatcaatataagttggatcactgtttccaatatagtaacggtcaagcatcataataaaattattaatgatcaaaagacagccacggtaagttttatagtccagctgctctttatgcaaatggtgtaataactgtcccttacgcattactaccagacaaatcggagcataatcgatttcgatttcacaaccgtgccgaagcagccaaatttcttcttcttctgtagtgcattcaagatcatagagggtgaatatacgtccccagcctctggtagagcgaacaagttcccatagctcgtcctgtggtgcaatattattgatacggtaggcaaaggtaaggaaaaaagtgaattcttcacagcggcaaagatcgactaaatcatcccaaaggttttcggaatgttctttgcgcagcttctccagtccaaagactgctaagatgacgattgcatatttaacaagctcacgtttatgcgctgtatacagccagtcttcggctaaagcaagcagtggttcgggaacttcgtcttctgacagcagttctacaagcggatcacaaacactgacacataaaatttttatcaatgcttcttcaagaaccgcttttgcagtagcagaaggttcatcagcataagccagcagcatactgcagacggcttcagcacctggcaagtcaggcggcatttcggcagtatatatataggcatcatcgcttcctaatggccgtggtaatgacggagtcggatcatctatcaaggcacctccttgatagatgccattttcatctagctgatccattacataagcaaaaatactgtgttcatttttatccataaagttcatcccttaatttttaaattatgcctattataccatataaggctattcttgacagaaaaaaataccctgcctgagcagggtattttgctgtttattttagaatgttacgggttcaccgtaataagcacaggtcagaaccttcttcataccttcagcatcaatttttctcggattagaaccagtgcagggatccaatactgcattggcggcgatttcatctatatgttgtttgaataattcttcgctgacgccgttttctttataggtttgggcgataccaagttttttgttcaattctttgattgaatcgataagtgcatcagtcagctgtttatctgtattaccggtaagtcccagcatacgcgctatagttgcatatctgtcagcacaaactttggcattatattggataacagacggtagcaggatcgcattacagcagccgtgcgggatatcgaacatcgcacctgttttatgggccaggctgtgggctatacctaaaagtgcattcgagaaagccatcccagccaggcattgagcaatatgcattttgcctcgtgcatttttatcaccataatagctgtcaatcaaactgtcataaatatcactaatagctttaagtgccagcgggtcagagaaatcgctgcgtgcagacgcgacataagcttcgattgcatgggtcaaagcatccatacctgtatgagcagtcaaagttttcggcatggtcagagggatatcggtatccaaaatagcaatatccggcgtgatttcaaaatctgccagcggatattttatattagtagagtaatcagtaatgaccgagaatgcagttacttctgttgccgtaccgcttgtagaaggaattgctacgaaaatagccttattcctgagtttgggtatattgaaaggtttcttgatttcttcaaaggttgcttcggggtgctcgtaaaagacccacatggctttcgccgcatctataggtgaaccgccgccgatagcgacgataacgtcaggaaggaatttgcgcatggctgcggcacctttaaagacggtctcgatagacggatctggttcgatgccttcgaaaagctgggtttccacaccgatttcatgcaggatatcttcgaccttctgcaaaaaaccgccccgtttcatagaactgccaccggtgaggatcattgcctttttgtagcctttcagattttttaattcgtcgattgcacccgagccataataaatgtcacgtggtaaagtaaatcgtgccatagcttgacacctcctaaaataatttgccttgatactttcattataacattttaactaaattctacaaggttagtaggaatataaaaagttaaataattgtaaatttaaggaaacatttagtaaatggagttgggaacccaaatggctataaattgaggaaagttttaaaactttgaataaagtgccgtgatacgggaatttccttttccaggcagttttcaacggtcagtatataagtgtcattgaaccagggaatgatttcgcgcactttattcatattgacaatatagcttttgtgagttctcaaaaaaccgcagggacatagtttttcttccaaagtttttaaaggcaggtttgattccagaatacctttattggtatagatcagtatttttttactggtatctgttttgataagataaatttcttctttgggattaaagactaaaagtttattgttgttccaaatagagagcttgataggaaaattacagcgggatggcaactgctgctgagattgattctgcaaaactttttgcaattttataacagttgcctgcaggcgtgtcttagtatagggcttaagaatgtaatcgaaagcttcaagttcgaaggctcgtactgcgaattgatcgaagcctgtggaaaaaattattttcggagggttgggcaaagttttaagtttctcgccaacggccagtccgtctaatactggcatttcaatatctaaaaaaacagcgtcagcagtattgtttgaaaaataatcaagtactgcctctccatgttcacattcagcaatgatctccaaattgctgttagtttccagtaaggctcgcagttcttggcgggacggaaattcatcatctgcgataactatttttagcatttcaatcctcctcttgctttggtattttaaaactgacggtagtacctgtaccatatgtactgtctatatgaagaccgttgtccgggccgtaaattgccattagacgtttatgtatattagtcaggccaatggatttacggccagggatatcaagaagcagcgaagccagttttgcttcaggaatgccaatgccatcgtcatgcacggatataaaaaaatattctgtatcttggctgactgttatagtgatagtgccgccatctaattttgaccgtagaccatgtttgacagaattttcaattattggctgtaaaatcagggctggaaccttaaaaaaggctgtgtcatcaatttcataatttatttttagtttgtcgccgaaacgtgctatttcaatattaatataggcattgatgtgctgcagttcctgccgcagggaaattaatgtatttggatcagcaaggttttggcggtaataatcagccagataattgataagtttttttgctgtctgaggctgtacgctgcaataatagctgatcgtatttagggcattgaataaaaaatgcggattgatctgtgcctgtagagcttttatttcagcattggccagcagtttagtacgttctttgatctgattgatttcgatatgcgtagaaagcattgttgcgataccttcagccagctttgtttcaaaggcagtcattttttctgcaactatatgtcccacacaaagataaccaatcgtggcagtatcgtttgccagcggcaaagcctgataagaagtaagtacagtaagctttttattgttcaggcaaaatttttctgatagcagtgtttccaggtctctctgcaggtagtcaagaaatggctgttcttgttcacaggctgcgcagccaagcagctgatagttagaggtaatacagacaacgtcaaaggatttgacgttttgcaggatgctttccgtaattttttgggcggcattttgatcgaaaccattctgcaaaatagaaattgaactattagtaacattcagtgcaatttttgccgccagcccttcaagaatatccttctgtttataactgtccatgataagaccgataaaacaaccggtacctaaagctgtcgtgatcattacctggagagcacaatcttcaattgatggtgtaaatgtgtggggataacaaaataaggcgagtaaaatgatatggctggaagcgaaaataaaacttacgccgatagcgtgaggcagcagttcttttttttgtttgaaccagtgtgataaaagtcctgccagtagcccttctactaggaaaaagcagccgctcacgagagcagctttggtatggataaacaaaacatagtgaacagagatgagcagacttgtacagaaaccgattaaaggaccgctgactagaccagctacgataataaagatggaactggtgttgataagccagctttcgccatataaagaccagtaagtattgaggatgcctagcaacgaaaaaaacgcaataatatgtagcttgttttttaacgaataattttgttgaaataaggttgtttgaaaaaacgcggttcggctgcagataaagaaaataattaaaaatactgctagtccaaaccataaatgactcattgtttggtaaagaaagttcagcatgaattgctccttataaaggcaaaatcatgcatcttattgcagattttgtcatcttgagttcatttttatcctaaaagttgcattttatgttattttaaatttaggaaattggttgaatttatcagattaagttcattatataaaaatttagttatacatacaagaaatgcatccattctattatggaagggggatagtagctaataagcgcgaaaggagaaatttattatggatttgaaaacgtgtctttatgttgggtttgctctttatacgatatttgttatttatgtgggttttattggctctaaaaaaataaaagggttaagtgattttgcggttgccagcgaaagtatgggaccgatatcattaggattggcttttgccgcctctttctttagtgctgctacttttctggggtatgtcggatacgcttacgcctggggggcttccgctttatggatatttttagctatttttggcgggtctacattagggtttatcgttattgcaaaaggtgtgcgtgacagtaacactaaaattaaagctttatcattgccggactggctgggagaaatgtataaaagtgactttttgagggcgttggtttctattatcgttatgattcagatgttttatgtggctggtcaattatcggcaggtggtacgcttttatcaggccttttggatattgattacagtactgccgttattgcggtaactgtagttactattgtttatgtcactttaggtggtttgtttgcggatgtttatacaagtattggtcagacttgtttgatgatgtttgctggtgtgattgttttcttgtcaggattctttttcttcaagggcggcattacagaagtcagtacgatcattgctgcgcgtgatccactgttgactgcggtcattaatcctaaatcattacatatgtacagctacgctactgttttcggtgttattttgattgaatttgctttttctggacaaccgcagctgctgacaaaaattttagcattaaaagatcctaaagatatgaaaaaaatgatctggacttggattgttgcctcattctgctgtatgttggtaatttttggcggtttgtatatgctggcactgaatcctgatctgcagcagcctgactatgcggtagtagaatatgtcagagcttattttcatcccattatcagcacgctgcttgcggtttcgattgtagcggcattgatgtcgacagcctgtggtctgcttttggttatgacaacctgtattgctaatgatctttttattaaaacgttggttaaacgtaaaatcataaatattccgcaggaaaaagctcagaggatcgcatttatgatgacgaagatattgccggcagtttttgggattatttgtgttttgatgacactgcatccaccgcaatttatgggagtcatggtctggattggcatttctggtgtcgcttcagctacattagcaccgatgctgattgctattatctggcctgaacgtattaatgctactgccgctatctggggagcgattgcaggagaagcaacttacatggttgtttatctgtttactaatattgaaaaaagcgttatggcagccggtgcctgggggttgatcgtcagttttgcggtaatgtggctactgtcttctaataaaaagaaacagcgaataacagaaatgtgatcaaaagtaaaggatgtgatgaaaaatgttgtgggcaagtccgatgctaacagtttgggccgtaggttgtgtattgacacttatagtttcatatatccttttagaaaaatggtattgaggcaggtgtaaatgatgaggaaaccaaaagtcgtaattctgggaactggtggaactattgccggtaaagcaggctctaatacagaaatgacaggctatcaggctggtgaaataggtattcagaccttgataaatgctgttccggaaatgcttgaagttgcggatgtaactggtgaacagttctgcaatatcggcagttttgatatgattgatgatatctggctgagattaagccgtagggtcagtgaacttctgcaacagccggaagtcgatggtattgttattacacatggtacagatacgctggaagaaacagcatattttctaaatttaactgttaaaagtgagaaaccggtggttttagttggcgctatgcgtccggcaacagcgatgagtgccgatggtcctgtcaatctgctgaatgcagttgctttagccggttcgcaagaggcggttggtaagggcgtattgattgcaatgaatgatcaaattaatggggctcgtgatgcaactaaaaccaatactacacatgtggaaacatttaaatcgtgggaactgggatatttaggctattttcaaaatgggaaacctattttctataaagcaagtctgcgtcggcatacggcagcagctgagtttgatatcagtaaagtaactgctctgccgcgagttgatatcgtctatctgcacgtaaactgtgatgatattttagtaagagcggcagtttcggctggggcgctgggaatagttattgcagcctttggtcacgggaatctgcatatcaatataaagcctgccctgatcaagattgctcgaagtggtattcctgtagtacgcagtacgagggtcggtaatggtatcgtaagccggagtgcaaacgatactgataacaaatttatagctgcggacagtcttaatccgcagaaagccagaatacttctgcaattggcgctgcttagaacgaaaagtccagaggaaattcaaagaatgtttgatgaatattaaggaataatagtaaaacaccgcttgtttaaacaagcggtgttttctttgtatcagaagaaataaatcttttgaataagcgcagcgtcaggtgccgcccgctcgatgcggacgagcgcttgacaggggggactacttgatgataaaataaaaataataggaatatttatcaaaacaattatataaacaaataagtaaaattctaaatagttgtataaaacaataaatatataagatcaggtgcagtaatgcttaatagagaaacaggtgtaaaacctgtgctgtcccgcagctgtaatgcagagttagtcttaaaatgtcactgggaaactgggaaggcaagacgagcgatgaagcagagccagaagaactgcctgattttgacgctataaaattcctgcgattgatgggattgcgcaattatttgacgcctttctgtatttatatgcagaagagcgttttattttgtttcaagggcaaaagcttttgaataaatgtagaaataatatgggaaatggatgtggttaaaggtgagaagatttgtaaagaaaaggtcattgatatttacactgattggttcaagttttttgtttagtggtgttactgctcatgctgaagaagttacagaaagttttacacttgaccctatggtcattactgctacaaggacggagatgagcgtgaaggaaagcccctcggctgtagaaattgtcagcagcaaaaaattggaagaaacacaggcgaaaacgttgcgtgacgctttaaaatctgcgttgggagtaaacgtctttaatgattttcagggacgcagtaatgtcagtattcgcggcagtgagtcaaggcatgttttaattatggtagacggtaagcgtttgggtggggaactttcctataattccgctaatgcctgggacgttgatcgtattcgcatggaggatgtggaacgtgtagaaattatcagaggtccagccggagctttgtatggcagtgatgctatggcgggggttatcaatgtaattacaaaaactccggaaaaaaatgccggtagtatcaattatgaatatggctggtatgaaaatggtaaaggtgctggctacaagtctaatgtttatctgcagggggttgaaaaaaatgtatcctataagttaaatgctggcttgaataataataggccttatatggatccagcaggcagcggagatgaaatgaatttttatggaaaggaacaaccgatatctttaagtgtaggttataagtttgataatggaaatcaattatctgccgatttcagcaggattaaagaggataatcagaagggtagttcatctgtaacagttatgaggccgggtgaagtctggcaaaataaaaaatctactatttataatgataacaaacgtacagattattcactgacctataaaggtgatgatgaaaagcaaagctggattatcagagcttatcaatcggtttatgataaacgttatacaagtcaggatgttacgcaaatgtttacgggcggcaaacctggaacaataactgttaaagatcctaagattgatactgtaaaaaggaccttgagtgttattgaaggtcacgattcatggcatatgggagataaacattatttaacggcagggctggagtaccgccgggataacagtgaagggaccagattaaagaagaaaggtactcctgtagctggaggcagtgcatataatgcttatgatgaagcggctattaattatactgccgtatatgttcaggatgaatttaaacctgatgaaaaatggttgattattccttctgtacgttatgattacagtgataaatttggcagtgaaataacaagccgtttggcaactacttataatgcggctaaagacatacgtgtgaaggctgttatcggtcaagggtataaaactcctacagttaatgagttgtaccatttttgggagatgtacgctgctaatccgggtggctcaggacagttttttgagggtaatccagatttgcaaccggaaaaatctttaagttatgaattagctgtggagaaggactggggagataaaactacagctcatttaggaattttccgcaatgacgttaaggatttgataagttcatactggacaggcagatttactgatgatgatcccaatagctatccgggacttggtagagatcaggttatgacttatcggaatgtaccaaaggcaacattacagggtgtagaattttatggttcgcatgaattagggaaaaatatttttatgaattttggttatacttatttagaggctaaagataagacaggcggaacgcgtttaactgatcgtgctaagcatcagttaacttttggtgtatcttatcaaccgcaaaatatttatgcttgggattgcagttttgatattgtttctaatctaaattattattatcacaacgcagataagagtacaatggggaattctgtatattctactaagaattttactattgctaatattatggcatcaaaacaccttactaaagatgccaagatttatttggggatcgataacataagtaatcataggaattttggcgcttatgctgatggaaatttaggacgtttgtatagagttggtatggaatataaattttaatacatagtagaaatatctagcgggcttaatgcctgctagatattttaaatggagttatgatatgaaaaaaataattttaatgctgtgcttgttggcagtttcagtaactatgtatggctgcacttcaaaagaaattcataaagatagcgggttgatgaaaataacggacgataatggcaggcaggttgctttttccaaaaagcctgaaaggatcgtagttctgtcaccttcttttttagaacttttggaagttttagatggaaatgttgtaggacgggcggaatccacaattgtcaggactcctgattttgccaaaaatgctgctgttgttggctttatttttaatatcaatactgaaaaagtagtagaattgaagcctgatttgattgtcgcttataaggggatgcatgaaaaatacatccaactttttgaagcaaatggtattcctgtagtagttttaaatttaaaaacttatgaagatgtcaaacatagtataaaaattttaggtgaactgactggccagaaagagaaagggctaaaaattgcatcagagcttgacaaaaaagtacagaatacagttaagcagcttcctaaaaatactaaaagggttgctattttacacagcagcgcacaaaatgtgacattagagaaggaaaatagtattgctggctgtgttgccaagttattgcaactacataatattgtccaggacattcagagtgtaactgctccaactggtgaacagatgtctgataaagctccttataatctggaattcttaatagaaaaagacccggaaataatttttattacctcaatgggagataaaaacgatattgaagtgcgtttgcaaaatgacgttatgagcagtcctgcctgggaatcaataacggcagtaaaaaataatgcagtatattatttgccggatgaattatttcttttgaatccaggacttagatactctcaggctgtagaatatatggcatcgaagctgcaggaataaggctaaaaaattattttggcaagattttgaattatggtttataatgacaacataagtaagctaaggctaacttcatggaacaatgttatttcagcaaacgtaatatgaaaggaatgaaaatttatgaaagattttttgattgtttattccagtaaaaccggcaatacagagaaagttgcaaagaaattttatgaagtggcaggagaacgctgtgaccttgctgctgtgaagcaggtgccggcagtagatgattataaggttatttttgctggttattgggtcgataaaggtgaacccgataaggatatgcaggagtttttgcagactttggataataaaaaagtcgtactttttcaaacgttgggagcagaagcttactctgagcacgggatcagctcattagccaatgccggcagatatttaagcaccggctgtaaagtagtaggcactttatctattcgcggtgcgattgatccgaagctgatcgaaacaatgatgaagatgcctgaaggacattcgcatgcacctacggaagaaagtaaaaaacggtggaaggacgcaagtactcatcctgatgaagcagatttgcaagctgcaggagagtatatacaaaaatttatcactttttatgacaggttttataaataaaatttgtatggatttttagaaaatactgggtaattttaaaaatgaaaaaaatagacaaaatcaccacgctgggcaaaatgatgcttaaagacaaaataactagttcctgggataaattactgacagagaaaccgcaaggtgacttaatggttttttataaaaagaggctggagcacttttggcgtctgccggatttagaaaaaattatcggcaaagagaaggctgcaagcgcatatgcggcaatggaagaagttgatgttttatttgaagataaaggcatcaaaccgctgccgtcgcctctgggacagaatgctttcaagaagcttttgcgtgaagcttccagcagcaggcctatagcagcttatatccatattcctttttgcaagatcagatgcacttattgtagcttttttaaacagggttcttcaataaaagcagaagcagaatatgtaaccaagcttttgacagagctggaacagatgcgtaatatgcattatttgaaaactgcggaaatccaagcggtctttcttggcggcgggactcctggaaccttgacgaaagaacagctcagcagtattttgcagaaggtacgccaagtgcttcctttaagttctgattgtgaaattacggttgagagcagtatttatgatatggacgaagagaaacttgctgcttgcatcgaaaatggtgcaaacagattcagttttggggtgcaaacttttgctacggatctgcgccgacaactggggcgtcctgatacctgcgaagaagttgtgcgtaaattgaagctttttgctgagacgggtacaaaggttatcattgacctgatttatggtttaccggggcagacaaaagaattgctgcagcgagatttacagttttatctggattgcggtcttagtggtgtcgatttgtataaactgcagatttttcctgggacgccgctgggcaatcaatttaaagctgatcagagtaatttccctacagggaggaagctggcagagctctttgtcagcggcgcagaatttttaagcaggaatggctgccgtcagctgagctgttgccattgggcaactgatgacagggaaataagccgttataatactatggtgaaagaaggcgcgcaggttctggctttcggagccggctgcggcggatcattaggcaattatgcttatatgcagccgtttgatctggaaaaatatggaagcctggttgataagggtataaagccttttgttatgttatttgaaagagatgggtttgcgcctgtttttgccgcaatcaaaggtcagtttgacagtggcgtctttgaacctcaaaaattgagaagcttatcagaaatacctttttctgaattgttgtttcctttattggaacgttggcgtaacaacggtttaatggaagctgctgatggtgtttataagctgacgccaatgggtttgttctggcagaatcaattgaatcgtgcagtgatgatagctgtgcagtatttagtatacgggccgcgtgttgcgggaagaaagtcagctttgacaatgatgagtgcaatggaaaatcgtacttaaaagttatatgattaaagcccctgttcaataagaacaggggctttaatcggttattatttaagcttttaattcgatttccagcaggcagtcgccgctttcgatacggttacctgctgttacatggatctgggctacgataccgctgattggggcggcgatagttgtttccattttcatagcttcggtaactacaagcggggtgcctttagttactgcttgtcctttttccaccagtactttaacaacggaacctgataaagtagcgccgatctcaccctgattggctttatcagcttttttgcggctgatattggtagctttgacatttctgtctttgatatcgatttccctgggcagaccgttgaattcgaaggatactgtacgaataccatcggcattggcttcgccgatatgtacaagcttaatgaccagcatcttgccttgttcgatttctactttgatttcttcgcctattttcatgccgaagaagaatgttggtgtatcaagtacagaaacatctccgaaatcatgtacgcgtttgacccagtcagtaaagacttttggatagagacagtaagagctgacggcttcttctgtaataggtgcttccagttctgcaagtttagcttttatttcctcaaaattaacaggcggcaaagtatcgccgggacggccttctaaaggtttacgtcctttgagaactatttgctgcagtttttgagggaagccttgataaggaacgccgatacggccttcaaaaaattccactacagaagcagggaaatcgagtacgtcacctttagcatagatatcttcttcgctgagatcgttttgtaccatgaagagagccatatcaccgactattttagaagaaggagttaccttgattaaatcaccgaacatcattgagacgcggtgatacatatctttgacttcttcccaacgttcgataagaccgagagcggttgcctgctgtttaaggttggtgtattggccgcccggcatctcgtgtacatatacttccgggtttggaaacagttcggtctggtcagcggctttataatatggacgtacggtttcccaataacgggatagttcgttcatagcatcgacgtctacacgcggctggcgcggatgaccgctgagcgcataatagaggctgctgccgctgggctgagaagtgccgcaactcatagcggacatcgctgtatcaacaatatcaacaccggcatcgacggcacgggcgtaagtgtggatagcattgccgctgccttcatgtgtgtgcagatgtatcggcaggtcaacagcgtctttgagagcactgacaaggcggtaagacgcctcaggttttaacagtccagccatatctttgattgcaataatattggcaccggcggctgccagctctttagccatatccacataatatttcagatcatatttatcccggcgggggtccagaatatcgccggtatagcacagtgccgcttcggcaactttattgcattctcgcacagtatctatggaaagacgcatattatcaagtccgttgaggctgtcaaagatgcggaaaacatcgacaccgtttttggcggccagatgaataaattctttgacgacattatcaggatagctggtatagccaactgcattggctccgcgcagcagcatttgcagtaaaatattaggggcttttatacggaattgctgcagccgatcccagggactttcgtcgagaaaacggtaagcaacgtcaaaggtagcgccgccccagcattcgaatgagaaaaggtttggaagttttcctgctgtagcagctgctactttcatcatatcgtttgtacgcagacgagtcgcaaacaatgactgatgtgcgtcgcggaaagtggtatcagtgattagtacttcactttgggcctgtacccattttgccaatcctgcagggccatgggcatcaagaacctgtttgctgccatcaggaatcttaccgataaagggcttgggcatattcaggggggcaaattccggttttggctgtacacctacgttagaatagccattgatagagatatcggcaatataattgagcagtttagtaccgcggtcatgtgttttagggaaaataaacaagtcggtgttatcatcaacaaatttagtgctgtagctgccgtcagtgaattgcggatgctgcagtacattttccaaaaagagaatattggttttaacgccgcgtatacggaactccttcagacagcgcagcatcttactgatagctatttgatgtgtcagtccccaggtggttgctttaacgagcagggaatcgtagtacggggtgatgacggaaccagtaaacgcattacctccgtccaggcgtacgccaaagccgccgccgctgcgataagcgatcagtttaccggtatctggcataaaattgttggccggatcctccgtagtgatacggcattggatagcatggccatgggtaatgatgtccttttgttcggggatcgctatttcaggatcatggatggaatagccttcagcaattttaatttgtgtttgtacaatatcgataccggtgatttcttcggtaactgtatgttcaacctgaattcttggattaacttcaataaagtagaaattattgtccggtgttgctaaaaattcaactgtgccagcactgatataatcaacatttttcatcaatttaacggctgcttcgcaaatacggctgcgcagctgctgaggcagagagaaagcaggagcaacttcgaccagtttttgatgccggcgctgtacggaacagtcacgttcgtgcagatgtacaatgttaccgtgggtatcgccgatgatctgtacttcgatatgtttagggttttgcagatatttttcaaggtagatctcgtcactgccgaaggctttgagtgcttctgatttggcaaggctgtaagcctgatccagctcgtccatggaagctaccatacgcatgccgcgtccgccaccgccgttaacagccttgataatgatcgggaaaccgtgttttcccgcaaaagcacgtacttcttctacgctgctgactgtgccggtagaaccgggaatcattggaataccagccagttcagcctgcgtgcgggcattgatcttatcgccgaacattatcaggtgttcaagacacggaccgataaagatgaatccttcttcagcgcagcgtttagccagttggctgttttctgataaaaagccatagccgggatgaatggcgtcgacatcgtgttctcgagcaatacgcatgatgtcttcaatatcaagataagcgtctatggggcctttgccttcaccgaccagataagcttcatcggcacggttacgatgcagagataaagtgtcttccttagagtatattgctacagtacggatgcctaattcattacaagcacgaaaaacgcgtatcgcgatctcgccgcggttagcaactagaactgttttaatttttttcatggtaaaccctcctttggttgagaccgtatccattgtataagaaaaaagtacttctggcaacatcaaaagttcatgtatacataattcttgcactgcactttgtatacattttttgaaacaccggctaagttgtggttttttagtgtaaaatttttcggtatatgcataaaatttgcaggactgtttcctgacaggaaaatcagggcagaacagtggttaggatttttagaaattatttcgatactttatttaatgaaaaagaaagtattattgccgactttcacagattttttgcttgtttaattatcgaagaacggttatcatttaatatagaataataatgtaagtacaatatatgtacatatttggaggttcggatatgccagagaaaaaagctccccctaaaaagccgctttattactattatattttggctttggcaataattttactgatcaatacggttatcgtaccaacgtttttcagcccgcaggtcaaagagatttcctatggtaactttttacagatggtagacgatggtaaggttgcaaaagtagagatcactaataataagatagctgttcttgcgaaagacagtgataacaaagtaatttatgtaacaggcagggtagaagaccctgatttggttaaccgcttaatgaagagcaaagtagaattttcgcaggttattccaaaggaaaattcaccgcttgttaatttctttatgaactgggtcttaccgatcatgatattcttcgcattgggccagctttttatgcgttatatgggcagcaaactgggtggtggcaatgccatgagttttggcaagagtaatgccaaggtgtatgtagaagcacagactggtaaaagttttgccgatgtagccgggcaggatgaggctaaagaagcattgatggaattagtggattttttacataatcctgcgaaatatcaggctatcggagccaatatgccaaaaggtgccttgctggttggtcctcctggtacaggtaaaactctgctggctaaagctgtagcaggtgaggcgaaagtgccgtttttcagtatttccggcagtgaatttattgagatgtttgttggtatgggtgcggcgcgtgtccgtgatctgttcaagcaggctcaggaaaaagctccttgtatcgtatttattgatgagatagatgctattggcaagcgtcgtgacagcggacaatttggcggcaatgatgaacgtgagcagactttgaatcagctgctttcagagatggatggctttgatggcagtaaaggtgttgtgatcctagctgcaactaaccgtccggaatcattggataaagcgcttttgcgtccaggtcgttttgaccgccgtatacctgttgagctgcctgatttacagggacgtgaagcaattctgaaagtgcatgcgaaggcaattaaaacctgcgatgatattgattatttgacggtagcaagagctactgcgggtgcttctggtgctgaattagcgaatattgtcaatgaggctgccctgcgtgctgtcaaaatgaaccgtacctgtgtaagccaaagcgatctagaggaatctgttgaagtagttattgccggttatcagcgtaaaggcgctgtaattccgccggaagaaaagaaaatagttgcttatcacgaaattggacatgcactggtagctgctttgcagaaaaaatcagctcctgtccataaaattacgattatccctcgtacatctggagccctgggttatactatgcaggtttctgaaactgataatgtattgatgagtaaagaagaacttttcaataagatcgttactattactggtggacgttctgcagaagaagttattttcagttctattacgtccggtgcttccaatgatattgagcaggctaccaagctggcgcgtgcgatggttacccgcctgggtatgacggaagaattcgatatgatggctaccgaaacaatgactaatatttatcttggcggagatccttcgttgaactgttctgacgaaacagccagtaaaattgatgccaaagttttggaaattatcaaagaagctcatcagaaagcgcgtgagattctggaagaaaataaagaaaaattacacgagctggcagcctttctgctggaacgtgaaacgattaccggcgaggagtttatgcgtttgctgaatagtgaagctgatgttattgaaacttctgcgacggttgtaaaagaaggtgaagctgatgctgaggaagcaagcagtatttgacagagagacttttttgacactgccagatttaccgcctcgtttaaagctatggggtgaagatagagagcttgaagattttcttgtaaagaaagcgtttatgattaatcctattcccagttctgtggcgcgtgcagatggcgaggtgaaaattgccgtcgttggttcaggtcctgctggtttaggcagtgctgacgaattgactcggttaggttttaaagtgacggtttttgagcgtgacgatcgtccgggtgggcttttgatgtatggcgtacctaatattaagcttcctaaaaatatcgtcatgcagaaaatagaagcgctgcaggatgcaggagtggaatttcgtctgcagacagaaataggcaagcaggtaacttttgccgatctgcaaaaggaatttgctgcgattattgtttgtgttggcagtacttcaccgcgacgtttgaaaatgatccgcgatgatgctaaaggtgtttactatgctaaagattttctgacttatgtaacgaaggaaatgttggagcaaaacacatctgttcccgctgatacggcaggtaaggatgtagtgattataggcggaggagatactggtatcgactgcgctgcagtggcttttgcccaaggggcccgtagtatccttcaactggagctgagggaatgtgagatgaccggaaaaacgcaggacggtttctgtgagttggtcagcagtgatcctacattatcatacggcactatacttcaggatgttttatatgatgataatggctttgtaaaaggggttcgcatcgctaaggtagaatggataagctccgcttcgggcagcttgcctaaaccacagttgatcgaaggctcggagtcagaaatcccggcgcagcttttgctgcttgctactggttttacaggaccggagcctgctgtgttcagtacttttgcttttaataaaactcctgttggcacgatcgctaaaggaagcggctattttgatacttcacgtgccggtgtatttgcagcaggcgatgctcggcgtgggcaaggtgttgtggaatgggcttttgcagaaggtcgtaatgcggctgttgaatgtgctgaatatttgcatgctttaaaaaaataattata

SEQ ID NO: 10015 - DNA, 49791 bp, Unknown
  gut microbiota DNA sequence
gataaatttctaatctttacttgacgttagcctacgctaatagtatactatatgaagatgaagaatagtgttcttgataaggaacaacacaaggggcttttaatcactgtattgtttgtctgttttttgttataatataaagcaagctatgaatttatttaggaggatattgccatgaaaatggaatttacaaagatgcacggtactggtaacgattatgtttacgtcaactgtatggaacaggaattgcctaatccgggtgctatttccgaatatatcagccacagacgttttggtattggcagtgatggcctgatcatgatctgtaaatctgacgttgcggattttaaaatgcgtatttttaacgctgatgcttctgaagccaagatgtgcggtaatgggagcagatgtatcgccaagtatgtttatgataaaggtctgacggataaaacaacttttacgctggaaacgctctccggtatcaaaaccatcgatgtatttttgggtgaagacggtaaagtggcagaagccagtatcgatatgggcgagcctatttttaaatgtgccgacatccccatgatcagcgatcactttatgtttgtagatcagggactggtgctggaagaagacgttgtttataatggtacggctatttctgtaggcaatccgcatttcgtcacctttgtagacgatgtagatgctttggatctggaaaaattagggcctaaatttgaaaaacacaaattatttcctgaaaacgtcaatactgaatttgtgcaggtaatcgataaaaataccgttaaattccgcgtctgggaacgcggcagcggcgaaacctgggcctgcggcaccggcgcgacagcagtttgtgttgctactatcatgttgggccatgcaggtaaaaaaggtgaagaattaacagttatcgccaaaggcggcactctgaagcttacccatttggccaataaccatgttattttaagaggcccggctgtaactgtatttgaaggcgtcatcgatattcccgatgaagtcattaataaataaaaatatatttttagtttaatgggggacaaaaaatggcttttgtaaatgacaactattgtaatttgaaagacagctacctgttttcgcaaatcgcgcaaaaggttaatgcttatgtagcggaacatcctgagaaaaaggttattcgtatgggtatcggcgacgttaccctgcctttggcgccggccgttatcgacgcgatgcagaaagccgttgccgaaatgggcgtgaaggaaactttccgtggctacggaccggagcagggctatgatttcctgcacgaagctatcgtaaaatattatgccggcttcggcgtaactttggccagcgatgaaatctttatcagcgacggcgctaaaagcgactgtggcaatattaccgatattttcagcaatgcgaatacgatcctgattcctgatccggtctatcctgtatatctggacaccaatatcatgtgcggccgtaaaatagtttatatggacggcaagccggaaaacaacttcctgccaatgcctgacgacagcgtaaaagctgacatcatttatctttgctcgccgaataatcctaccggcgctgtttataccaaagagcagctggaggcctgggtcgcttatgcattgaaaaacgacgcggtcatcctgtatgatgccgcttatgaagcgttcgttgatgatcctgctataccgcgcagtatttttgtcgttgaagacgccagaaaatgcgctatcgaattatgctccctgtctaaaactgccggttttaccggtacccgctgcggttatactgtagtgccgcatgctttggtacgtaaaactgaaagcggtaaagagctggaactgaataaaatgtggctgcgccgtcagactaccaaattcaacggtgtgccctatatcatccaacgcggtgccgaagctgtgttcagtgagcaggggcaaaaggaatgccgcgaaatgctggctttctataaagaaaatgccaggatcatggccgaaggactgcgcagaaaaggcattaaattctacggcgggacccattcaccctatatttggctgcaatgcccgcagggtatgtcttcctgggaattctttgatttcctgcttgaaaaactggctgttgtcggtactcccggcgccggttttggcgctatgggcgaaggatacttccgcctgtccgcttttggcagccgtgaaaacactatcgaagcaatggaacgcattgaaaaagaactgtaagcagaataataaaaacgcctggtttttaaccaggcgtttttgcttttaaaacagaccgttaatttttaacagctttgatacagaacatcgggactgggatatagaatatatcctgttcggcataaatacggtcgccgacgctctggtcgacagaacaggaacagctgcctaaagccttaagtatttccaagtcccagcggggacgctcaaagaggctgatttccagcatatggtaaatattgtggcactcatttaataattctgcggaaacatcggcatgggcattgagggcaggcagtttttgccgatgatggtccttggcgtattccgcgtcataattcagtaggatacctttcggagccagcacacggagccattcggcataagttgtttcgggatgtggcaggttccacatcagatttctggcaataacgacatcaaagctgccgtcagaaaaagccgtatgctcggcatcggcagtctgaaaagtacagctgcagccttctgctgccgccagcgtttccgcctgagcgatcatggcaggtgtaagatcgataccggtgactaggtgaccttcattagccagcagaacggagaaaaaaccggcgccgcagccaacgtcaaggatacgcagctgttttgcggggggcaaatgctgcacgatctcgcgctgccactggctgtatttttcactgtgcagctcctgacggcgcagtgcggcaaaagcgtcggcccttttcgtccagtaattttcaatatagtttttggtatcgtcgcttggaataagcgtttttttagataaatcagacatgatctgctcctattttatcgctgaaatcataaacatgggcgttgaagcgtaatttattttttctaccgtcgaccagacgcgctgccagacagaaacgtcagtagtaatggaacgcatacgcagcttttccaaagtgcggatatcccaatgcggccgttggatacctgtcagaggtacctgcagggcgatcgcctccatcgcgtcgatatcagtactcagataatggtcttcaagatcgttttgctgtacgttgcgtcgatcctgttcgtattgctgttttaagtcagcgtcatacagataattataccagttggcgtcaaaattcagaagcagccctccgggtttcaatacatgacgccagttgccataagtctgctccgggtcttccaggacccaggtaagattgcgtgaaagtacaacgtcaaaagattctgcggtaaacgtcggcttctgcgcgtccatcaggcgaaaatcgatagcttcctgccaaggtccggcattacgtttggcttctgccagcattgccggggcagcgtcgatagccgttactttataactggcttccgccagaataacagcaaagaaaccgggaccggtgccggcgtctaaaacagtgatttcctgcggcgcccggttaggataaaccatctggatctgtctgctgatttctctgagccagttgctgcgctgacagcctgccagttcttcctgattgacctgcgaataactgggagcccgatctgtccagtattttttattaacttcaaataatgcagatgtcatagccttcacctatattttcgtaagattgaatgctgccgttaccagttcgcgggtgtaatgctgctgcggtcgggtgatgatatccagggcaggtccgctttcaatgatcgtcccggactgcatgatcaggattcgctggcagatttcctgtacaagagtaatgtcgtgactgatgaacagcaggctcattttagtttcagcctgcagcttaagcagcagctgaatgatctctgcctgggtctgtacgtctaaagcgctggttatttcatcgcagatcagcagccgcggtttgatactgatcgctctggcgatagcggcacgctgacattcgccgccgctcagctggtgcggaaatttttcagcatgctgcggtgtcaggcctgctgccagcagtaaagcgatcgatctttcctgggccgcagccttagtacagccgtaattcagcattggcagcatgatcgagctgccgatgcttttccgggggtgaaaagccgcagcggcattttgaaaaaccagctggacctgactgtaataattttttcgcagtgcggcatcggcaaagtccagcggctggccattgaagctgaccgtaccgctgtcggccggcgtcagtcccataagcagacgtgccagggtgcttttgccgcagccgcttgccccagccagccccagacattcgccgggggcaacactaaagctgacattgcagacagcaggcagcgcgttatgttcactgaagaaagttttactgaggctggctgcctctaacagggcgctcataaaagaaattcctttctgaaatgcggtatagcctcgatcagcttacgggtataatcatgctgcggccggttgagtattgtttgcgccggaccgctttcgatgatttctccctgccgcagtacggcgatcgtatcagctatctgagccaaagcgctgatgttatgtgaaacaacgatcaacgcagtatggtgatctgtttttagctgcagcaggtgccgtaatattttctgctgcgtcagcaaatcaagtccagaggtcggttcgtctgccagtaacagctccggcttcagcaaaagtgccatagcgatacagacccgctggttcatgccgcccgaaagctgaaacggatagctgtttaaaatggcctgaggcttagaaaaatcgagcccggcaagcacctgcgcggcagactgcaggctggcggccttatcgaactgtccttgtgcctgcagcatagtgcagatttgcgagccgatcgtctgcaggggatataaagatgctgtagggtcctgaaaaatcatggacagcttcctgccgagcagaccgctgctgttcagacggccgccgatgagcaggctgtgcccctgccagaggatctcgccgccggtaatgacagcgttagcaggtaaaaggccggtcagcgtttttaatagagtgcttttgccgccgccggagctgccgacgatgcccaggatctctcccgggcagacagtaagatgcacagcttttaaaatttctttagccccataggcaaggctcaggttatttatttgcagtaatggctgctgtttgttcatagttgaaccccttagacctcaaggtcggaggtgatttcgtaataatcggaaggatgggctgtaaagcccttgatgttgcttttcatcacaaaggacattttcagatgcgaagcatagataaatgcgttatcgtctaaaagctgctggctgatctggactgccagcctgctgcgtgctgccgggtcaaattcgccgcgcagctgccgggtcagttcttcgacccgttcattatggtagtggccggaattataggaagaactgtccagtacatgggtcgtaaaataatactgcgggtcgcctgtaggcgcagccacaaaagccttggcataaatatcccaatccccgcgtttcaggaaatcgttataattatctgtcgcgttgacttcggccctgataccgacctcctttagaaaagcctgggccgcttcggccagcaaaggcagctcctgccgggaagtataggtgagccagcggacggtaaggtcctgaccgtttttatcaacgtagccgttgccgtcagtgtcgatccagccggcttcccgcagcagtttttttgcctgttcggcgttataagcgtccgtatgcacggcatcgccgccgcagggcatattggcagggaagggaccgacagccggcgtaccattgccattcaaaagcacgctggtaaatttatccttgtcgatagccatagctattgcttttctaacggcaggctcctgtaataccggcgtcgtaaaattcaggcaggcctgaaaaactctggaagtattggcggaagcaaccttaaattttgcattgccggtaaataaaggcagactggcatagggcaggccctgtgtggcatcgatctcgccgttctgcagcgccatcgtcaaagtatcgccgtcgggaatactgcggacgataactttatctgttttcaccctgccgccccagtacgccggatttttagtcaaaactatttccgtaggcgtcaggctttggacgatatacgggccggtgcccgagattttgacatcgtcggcagtgccacgctgcatatcgatgatgcagccgtaaggatcgcataaataattgatcagcgccggcgctttttcctgagactttatcgtaacggtttgtccgtcagcagtgattgaagccagttttaagtcgtcggcagcccgtttatggcgctttaccagatcctcaaggcaggctttcacggcggctccggtaagtctggcgccgctgctgaaatttacgtcgtcgcgtaaagtgattttaacagtatgatcatcaagaaattcgtagcctgttgccagccagggctgcggctgcattgcttcattaaagcggaacagcgtttcgccgacgccgtagcgcagtgttgaccagcccttataggattcgtgcgggtccataccggcgttctccatagccacaccgtaagctgtggtgccgtagcggaagacagattctcccgccttgtcaggagctgcggaagggccgcagccgttgagcagtaaagcggtaagcagcagaccgctgcccagtaaagaaagtttcatcataatagcaatacccctcgcataaaattatttaggattgaatttagggtcaagctgatcacgtaagctgtcacctaaaagattgaacagactgaccgtcacaaaaatcgccgcaccgggtgccaggatcacccacggcgccgtctgcagcatactgcggctgctgctcatcatcgaaccccactcggctgccggcggctgggcccccagacccagaaaagacaggccggcaagttccatcagcatcgtgccaagatcaagtgccgacattaccagcagcggacttaaaatagaagggaggagatgccggaaaattatttccgtgtcactgcagccgctcaaacgtgccgcctcgatatatggctgctgccggacagtcagcgcctgactgcgggccaggcgtgcatatttgggccacgagatgacggccagcgccaaaacagcgtttgtcataccgccgcccaggatactggcaacagcaatggcaaaaacaaggccgggaaacgctaaaaaaatatcggacagacgcatgataaaattatccagcttcccgccatagtaaccgctccagagcccggcggcagtaccggtagtaaaaatgatccccactaaagccagcgcagaaaaaatggagctttgcccgccgaccagcacacgcgaaaaaacgcagcgtccgtaacggtcagtcccaaagggatattcggcgctgggagcctgcaaagccaggtcaaggttttgcagataaggatcgtgcggtacccagtaaggcgcgctgagcgtgatcagaaacagcagcactgtcagcagaagcagccagcaggtcttatgcaggccgtgcggcagtatatttttgggcatcaccatccaccgcctttagtaaattgccgtgcctgcggctccagctgatgcagcagcagatcggtgacaagattgacacaggtaaaaatgaacgcggtccagaccacgtaagcctgcacgaccgggtaatcgcgcatcaaaatagcgtccattgccattttgccgatcccgtcgatcataaaaatcatttcaataattgcagttccgcctaacagcgagcctaccgacaaggagaataaagtaatgagcgtactgccaagagaacgcaggatgaacctgcgaaaaacagttgctttgggaatgccgcgtacaagagcgccggcaacataatccctgttgatctcctctaggatattactgcggatatgccggatatacttggcagacatgggaattgccagcgccagcgccggcagcagcagaccgccgaaccctgagccgccgaggacggtaaaaaagttcagttttaatgcaaagcagtaaagcagcagcaaagcaataaaaaatcccggcagtgaattgcccagaaacgcgcagcagcgaatcagatgatcgcagcagcggttatgcctcagcgctgccgcgatacccagcggcacagaaatgcaggcggtaagcagcagggccagcgccgtcaaataaagcgtaggctgcagcttagccacaaaaagcgctgttacaggcgtgcctgaaatatacgaacgtcccatatcgccgctgcagacagccagcagccagtccagataacgtaccagcagcggacggtcgagtcccagctcggcacgggccgctgctttgaccgtttccgataccgccccggaggccttatacatcatatcgaccgtatcgtctgccggcagctgcatcagcacaaacgtaaaaaaagtgatgcccagcagcaccggcagcaaaagcagaaaacggtgtttgatataaacattcatcgtgtcaggcatcctttctgaaaataaaaacagctatgcaaagtaaaccgccctttcaggagcagcttaagccttcatagctgtatcaataatactgttgttcaaataagaatgagggcagcttcaactgccggcggctgcttcagcagcctgatattattttatcatattttaatactttaagttaacttcaagtcaagctttcaaagaaaaaatttacaaaaaagttttttctttgtgagatttttgtagaatcacaaaactttccttgaagctataccaaggtagatgtataatagtaaagaatcaaattgaccctaatattcaaagagagccggaggtaattattaatgaaaaaaattcttttaatgctgacaatggtcttagtgcttggtttcagtgctatctgcagtgccagcaacggtaaagtgcttgacgctgaagaagccatggtcaacaagtttttggcagcttccaattattctgccgtaacttccatgatgactgacggtatgaaaaaagactttacagaagaagtttttaaaaatttcaaagagcagatggataaaaactttggcgctgtcagtgaaaaacgtttagtagtgatagaaaaaggcgccgatgctgatattttaagatacagcatgaaatttgccaaacagcccgaagcaatgatgagcttcctgtttgcagtcaaaaacgaaaaacctttattaggtgatttcggtattgctctgccgcaaaaagaagaaaataaagaagccgctaaataaaacggcgtaaaaaaaggactgccaaacggcagtccttttgtatttttatagcagcccgcgcagtttgtccagtgcttttaatcggtgcttggtgacattgcgtacactgcagcctaaacgttttgctgcttcggaaggtttcagctcctgtgcgaacagcagcatcatcacctgccgctgggcggggttcagctgacgcagagcttcctgcagatccagcgacagtaaaatccgggccagctcgtccaggctgccgtcagcatcacggcaggcctccagcagttcggtcccggcggcgctttcagtatctacctgcgcttcgttttcccagatctgaccctgcttctgcatggcgtcaaaaagggcaaaatgcaccttacagcgcgccagccctggccagttggcaaaatcggcgccgtcatatttcaaaatcagttcgatcagggccagcacggcgataccttcggcatctttacccagcgaccggtaaaacatttcgcggtgggcctcgctttttaaaagcgggctgaaatcttcgcatagctgcagcagtgcctgtctgtcgccgctttgcgcggcggttatcagcagctgcaggcggctgggaggtgtctggtcgtttgtattgtttggagtgttaatattttttatgatgatcaaatcctttggttttatgatggcaggccatactgtaaagcgttatgcataacagttgctagtgtacgcctgttttttaaaaaagtaaatagcaaaatatcccttccagcctgttagcccctatctctaagataggggctaaatttttttgtggctggccgttggggtgcaggataagcaggaaaaaattagatatcgggtcttagcagaaagagcttttgctgcgtttggtaaaacagcaaaagtaagataccgcctttaagggtcgtaaagcagaaacctgaaaaatttaaaaaaattttttccatcgcttgcccaacctttgaaaccaagacgtcaagccgtttacaaaggcttggcggcgccaagcgtatcgcggcgaaaaacaaaaatgtacagaaagcacttctcgcgtcttgtgggggggtacatgggtgttataataacaaagggcattgctatatgttcaaaaaaataaaaatatagttttaaaatatttgctctgataatttaaaactatatttttaagtgctttttatttgcttgtataaaatacagggggtggaacatgtacgacgaaaaatgcctgcgtcagatcggcggcaacgtcaaatacctgcgcagcgtctgccatataacccagcaggacctggcggctcgcatcggcatcagccagacgcacctgtgcaatcttgagcatgaccatgcccggatcagcatgaagctgctgctgcgtatcgccaatacgctggggtgcgctctggaagtactgctggacacaaaagcggcggtggcctggggcgaaaacagggacgagccggaaatggaagcggttgaggaagaagaagaagcaagctattcgctggaagaagtgcgcctgctgctgcaaatactgcagccccgcaaaagcgcgtccggtttaaaaaggtaaaagcgatgaataagggagatggacgaagtgagtaaaagggagatacgtgccaaaagactggtggcggcagtactgctggcaatcagtgtgcagatgtggtctgcgccgccgctgtgggcggcggaagcgtcagtgcagacggaaacgtcggcggccggggaagcaaaagaaacaaaggacgcaaaggacgcaaaagcagcggacagcgaaaccggcggtgaagcggacgccggggaagaagaaactgtcgttgtgccggtcatcggctacagtacgcgctcggccgcaggcagcgactacggcgtcatgccgctggctgatacggctgttgacggcgcgctgacaggggtaaccagcatcaacgatgcaaaattttacgcagatactcatgatttgcttttgggatatgatgctaaatctcaaggtacaggtactgttgctcttgggtctgatgctaacgctggcggtcaatatagcacggcaataggtgctagtgcaagtgcgacggctgagaatagtagtgcgctggggatgtatgccagagctggatttaaagatagtgttgcgattggatttagttctaatgcgacggctgacaatatggtaagttttggcgtcactgaaaatgggggtagcacttggactacccgccgcagtttagagggtattgctaatatcgatatggaaggtactatcaacctgggcggcacgtggacgaagaatgcctctggcatttacgaaagcaatggcaaaggtgagctgactggcattactaagatcaacggaattgattttcagtatattgaggatagtcccagcctggccattggtacttatctgagtggagattatagttattctctggcgattgggggcggtgctgatgctgctgctaataatgctacagctgtaggttttagcactagtgcgtatggagaaaattctaccgcaattggcaatagcagtaccgtttacgaaaaaagtggtactgctattggagctagtgcatatgttcagaatggacatactggcagcgtcgctatcggttacgatagtgctacgacagctgccaatcaggtggccttcggtacaggcacagttacaacagacgatggaccggaagtagttacctggacgaaccgccgcagcctggcaggtatcagcgacatcgatatggaaggtgcgctgacaggcgtcaccagcatcaacggcaatgttcttgtacctatgaatgaagatgtgactaacaaaagccttgctattggcaccggggctgcttttacgtctcgttactcatcagaaacaatttgtaaaaatgccattgtcataggtaatggcacaagtgtggcgggtgatggcgcacttgctatcggttattatgctaatcagcgtgaagggtcttttgctggtggtataggaagtattgctattaacggttgggtttcggatggaaactacagtgtagcaatcaacggttttgtggcagaagccgacaatgttgtcgctatcggttatagagcatcgtcggatagcaacaatggtgtagcaattggtagcaatgcttatgctagttatgatggtactgctttggggtatgctgcgcagggaaatgacaacaacgctgttgctattggtgcatatagcgggacgacagaggaaaatcaggtatcctttggtcataaggctggcgataccaactatgcagattacagcaaatttacagacgacctgtttcgcagcctgacaaatgttgccgatatcgaaatgcacggcgctttgacaggcgtcacaggtatcgacggtgtaaccgtcagcggcacggatgccagcacggggctgaccgtgggcggcaatgccgtgattggcaaaactgatacgccgttcagcagtacgggctttgcagttgctaaagacggcgctgtgactgccaaaactgtcaacggagcgacgataacaggtactggttttaatggtgtaacgcttagtacggacggcaaagtcaacggcgcggctatcaccagtaacagctttaatggtgtgaagctggaaaaaggcgccgacagtcactataaagtgggcggcgtcgacgtaacgaaaatgcagactgacgttgcaggcaaagcagatgcggcgacagtaacggctctggatacaagggtcggcaagtcggaaacggatatcggcaccttaaaaacaacagtcggcgacagcagtaaaggcttggtcaaagatactgccgacttgaaagcggcggtcggtgacagcagtaagggtttggtgaaacaggtaagtgatgtcgatactgcttataaagcggcagatactgttctgcagggcagggcaaagacactggaggacaaaacggcaggcatcagccgcagcggcagtactactacactggaaacaaataccagtgtcagcagcagcggtataacaacgaataaagcaacggtcagcggtgcgacagctacaacgctggaaaacggcaagctgacggtgggcgcagccacagtacagaatacgggttttgcagtgggcagcagcagtttgaataatggcagtctgacggtagacggtaataataaactgacgacagcaggactgacggccagtaaagtaactgtaggagctgtaacagtgagcggcggcaaagtgagcggactgacggacgcggctttgagtgctgtcagtacggaagctgtaacaggcaagcagctgaacgcgaccaatacgacggtcagtgctttggatactgcttacaaagcagcggatacgcagatacggactgattttgcggcagcagatacgactttgcaaaataatatcgatgcaaaagtggcacagactgcctatgatacgaaaatgagcgctttggacaacgccgataatgctttgagcggcagagctacagctttggaaacaaagactgcaaaattcaatactgccggcgataacctgacggggatggcgaatattaccagtacggcggcgactttgggcggcgttggctttgcttctgcgggggttatgacaggagtttccagcattgacggtattgctatcgacgccagccgtaacctgtccaatgccggtacttataacggcgtgacagttgcggtggcaggtatcagcggcaccagcgtatttaatggtgctgcgataaccaataacagcttcaatggcgtaacattggaaaaaggcgccgacaatcactataaagtgggcggcgtggatgtgagcgagctgaaaactactgttgacagcatcagtgctgacggcgttggcactgccgatacggcaggtatcaaacgtgatacgacaggtacgacgactaccagtatcgaaaccaataccaagatcagcagcagcggtataacaacgaataaagcaacggtcagcggtgcgacagctacaacgctggaaaacggcaagctgacggtgggcgcagctacagtgcagaatacaggttttgcagtgggcagcagcagtttgaataatggcagtctgacggtagacggtaataataaactgacgacagcaggactgacggccagtaaagtaactgtaggagctgtaacagtgagcggcggcaaagtgagcggactgacggacgcggctttgagtgctgtcagtacggaagctgtaacaggcaagcagcttaacgcgaccaatacgacggtcagtgctttggataatgcttacaaagcagcggatacgcagatacggactgattttgcggcagcggatacgactttgcaaaataatatcgatgcaaaagtggcacaggctgcctatgatacgaaaatgagcgatttggacagcgccgatactgctttaggcagcagggcagcagctttggaaacggcggtcaatgacagtactacaggtctggcagcagtcaatactaaagtaggcgctttggacactgcttatcaggcagccgatacgcagatacggactgattttgcggcagctgataatgctttgaaaacagagctgaatactgccattgatgaaaaagctaagaaagcgactgatttagcaggttatggcattaccgatgcttataccaaaaatgacgctgatgcaaaaataactgcggcaactgccgatatggcaactaaaacgcagctaacggcagatatcggaatagctaaaacagcgcttgaaagcgcttatcaggcagcagatactgctttgagcgacagagcggcagccttggaaacagccgctacaggtatgagttatgacgctggcaagaatactaccacctttactggcggcgtgacggcgactgtactgacggcaggagagtttaaagtcggcgcaacaggcttcggctttggcaatgacggcgctttaacggctaaaactgtcaacggtatagagatcaaaaaagacgaatcgaaagtaatggtaggcggcatcgacctgacggcgctgagcaatggtgatgtagttaccgataataccaaaggcatcggacggaatcaggatacggcaacgactactatcgaaaccaatacggcgatcagcagcagcggcatcactactaatgccgtaactgccagcggtacggtaaaagcaagtgaatttgtagaaggaagccaaaaactttctgataaatatgctgctaaaacagcgctggctgattatacgactactacagatatgaatacgaagttcgctgattacgcaactactacagcagtagacaccaaacttgctgattacgctaagagcgacagcgtttacagcaaagcagcggcggatacggcctttgctaaagcaggtgacgtcgatactttaaaaacaacagttggtgacactgatggcggtctggtaaaagatgttaaggacctgcaaagcggcaaggcagataacgcgactacgctggccggttacggcattgctgacgcgtatacgcaaaccgaaatcaatgagaagatcgttgaagcaacgaaggatctggcgaccagcgcgaccgtaacagatattcaaagcgggctggaggaagtgactggcaaaacggcagggctgagttatgatactgcttccggaagcagtaagttcagcggcagcgtggttattggcaatgagggtgctaaaacccatactcaaatcacagatgatgcgattattttcggtgagggcactgataagcaggtcacagtagatgccagcggtatccacgtaggtaaaaaagcggccggcggcattgctttatatgccgatgctgacggtacgcatatcgatcacaccagtctggtaacaggctcggtaacggcggacaatctgaacggcgtcgctatcagcggcaacgcaactgacggtttgagtgtaggcggcgtcagtatcaaagcattgtcggaacgtctggacagcctggaacaggatggcgtagctaccgccgacatgggcggcatcaaacgtactgacgttgtagaaaacagtggcaaaacaataatcgaagacacaaccagttttactaaagacggcttgaaaacagcgaacctggaagcggcgacggctgctctcggcggcgtaaattttgccgcaggcgcagtgacaggcgtcagcagtatcaacggcgttgtttttggcagtgatggtaaaatcggcggcgtgagcctgagcggcggtaaagtggacggcgtggacgttggctggctggatcagcgggtaaaatcgctggaagacaacggcacaggaggcggaggtacgggcggcggtggcagcagtgccaataccagcggcatccacaagcctgacggcgatactactaacatcgaaggcaataccagtatcactactgacggtattgacactaataaagtcaatgccagcgattcgatcgttgtcgctgatggtgaaaagaataaaacagttatcagtaaagacggtattctggtggccgagggcgaaaagaatcaggtcaagatcaatgaagatggtatccacgttggtaaaaacagctcggtcgtcaacgacaccgacggctttattacggataaaggactgtatatcggcgtcagcagcagcagcgataccagcacagccaaattcagcgttgcccctaacggcaacctgagcagcaaagctggcgactacggtttcagcaatacctcggcagatggtgccaaatttacccacagcggtgatacggcttacggcacaggcagccagctggatactacgatccagggcaataaggtgactaccggcaggatagatacggacgagttatacgtagacggtaataaggtaactgtagccggaggtactattaaccagactgacgccgtaaacaaccatttgagcggtgctgatgccgacgggaatacagtgactaatgactttaagaccagcgctgtgaacggaacgacacaggcggctgagaaaacctcggctgacggtaaggaaagcaccaagaccgtcaataatacctcggcaggcggtaccggcgtgacgaccagcaagaccacgaccgacagcaaagacaatgtgacggtgaaggaaagcagcttcggcacgaatgaaaaaggtatgacgctgagcacaagcaataaggtaactgacaaagacggaaaggttactaaagacaccagcggcacgaccacgatgaccggcgacagtatcagcgtcagcaaaacaacgacgactacggaaaaagacgctgacggcaacgagaaagaagtcaccaagaccagcggcaccacgatcggcagcggtgaagtgaccttgaaacgcgaggacggcagcacgatagaagtaggcagcgccattgaaggtatgcagagtgatatgcgagagctggacggcagggtcaaccgtatgggagtcgagatcaaggaagtgggcgcactgagcgccgctttggcaggtctgcatccgcagcctgaaaacgccaacagccgtgcggatttcgcaatggcgatgggcagttatgagggcaagcaggcactggcagtaggcgggttctatcgccctgacaaacggacgatgctgagtatcgggggatcgacgaccagcagcaagcatatgatgaatatgggtatcagcattgcgctggacaggctgccggaagcagagcgcagggcgaaggaagcggccaaagcggctggcgttgagcaggaaacactgaacagggtgctggagcgtctggcggctttggagcaggataacaggcgtttgcaggctgataatgaaaagcgtgatgttgcctatgagaaactggctgctgattatacgcagctgaaagaaaaatatatagaagaaactgctgacaggcagcagaaggtggccgataagtttatggcagtactcagcggcgatgctgcggctgtaacgcagctgcaggtagatatggtgccggagctggcagagaagatgacggcggctaattttgccgctttgcaaaagcagctgaaggaacagttcggtattcagaaatcggtgcgttttgcggtttatgagcggttcgaccagggcgaccgcctgacgtatcttgtaggcttcagcaggcagcaggctgtgcgcgcggtatatggtttcgataaaaacggtaagctgagcgaattcgtttttgtaccgttggaagtaaaggcggtacagaaataaaaatcaataaaacccaataaaaaaggccggactgttaagtccggcctttttatatagataaggtctgttaccaggtgaaccaggtatagatgctgaatactgtcagcagcatgacttctaaaataaacatcggtttgagggtcttgaagaagtcggctttaaaataatccagggtgacgataaaacacatatgggtcggcgtcagcatttgtccggctacgccgaaggccatggccacgcctgccaggttcaggtcgccgggcgacagggctgctacgatgggcataacgatcgctacatgaccctgtgacagacctgtcaggatgccgataataaaggagatagctgcgataatgacaggtacgggcagcggtgaggctttaaaatcttccacgatggtatgcagaacgttggtatcggtcaggatctggataaaatagaggatgcacaaaacgttcatcagcattttccagtcgcaggcgccggtaaaaacttctttgatgttcaggacgcggcttgtcatacgcaggaccgggatcatggcgaaggtgaccagagccatagcggtggaggcgttaaggtcgcagaaaactaccagcatgaagttgattacgaccggggaaagcgacagtaccaggttcataatgtcctgacggcgttcggccggatcgacatctacattgctgttagcgggcatatccagcggccggatgagcaccagccagcccagggcaaatgccagcagggtcagccagcacaggtgggcgataaagtcgctgaaggcaacgccggcgatgctgcaggccatgatcatgccgggtatgatgggactggaaaattcaaagatatgccggaaccagaaattgatggcggctttatgttctttggtaaggtctgtattgcggctggccgcttcgacgatgggcgcagaaaaacgtgcgccgcccagcgaaggcagcaggccgagaaaagctggcataatggccagtgtaaatttttcgctggcaaataagcgctgcagggcgcggatcattccgtctaaagcgccgctggtacgcagctcgatttccaggcacatgacaaaatagagcgccaggatcaggtcgtaggtgcgctgcatggtaagcgtggtggtgaaggcgctgaccagataatggaactgaggggctactaaagcccagatcagcaggccgcctgccaggatcgccggaccgatggggatgtggcggcgcagcaggatgatgatcagcagcattgctaaagcgatcacgagaaaaatattcattttaaaaccttctcactctcaaataatatatctattatacaaagaatgcagagaaatttccatattcggctgaaaaaaggtataataaaagaaaatatacttctggaggtgtactatgtatatcagtcgcttatgtttgcagaattaccgctgttatgataattttgagatagatttcaacaaagaactgactgttatcgtagctgaaaacggtaagggcaaaacagctattctagatgcggtcgctgtagctttagggccttatctggcgtgctttgacggtgttaaggccaaccagatcagtgatacggatgtacgccagaccaaagatactgtaggcaggactttggagcatgtgctgcggatgaaaagccagtatcccgttgtgattggggcagaaggcgttgttgacggcgaaaagatcacctggaaaagagaattgaaggcggccggggggcggacgacgatcctgaatgcgaaggctttgagcgagtatgggcggcatatggtcaaggcgctgcgggaggtcaacgacagtaaaataattttgccggtcatggcttattatggtaccagcaggatgtggaaggataataagctgttcgagctgcgcaaggatatcagtctggagcgcggcagcggctacgtcgattgtatggagccttcgtcatcatataatacttttggacagtggttcaaatatgcggcgatgagcgcgatggaatttgaccgttatctggccgagagcggtaaaaaggatgaaaagaatccgtatacggaagtgctgaaggctgtgcgtcaggcaatcattacctgtatcggcagtatgggctggacggatatagattacagctttgcttttcaaaatctgatcattatgcatgaaacgatgggtgtattgccgctggaggctttgagtgacggtacccgcagcgtgatcagtatggcggcagatcttgcgtaccggatggtgcggctgaatcctgaccttggcgccatggcggctcttgaaacgccgggcatcgtactgatcgacgaagtcgatatgcatttgcatccttcctggcagcaggcggtagtgtatgatgtgcggaaggcgtttcccaacgtacagtttattgtgacgactcacagtccacaggttctgagcacggtccctgctgaggctatccgtatcctgcgctgggacaataatctgatcaatatcgataaacctgccttttctttaggcgctgaaagctttcagctgctcaaggatattcagaatgtcgacacgcgcccgcaggcattgccgatcgtgaaggatctgtacaggtatctgatgcttgtgagcgaggataaatgggatacggacgaggccagggagctgcgcaaacgtctggacgaatggtctaaagggtgtgaaccggctttggtccgtgctgatacggaaatcaggatgaagtctttcaggaggaagaaaaaatgaaacgggtgtacaaatctccggctacacccgagcgcctgtgcagttatgtgaaggcgttcccggacgagacctgggagcatttccgccggcgcaaccgcaggggctaccgcgaagtaaagcagcagctgctgcaggatcagcacggtttatgcgcgtattgtgagatcagtatcaagctggctgagtttgaggacaatgttgatgatttcagggtggagcatttcttccccaaagtagctacacagcttgaaaaacacaattatcacctggactggcataatctgcttggtgtttgccatggcggcagccagccctatgtgtcggaccctgaatggcgttattccagcaggaagaatgaccggagctgtgatgtaccaaagggcgggaaaccgatttccgagcggatactgaacccgctgaagataccggcgtcagtcaggctgtttcgttatcaggagcataccggtaagatgatcgttgacgaaagttcctgtccgaaaaaactgcaggccaaggcgcgcaatacgatccgcgagctgaatctgaacgcgccgcggctgcagcggatgagactggcgctgatcaggatactggaggacgagataaacagtgctttggctggcggagcggtgctggaggagtttttgccgctgctggcggaaagtatcctgctgccggatgaagatggcaattatcagccgtttttttcagtggcgcgctggtatctgggtgaatttgccgaggatattttaagggaaaataattatgcgatgtaacgcactcctgcttaaaaataactttttaagcaggagtttttttgtggaggtagaaagtaataattatcatgttttcagataattgcagaaagatataggggagcggagaaatatggaattaactaagaaagcgtttaaagcgtatgatgtgcgcggcgttgtgccgacagaggtcaatgcggagatggcttatcgggtagggcgcgtttttgcggcgatgtttgcagctgaaaaagttgtggtcgggcatgatatacgcttgagcgggcgcgagctggtcgatgctttgacggaagggctgcggcacggcggcagtgatgtgatcgatatcgggcagtgcggtacggagatgatttatttcgcgacggcacatctggacgctgacggggggatcatggtaacggccagtcacaatccggcagagtataacgggatgaagctcgtgcgccgaggagccagaccgatctcggccgatacgggactgatggagatcgctgatatggtggtcgacagtaaggattttcctcatgtcaaggtgccgggcaagacggagggtgctgtaagacgttatgatatcatgccggaatatatcgagcatttgctgggatatatagacatcaagtcgctgaaaccgctgaagatagtggctaaccctgggaacggcggcgccggcccggtcttgaacgagctggccaaatatctgccttttgaatttatcaagatcaatgaaatacctgacgggactttcccgaacggggtgcctaatccgcttttggtaccaaatcgcgaggctacggcaaaactggtgcgcgaatatcaggctgatctgggcgtggcctgggacggcgattttgaccgctgctttttgtttgatgaaaaagccgaatttattgaaggctattatatagtcggtttgctggcagaggtatttctgcgcaagcagccgggcgccaagatcatgtatgacccgcgtctgacctggaacacgcaggaggttgtggatgcggccggcggtgttgctgtgcgctgcaagagcgggcatgcctttatgaaggaatgtatgcgtgccaatgaggtgctgtacggcggcgaaatgtcggcgcatcattattttaaagatttttcctactgtgacagcggcatgataccctggctgttggtggcggagctgttatgcaccagcggtaaaactttgtcggagctggtcgaagaacggatggaaaaatttccctgcagcggcgagatcaaccgcaaggttgaagattcagcggccgtactggcggcgatcgaggctgaatatgcgcccggcggtcaggtcgataagctggacgggctgagcattgattattccgaatggcgtttcaatgtgcgtgtttccaatacagagccggtgatgcgtctgaatgttgagaccagaggcgataaaaagctgctggctgaaaaaacagcggaactgctggaactgatcggcggcgaagaagcctgacagagcccgcgtctgatcggtgctggcggcaatcaaggtaagtgtttatttaaaaatttatttcctgttcaagtggagaaagagtgatacagatgactgcaatcaaacaagtacgcaaggctgttattccggcggccggattaggcacgcgttttctgcctgctactaaagctacaccgaaggagatgctgccgatcgttgataagccgacgatccagtatattattgaagaagcgcttgcttcgggaatagaagatattctgattattaccgggcgcagcaaacgtgctatcgaggatcattttgaccgcagtatcgaactggaattgaaccttgcggccggcggtaaagcgcaggagctggagatggtcaaaaagatctctgatatccggatccactatattcgccagaaagagccgcgcggattggggcatgctattttatgcgcgaagcagtttatcggcgatgagccttttgcggtgcttttgggcgacgatgtagtagacggtgaagtaccggcactgaaacagctgatggatgtttatgataaaaccggggccagtgttttgggcgtacaggaggtgccgcaggaaaaggtatcgtcttatggtatcgtagcgtccgagcctacggccgaaccgcgcacctttacggtcagcgatatggtcgagaagccgggcgttgaggaagcgccttcgcggctggctgttttggggcgttatatcatcaatcccgaggtgttcccgatcctggaggctaccaagccgggacgcggtaatgagatccagctgacggacgcattgaaggagctggctaaactgcagaagatgtatgcttataattttgaaggacgtcgttatgacgtcggcgataaacagggctttttggaggcgacggtggaaatggcgctgaagcgtcctgatctgaaggataagtttttagcatatttacagactattgtcagtaagaactaaggagattgaatgatgaatgttctggttaccggcggtgccggttatattggttcacatgtagttgaagaattgcagaaaaacggtttcacaccgatcgtttacgataatctttccacaggccatgtggctgcagtgcctgaagaggtgcagctggtggagggcgatatccatgatgttgcttttttgaagcatatcatggcccagtttgagatcgacgcggtcattcattttgctgccagcagtctggtcggcgaatcgatggaaaatccttccaagtattattttaataatgtggaggggtcgctgcatcttttggaagcaatgaaaggcgccggcgtagattatatcgttttttcgtcgacggcggcagtatacggagagcctgagagcgttcccattaaagaggacagctgtctgaacccgactaatgtttacggccgcacgaagctgatgatcgaaaaaatgctggctgattatgatatggcttatgagatgcgttatgtggcgctgcgttattttaacgccgcaggagcttcgccgagccgtgatatcggcgaagaccatgatcctgaatcgcatttgatcccgctggttttaaaaactgcgcagggcgtacgcaggcaggttgccatctatggtactgattatgctactgcagacggtacctgtgtgcgtgattatgttcatgtctgcgacctggcaacggcacatgttctggcactcaagcatctgctggctggaggagcgagccgcgtgtataatctgggcagtgaaaatggtttcagcgtgcgcgagatcatcgatgctgctaaaaagattacggggatagactttactgtggtggaagaaagccgccgcagcggcgatccggctgtgctgatcgcttcttcggagaagatcagggacgagctgggctgggtgcctaagtgcagtactgtcaatgaagttatcagtacggcctggaaatggcataagggacacccgcagggctatgaaggctgaaaatgtaagaccggtttgcctaggcagccggtctttttgctttcaagccgtttttttgttaaaataagagttcaggaagaagaaaacagaggacgaaaaaatgcagcttgttgtagataaaattgccaggagttttggcattaatgaaatatttaaggatatcagctttatgatcgataaaggtgaaaaaattgggctggtaggcgtaaatggcagcggcaaaacaacgctgctgcgctgtcttttggctccggaaacggttgacggtggtgtggtgcgttttgaacccggcttgaagatcggttatgtggagcaggggtttcagaatatcggcaccggcagtttgtggcagtttatgctgcgctcctgcccggagatagtgacgatgcgtgaagaactggcggctttggaagcactttctgcccagctggaaccgggtacggagctggatggggttttagaggaatacgcccgtgtgatcaaacgttacgaacatgtcgacggatataattatgaagcgtttattaaaagagtcttgattggcctgggttttgaagaagcggtctgggataagacggcggagcacttttccggcggacagaaaaccaggatgatgctggcggcggccctggtgcggcagcctgattttctgattttggatgagcctacaaatcatctggatattgctatgactgagtggctggagaagtatctgcaggaatttaagggcgggctattggcagtcagtcatgaccgtgcgtttcttgataatatcgctacacggatactggaaatggaaggcgggcatctgacttccttcaaaggcaattacagcaaatatctggtgcagaaagagctccagactgcaacactggaagctgcttatgcttcgcagcaggattatatcgcacggacggaagcctatatccgtcgttttaaagcgggcatcaaaagtaagatggcgcgtggacgccaatctcagctggatcgtctggagcggatggacgcgcctgtgcagcatgaggaatttgccctgcgcctgccgcctgcgccggagtctgctgaacgggtgctgattttggataacctttctgttggttatggcgataatgtactgctgcatgatatagatttggtgctgcgcaagggtgaaaaggttggcttgctgggtcctaacggtaccggtaaaacgacattgctgaaaactgttttaggcgagctgccgccgctgaagggaacagcgcagatcggcaatcgtgtgaaggtagggtatttttcgcagagctatgaaaggcttgctcccaaacagacgctgctggataattttttggtggaatatggctttactgaggaacgtacgcgttcactgcttggcgggatgctgtttcacggcgacgacgtttttaaagagatcggcactttgtcaggcggccagaaggcacgtctggtattgctgaagctggtgctggacggggcaaactgcctggtgctggacgagccgaccaaccatcttgatattatggcgcgggagactgtggaagctgctttgactgcttttgacggaacggtgctggtggtcagccatgaccgttattttatcaacgagatcgctgacaggatctgggaactggaagatcaccgggtctgtgattataaaggcaattatgatttttatttagaagaaaaggctaaaagacggctgctgcaggctgccgtgccgagcagcgcccctgtgcagaggaaggctgcgcctgagccgataagcagtactgtaaaaagttccggcaggcataagcgtgcctacagcccgcaggaagcagaaaagctgctggcaaaagttgaattgagtattcgtgaacaggaggctttgctgggggtgctggaaggacgaatggccgatcctgacagccatacagacccggaagccagcgctgctttggcggcggagcatgctgccctgcaagcggaaatcgagaagctgatgctgcgctgggaagaactgatgacagcggcagaagcgttacaggagtaagcagaagatgttaaatgcaatgacggacgaagaatatatgcagttggcgctgcaggaagcccgggcggctgacgtgatcggcgagataccgatcggcgccgtacttgtggttgaaggtgaagttgtagcgagggcgcataatatgcgcgaaacctggaacgatgcgacggcgcacgccgaggtcatcgtgatcagggaggcgtgtaaaaagctgggccgctggcgtttagagggggctgtgctttatgttacagtcgagccctgtccgatgtgttcgggcgctatcgtcaacagtcgtatcgacaaggttgtttacggctgtcctgatgctaaagccggaggggcagagtcgatctttaatatcatcagtaatcccaatcttaatcatacggcacaggtcgtcagcggtgtctgtgaagccgaatgtgcacaggtaatgaaggatttttttagacgcagacgtgcagaaaacaggctggcaaaggctggaatagctgctgacagtgcggaaaattaagaaaaactctttgcaaaatacggatttatgatataataaataaggctggtttacgcggagaggtgtccgagtggtcgaaggtgtttgactcgaaatcaaatgtacggcaacgtaccgtgggttcgaatcccaccctctccgccagatgattatgcggttcttcatttatttgaaggaccgtttatttttttgaagcggcagacatcagcaagaataaaaatatttgacaatagttagatatctaattataattgagatatgatgaagcagacaaaaacgatttttttgatcagtaaaataagagagaaggctaataaattcattctggcagatctggcgcagcatggtattactaaactggctccctcacatggagatattttagcgtgtctgtatcaaagggagcgggtgactatgaaagagatttcagactctatccatcggacgaaaccaacggtgacggtgctcgtaaataagctggcagagctgggactggtgaagaaatttcaggcagcggaggattcccgggtcatttatgtggagctgactgagcagggaaaagcattgcagaagctttttgaaaaaatttcagctgatttagttcaaaaagtttttcaaaatatggaacaggaagaaatgaaaaagctggaaatatctttgcaaaaaattctggataatctggggtaaaattttttaagaaaatagttagacctcgaactaattttagcagctgataaacaagggacaacaatatttttatgatagataaacatgagatttacgcagggaaaggaggctggcagatgaaaggtctgcggcagtgtttcggaaattcaaagcaggctgcggctaggtgtgcaagcggctggatcgagtgattaccaggccctgaaaggggtaaataaaagaaagcgagttgagttttatgaaaaaagaagtattggattatgttattgaaaagacacatgaattgatgaatgctgcttcctgcagcagtgaagctaaggcagcggcgcagagctggctggatgcggtcggcacagaacgggaagccgatgaaacaaaagaatatattgccgaattggaagcggatattatgccgatcgacaatctgatagcttttgcaggatctgaggccggagccggatattttggtgccgaactggcaaagaatattaccgcacatgctgaagaaataaagcttgctggggctgaatactgcgattgccctgcctgtgcggctgtggcagaaatacttgccagaaaaaaagaattgctgtgaaggtttttagcaggttgattgcgactgcttgcaacagaatattgctgataaaaggagtttcatttatttgaagctccttttatttttataattaagtattgatgccggatttttaattttagtcaggcttcggaagctgtacggcagattaaaattttgttatgataatatcatcagccaaattagtgatggaggcatgaagtgaataattctgtggtaatagataaaaagttttactgggaactgtttaaatctacgttcctgatcagtgcttttacagtgggcggtggttttgtcattatcccgctgctgaaagccaaatatgtcgatcattataaatggatgagtgataaggaagcgcttgatcttgtttcagtagcgcagtcggctcctggagtggtggccgtcaatgccgctatcattataggttatcgtctggcagggtataccggcgctgcagttactttgctggctacagtgctgccgccgctgatcacactgacggtgatttcgtatttttatgatgcttttgcccataattattatgtgcagattttgctgcgtggtatgcagtgcggggctacagcgctgatacttgacgtaggcataaatctgctgcagaaagagctgaaaaagaagctgctgctgccgtgtttgattattttcggcacttttatcgccaattatttttttcaggtcaatatcatgtatcttattctgatcgatgccgttatcggttatttatggctgcaggatgaaaaatatagctaaggaggtatggaagtgatatatataagtttgttctggagtttctgtatggtcggcgctttttgcgttggcggaggttatgcttccataccgctgatccagacgcaggtcattgatgtccatcattggatatcattcagtgaatttatggacgttgttgctatttcgcagatgacaccggggccaataggtatcaatgccgctactttcgtcgggacaaaggtggcaggtattggcggcgcggtagcggcgacggcaggttttgttacgccttcgcttattattatgatcgcattggcaaagctgctggcaaaatatggagatatgggagcgatcaggggtgttttgaacggcctgcgccccgctgtagtcgcattgatagcttctgccggtgtgatgtttttaactctgtctttgtggaacgaagaaaaattgccggctgtctggagtgatcctgatctggtcagcacgatcgttttgcttgtttcactggtcctgatcaagaagaagatctgcggcgtgatccaaacactggttggttcggggttattgagtttggcgctgcatttttttataaaataatatggttgaaaagtaattaaaggattcctgactgtttgcagtcaggaattttcttttaaaataatattttaatgttaagaattgtttttcttgttttttaataattcatttaatataattaaagaaaaatgacggataagaatacgggagagcttaatatgatcagtgccgggcagaaagtaaacaagctgatgcaggacttttttactgcttattttaatgaacgcgattataaagctgccgcaggctttctgcgtgaagacatcagatggataggtctgggggcagtctgcagtgccagagatcgcagtgaggctgtaaaatttttgcaggctgaaattgcagctgcaccatatgcggttttctttgaatatgaaaatgttcaaaatacgatgctgtctgaaacggcggcagtatttctttgtgatctgctgctcaaaaaaaataaagatgggtatgacagtgacataagcatacgtgtaatggcagcctgcaattgctgtgattctgtatggaaaattgcggagctgcatgtttcacaggcaaatatgggaccggagacaggtgattttttcccggcagcgttcagtatggaaaaggttgccgaggtcgaaagcagcattaacaggcaaatgctgggtctgcttaaccgcagtataccaggtggtattttaggcggttatgttgcgccaggttttcctttgtattatgttaatgaaagaatgcttgcttatcttggctatacttatgaggaatttgtagcagataccaaaggtctggttatgaacggcatccatcctgatgatttggaacgggtggagcagattgccagccgggcgatggatcaggatagtgagtatgaagttaagtaccggatgaaaaagaaagacggcagttatatctgggtcagtgatgttgggaaaaaggttctggctgtgaacggaaatgctgcctgcatcagtgtgatcagggatatttctggtgagatagaagcaaaacaaaagcttttcgaggaaagcgttgagaacaggcagcagaagaatatcctgcagaatattatcgatactatgcccagcggcctgctgcaatgcagctttgacaggatccccaaagctttgatggtcaacaggaccggggctaatattttagggttcgagaatgagcatgagttttttctgcggagggatgtgtgtgataatattcttcgctgtatccatccggaagatagaacaaaggttttagaggaacttttcagtattgcagaggaagggatcgtcaagaattcaagccaccgtatcaaaactgcagcaggcgaggaaagatgggtacggtctgctgcctgcgttattcaaaatcagcagggggaaaaaatctatcagataattttccatgatgttaccgaaatcctgcagctgcgccgcaaaaaccagcagtgggatctgatggagcgcagcgcgttatatacggctatcacatcagcttatccgatgatcattttcggaaatcttacacggaatacctgcagtgttttagatcaggagggacagagcctgcattcgctggattgcggcagctatgatgctatggtcaatggagtgttgggttcggtagcacctgagtatagagatgagtttaccagtaaatttgcccgtcagaaccaactggcagagtatgaacgaggtgctcacgaaacttatatggagcatcgccagcttctggatgatggacagtatcattgggtctcagcacataaaatcaaggtggaaaatcccgttaatgatgatattcttacagtttcgctgattcgctgcattgacgagcaaaaggacaatgaggcggaaaaaaatcagattttgcgtactgctttaggtgcggcagaggctgcaaacaatgctaaaacggaatttttatcgcggatgagccatgagatacgtacgccgatgaatgccattatcggtatgacagctatagcgttgtctgcattggataataaagagcgtatcagcgattgtctggcgaagatcggtatttcggcaaggtttttactgagcctgatcaacgatattttagatatgtcgcgtatcgaaagcggacgaatgagtttggcacatgaaaaatttgattttgaagaaatgatcaacggtctgaactctcttttttatccgcaggcggaagagaagggcttgaaatttaatactgttatcgaagggatgacagaagagctttatatcggtgattcattacgtttgcgtcagattttattaaatattttatctaatgccttaaaatttactccggaaggcggcagaatccagtttacgatcaggcagatgagccggggtgataaggatgcctggctgagattcaccgtaagcgatacaggtattggcatgagcaaggtttttcaaaagcatctttttgaatcttttgaacaggaaaatcccaatatttctatcaaatacggcggtactggtctgggattggctatttgcaagaatctggtaacgctgatgggcggttcgataaatgtgcacagtatcgaaggtgttggcagtgagttctgcgtcgatgtaaagttaggcctaacggaagaaagctatcgacgtaaaaatcttgatcttctaaagttcagggatttgaaaacgctgatagttgacgatgacattgtgacttgtgaacatgccagcctgattatgagtgatttgggggtacaggcagaatatgtgacttcgggagctttggcagtactggaaatcgaaaaaggcatcagggaaatgaacccttatgatattgtgctggtagatctgaaaatgccggatatggacggaattcagacaacgaaagctataagacggctggttggagctgagacattagtagtcgttatgacagcatatgaatggaaggagcttgaagcagatgcaaggcatgcaggtgtggacttttttatcaccaagccgctgttccgttccgagctggtagatttgtttgaaaagatcaatgatttcagtgaagcagtatatgagccggaagcagcaaaaggagaagtacagtttgctggagaacggattttactggtagaagataatgagctgaatctggaagttgcggcaagtctgctggaaatgaagggactgacgatagaaagtgcctgcaacggtctgcaggcactagaaaaattctgttcaactcctgttgggtactatgatgctgttttgatggatatcaggatgcctgttatggatgggctggaagcagcacgtaatatcaggctgtttgataaaagtgatgcgcagacgatccctattattgctatgacggctaatgcgtttgatgaggatgtggaaaaatcacacgcagcgggtatgaacgcacatttggcaaagccgattgacccggaaaagctgttcgcagttttgcaggaatttatttaaggtgattgatagtaagctgaataaaaaggtatgggcatgcccatacctttttattcttgacctgtttttgtaacatctgtagcgaaatagtaaatggttaaacgtaaagaataaatagtatttgcgtttattagcatttttgtttagaattattagaaatgtgtattaggggaaagaggttgctgctgatgaaaattattgatttattaaaaaacgaaaaggtgtgcatttcctgcgagctgtttccacctaaagcaggtacagagctgcagaatgctttgaatatagtcagtgatattgccgaggtgggtccgcattttatgagtgttacgtatggggccggcggtacatctgtgggtcagacggtggctattgcccgggcaatagaagccagcggacgcccagcgctggcgcatctgacctgtatcgatgctgatgaagccaagatcgacggtgttttagcacagatgcgggctgctggcgtccagaatgttttggctctgcgcggagatgcggtgaatggcaatgacggggattttgcccatgccagtgatttgatggggaaaatcaaaaaagccggtgatttttgtgtcggcggggcctgttatccggaaggacatccggaagccggctctctggatcgtgatattgtcaataccagacggaaaatcgacagtggctgcgactttttagtgacgcagatggtgtttgacaataatattatttacaattatatgtacagactgctgcggcatggtatcgatgtgccggtcgtggcgggtattatgccggtgacaaatgccaaacagatcaaccggatctgtgaattgagcgggaccaaactgcctgcgaattaccgcgctatcgtcgagaaatttgcagatgatcccgaagcgttaaaacaggcgggtattgcttatgctacggggcagattgttgatttaatcgctaacggactgaaaaatattcatgtttatacgatgaaccggccggaaatcatcggcgggatcatgaaaaatctgtcggagatcgtaaaatgaagtatgacagagctgaagccgtgaggtatatgggcgcgaaaaaagatgataatgaggcggctgttttggctgatctggcttatttgcagctgcggaacgaagtgcggcccagaagctgctggcagatttttgcgtgccgtgtagatgatgcaggcgtgaccttagtagataatggcatgcgttttgaaagcaaaaatttggcaggacatttgcagggctgtcaaaaagcggcggttttggctgctactttaggcagtaatgccgatactgttttgaggcgtctggcattgactaacgtagcacaggcagctgctgctcaggctgtatgcgcggctctgatcgaaagttattgtgatgaaaccgaagccgagatagcggctgcagcagggcttcacttgaaaccgcgtttttcaccggggtatggcgactggcggctggaggatcagcgtcagctgcttatgctgctggattgtgcaaaacgaatcggtctgactttgaccgatggttatatgctgactcctataaaatcagtgacggctgtgataggattgactgaagataccgtctgcaataccagtaaatgtgcggcgtgcgttaatcgagcgtgcgaatttagaaaggaatgaaagcatgggtttcagggatttattaggtaaagaattattattttttgacggcgctaccgggacgatgctgcaggcattggggctgcagccgggcgagctgccggagctgtggaattttactcatgcggctgaagtgcagtctgtacatgaagcgtatttgaataacggttcgaatatcataaaaagcaataccttcggggcgaaccgtcttaaatttaaagggatggatatcaccgttgatgaagttgtgggggctgctttaaaaataggcaaagctgcctgtgccggacgtacaaaagcgtttgtggcactgaatctcggccctaccggaaaattactggcgccttatggtgatcttccgtttgaggaagctgtggatatttatggtgaaatggtacgcagcggtgccagacacggagctgatctgattctgatcgagacgatgagcgatacttatgagatcaaagccgcgcttttggcggcaaaagaaaactgtgatctgccggtgatcgttacgttgacgtttgatgaagatggtaagctgttgaccggtgctgacgttttgagcgcggtagcaatggtggaggggctgggggcagatgctgtagggtttaactgcggcttgggaccgaaacaaatgcgcaggctgctgccgcagctaatagaagcatgctcgctgccgatcgttttgaatcctaatgccggtctgcccgtacagcgtgacggtaaaactgtctttgacgttgccgcagatgaatttgcagagctgatgcaggaaatgataccactgggtatttctgtcgccggaggctgctgcggtactactccggaacatattaaagctctgatcgaaaagtgctatggtatgaagccgggaggacgccgcagctgtgatctgactgtggtttcttcttatggcaaagctgttgttatcggcggggagcctgtgatcataggcgagcgcatcaatcctacaggtaagccgcgtttaaaacaggctattttagacgcagatctggattatatttgccggctggggttggagcagcttgaaaatgacgcccatatcctggatgtcaatgtaggtgtgccgggtatcaacgaagctgccgctgcagagaaaacagttctggctttgcaggccgtcacttcggcaccgctgcagatcgatacttcagattatgagactatggagcgggctctgcgtttatataatggcaaaccgctgttaaattctgtcagcggtaaagatgaatcgctggcaaaggtactgccgctggtaaaaaaatacggggctgttgtggttggcctggcgttagatgatgacggcattcctgcaacagctgcaggcaggttggccgttgcggagaaaataatcgcacgcgccgctgaatgcggtatcgaaaaacgtaacattattattgatccgctggcgctgacgataagtacgggacctgacaacgctgctgttgacttggaagtgatccgtaaattgacagagcagaaaatcaaaacgattatgggcgtttctaatatttctttcggactgccgtcacgtgatgctgtcaacagtacatttttcactctggcaatggaggcggggctttcctgcgctattatcaatccgcagagtaaagcgatgctggatgcttactatgcgtatagagctttaaaaggattggacggaggctgcaaggcatatgtgaagcgttttgctgattacgtaaataaagttccgacagctgctgtcagtgaatatacgctgcacgatgcgatcgttaaaggtttacaggaacagagccgtctggctgtgacccggttgctggaaacagaaaaaccactggatattatcaatactcagatgataccggctttagattttgttggaaatggttttgagagaaaaaatctgtttctgccgcagcttttgatgagcgccgatgccgcgaaggcagcttttgaggtgatacgcgacaggatggctgacggtggcgctgtggaaaaaggtactgctgttgttattgctacagttaagggtgacatccatgatatcggtaaaaatatagttaaggtactgctggaaaattatggttataacgttatcgaccttggtaaggatgtagctgtagaagcaatagtgaaagctgtattggagcacaaggctcatgttgtaggactgtcagctttgatgacgactacagtaggtgcaatggcagctacgatcaaggctttgcgtgatgtctgcaactgccgtatagttgtgggcggtgctgttttgacacaggactatgctgacagtatcggcgccgatcactacgcgcctaacgctgtcagtgctgttggttatgtcaacgaagttgtagaaaaatgatttgctgacaggcctttgcagcgggggacagctgcaagaacggctgttaagggcagatatacaaaaaaatatgcaaagtatattgtatacaaaaacgcgcggcgagaaaatctctgatgtcactgtacacgagaggcggacttgccgtgtttttgttttcgggaaagttctttttgcgaggacaaaacagtgaaaaagcaacgctttgcagcaacattattcttacaaaaatgttaaaatacgaaaaacgctgtttgaaaactgtaaagaaattgtgaagaaatagtaatattgtcacatccgtgctttgatgttataatcatttacagttaaggggaaaaagctgtgcaaacagtaaagaagggacagattacattgaaaatgaaaaaaatattatcagcgctgttggcttcagcagtagcaatgagcttagtagcaggctgcggcggcgagaaaaaggaagatgctaaagcctccgacgtgatcaaagtcggcgttttcctgccattgaccggtgataatgctgccggaggcgaactggaactccgcggtatcaagcttgccaacaaactgcatcctgaagttttaggcaaaaagatcgagcttgttgtagctgataacaaatctgataaagctgaagctgcttctgttgcagcccgccttatcgaaaaagataaagtaagcgttatcgtaggttcttatggttcttcgctgtctatggcggcaggtaatatcgtaaaagacagtaaagttccggctgttggtaccagctgtactaatccgcaggtaactgctaataatgactattatttccgtgcctgctttattgatccgttccagggtaccgttatggctaactatgcattcaaacaaggtgctaaaaaagttgccatcgtgcaggaagtttccaatgactatgcagttggtctggcaaaattcttcaaagaagctttcataaaattgaccggtgatgaaaacagcattgttgagatcgcaaactatcaaacaggcgataaagatttcagtgctattcttaccaatatcaaagctaaaaatcctgatgcgattttcgcacccggtaactttaccgaatctgcactgcttgtaaaacaagcccgtcagcttggcatcgaagctccctttatgggcggcgatacctgggaaactcaggaattcatcgatgttggcggcaaagatgttgaaggcgtagctctttctactgcgtttgaccgtgaaaaagcaactactccggaagctaaaaaattcctggatgaatacgtaaaagagtataaaggcgagccttccgcattgactgcaatggcttatgatgcttatctgatcgctatcgacggcatcaaacgcgcaggttctactgataccgttaagattcgtgacgctatcgcagcaactaaagatctggaatgtgtaaccggtatgactactcttgataaaaacggcgatcctattaaaggcgctgtgatcaaaactgttaaagacggcaaatttacattcctggattttgtagaagctaaataattcattggttctttcataacccttttgctttatgttagtgctcccttctccttaagggaagggagcaattcttttgtgtcatgaggtgtttttcatggaatttttccaagcgattgcgaatatgtccggtgacagtcttgcgcagcatttggctaacggcatatctctcggcagtctttatgccctgatcgccatcggttatacgatggtctatggcattttattgatgataaactttgcacacggcgatatcgttatgatggcatgttattttgcctttttcggtattaccgtttttcacattccctggtatattacttttgtcggagtcattattgctacggcaattttaggtgtagtgattgaacggacggcttatcgtccgttgcgtgacgcaccgaaaaattctgttcttatttctgctatcggcgcttcatttttattggaaaacctggctaattacttattcagcggccgtccgatgcgttttcctaatattgaacttttatcgcagaatatttctatcggcgggattcagatccaggcgatctgtctggtcattcccgttattacaataatcagccttgttgtgctgctgcacatcgtcaatcatactaaaacaggtatggctatgcgtgcagtttccaaagactatgagatcgcgcgcgttatgggcgtcgatattgataaaataatttcgatcacatttattatcgggtcctctttggccgctattggcgctattatgtggggtatccgctatcctggcattaccccgatgatgggggttatgccgggtttgaaatgctttattgcggcggttatcggcggtatcggcaatatcaagggtgcagtgctgggcggctttatactcggcctgggagagatcctgatcgttgcttttttcccgcagctttccggttaccgagatgcctttgcttttatcgtgcttattgtgattctgttttataaacctaccggccttttgggcgaaaaaacgactgagaaggtgtgacgaagatgaaaaagaaagatgttttccttactttgatcgctattgccgcactctttggcgttgcctgcttcgtccagaccgagatggattcttatatccgcaggatcgtcaatctgtgtctggtttatgcaattatcggcttatccatgaatctgacgaatgggtttgttggtcagttttcgctggggcaggctggttttatggctataggcgcttatgttgtaggcatttttaccgtgcctgtagagctgcggcctaatgttttttatgcggcacctatgaacccgctgatcgctgatattcaaatgcccttgtggctggccctgattgccggtggacttttagccgctttagtggcttttctgatcggtacgccggtattgcgtctgcgcggggattatcttgctgtggcgacgctgggcttttccgaaattatccgtatctggataactaatgcgcagagcatcactaacggggctttgggtatcaaagatataccgcctcttaatgatgtgcgttatatttttctggcgacggcagtgacttttatttttatagcacttctgatcaattcttcttatggccgtgcgtttaaagcgatccgcgaagatgagatcgcggctgaagcgatgggagtaagcctgttctggcacaaaaatctggcatttatgatcagtgctttttttgccggcgtgggcggcggcttgtatggtgcgctgctgggaactgttgatccgaagaatttcctttttacattgacctataattttttgctgattatcgttttaggcggtatgggcagtattaccggcagtatgctgggggctgtcatcgttacggccgggctggagttcctgcgtgtatttgacgaaccattgatgctttttggtatggatattccgcttttccgtcctggtttcaggatggtgattttctcggcgctgctgatggcctgcgtgcttttctggcggcatgggatcatggggaccagcgagctgacctggaaaaatatccgtgccttctgtaaaaatccattcagcttctttgggcggaagggagcagaaagatgattttaaaaactgataatattacaatgcagtttggcggtgtgacagctgtaaatctgcttaatattgagatcaatgaacacgagattgtggcactgatcggtcctaacggtgcaggtaaaacgacggctttcaatatgattaccggggtctatactccaaccagcggcgacgtgatctatacagacgcgcagggtgaagaacagaaaataaccggtaaaagacccagcgaaatcgccaaaatgggcgtagcacgtacttttcaaaatatccgtctgttcaaaaatctttcggtatatgaaaatgttatgattgccaagcatctgcacctgaaatccgattttatgtcggcggctctgcacctgccctggtataataaagagcagcgtgagatggaagcttcggtcgaagccctgctgaggaaagttgatctatgggagctgcgcgatgaaaaggcgtccagtctgccatatgggcagcagcgtcgtttggagatcgtgcgtgcgttggcaactggcccgcgtctgttgcttttagacgagccggcagcgggtatgaatcctaaagaaactgatgaactgacggagtttatccgccagattcgtgacgagtatgatctgacggtgtttatgatcgagcatcatatggatctggttatggaaatatctgaccgtatctatgttttggattttggtatgactattgctgaaggcacaccggagctgatccaaaataacaagcgcgttattgacgcttatctgggggtggatgaagatgcttaaagtgcaggatttatttgtagcttatggaggcatcgaagcgctcaaaggtatttccctggaagtgccggaaggtaagatcgttacgctgataggcgctaacggggccggtaaaagcaccttgttgcggaccattgttgggctggtaaagcctaaaagtggtactatcagctataatgaacagaatattaccgggcttaattcacagaaaatcgttaaaacaggtattactttagttccggaaggacgaagggttttcccgaatctgacggtcctggaaaatttacaaatcggcgcgtatatgcgcaatgataaagaagaaatagccaaagacatcaaatgggtatatgaattgttcccgcgtctggaggaacgcagctggcagatggccggcactttatccggcggtgagcagcagatgctggctgtaggcagggcactgctgtcgcgtcctcagctgatgatgatggacgagccgtctttaggactggcgccgctcatcattaaagatatttttaatatcattcaggagatcaacagcagaggtatgacgatccttttgatcgaacagaatgctaatatggcgctgaaggtggctcatcaggcttatgtactggagactggcaaaataactatgagcgggaccggtcaggagcttttggaaaaccctgatatcaaagccgcttaccttggcaaaaaaagaaatcagaaataaatgcagcagccggcagtatttgccggctgtttttgtattttccagcatttccttgcgaaaatagtcagaacaggctatcatataaaaagagaatggtggtaaataaatgatagaaaattttttgaacagttgcaggcgtcatcgcgaaatgctgcgtttttctgttttggcgatatttattatctgggttgtctggcagctgcatagttcgccttatatcctgcatccttcctcagtcgaagatgtgcgccgttgggtagcgtcgtacggcagtctggggccgttagtttatatagctttatatactgtgcggccggtactgttttttccaagtatttttttaaatctcagcgccagtattttatttgggccaatgctgggtatcgtatatttgctgtgcggtggtctgagcagtgctgttttatgttatgcgctgggaagtctgggcggcggcaggaggctgctagatcgttatggcggctcgtggggtgaaaggctgactaattatttaagcggcagcggcggatttgttaagatgctgtggctgcgcacagtacctatttttccgtatgatccggtaagcattattgccggctgctgtaagatgaacctgcagctgtatgctgctgcaactgtactgggaatgcttccgggagcgattgcatataatttactggctgattctattttaggcggccgaggattgtatgtgtctgtagctgcagttattatagcttttggtctgcctctggcgtggtgggctttgggcggtgaacataaaaaattaaaggagtagatactgatgaaggtttacgtttggcgtcataacaaaacttatcacagccacagtatgatcaatgagccctgtgtgcaaaaccatttttatctggatgcactggcaatcgtagctgcagaaagtctggaagaagccttgtcaaagctggcggaacagaatgccggttggcggatcgaagacctgcgtgcgcttactcccagggtatatgatttagatgttccccaggttatttttacagatgtccgcggttcaatagcggaataggaaggcgataacatggataaaacagtggaaatggaaatgaaactgacgattgcccgtagggatctgaaaaaactgctggcatctgagcttattactgctacaatgattaagggaagtttggcaaaacaggagctgctgacaacgtattacgatactgcgtcatacaaattgaccgaatctggaatggcatatcgcatcaggcgtaacggcaaaaaatatgaggctacagtaaaaacagagcaagcgtctgggggaggactttcggctcgacgtgagtttaacatgcctttgaaaaaagatagtccgacagtgagtggtttcacagaattaggattggagactgatctggaagaattgctggcaggagaagaattgcagaagctttttaccgtagaagtgaaaagggagatcaggctgctgcaggtaactcctgatactgttttggaaatggcgattgaccagggcaagatcaatgccggaaaacaaaaagaaaaaatcgatgaagttgagctggaaatcaaagctggaacgaaagcggatttattagatttcacggctcaaatagctgctaaaataccgatttttattgaaccgcgcagcaaatttgcccgtggccttcatttgcttggtaatggcgaagaacatgaaataccaaagggacggttgaaaatcgaccgtagcggtatggtgcaggatgagctcagcaaattgctggagtattatggcgatcggatcttgaagctgcaaaacagactgataactgataaaaatgtgctggtgcaggccgataagctgctgctgccgcagttcaagcatttgcaggctttactggcgcttatcaagccgttattggctgaaggggagtatgataaaatacgtaaattactggcggaacctgctggtacgctggatgtactgtttcgttataaacggctgctgatgcagtggcagctgttgcatggaacggcgggcaacactattttgcagcgcccgcagctggcagaaaagttgacggaagaaatagaaaatattcttgcggaagtagcaaaacagctggaacagggagtgtacagtcactgtatttttaaactgctggcgtggactgaacaatcattatggcagaacagttattatgtggaagttgaacagctggcaggctgtcgtgtagaagactggtataatatgctgaaagaacttgatattaaaggggaaaaaatagacgaagcgcaggctaaaagtattttacgcgtctgtgaagctatttattatgcccgccgcagtcttaaaattgacaggctcagtaaaactgcctggaaagatatcaaagaactgtaccagcggatccaggtactggtttatgatgtttacagcagcaaatgcctgctgaactgtattaaggggaataacagccgtgcgctttatcgcgacagcggacttttgataggctggcgtctgcaatctatgcagtctgccaatactaaagccttaaaagcatatggtagggtagtagaagctttaaagaaataatggcaataaaaaacaccgcgaataattcgcggtgttttttatttattgagctgttcttcaagcatgccctgatggatacttccgggctcctgaagtaatttaactttcaggcgggtaatgcggatattatccagttcttcgaccaggaattccgctttgggcagttttacagactgtcccagctgcggagggtaatcaagctgggaataaacccagccgccgattgtgtcgcaggagttagaacttaattcaaggccgaaaaggtcattgacatcttcaagcagcattttaccatcaatagagtaggttttatcgctttcttcttcaacttcaggacgttcctcgtcaaattcatcctgaatttcaccgacgatttcttctaaaatatcttcgatggttaccataccggcagtaccgccgtactcgtcgattaagattgccagttgtttgcgctgtttctgcagcagacgcagaagtttactgatcggcattgattctggtactaccagaacttcacgggctaaagtgcgtaagtcaggcttttggcctgcgtttaaagcacgcagcaggtctttgatatgcagaaaaccgataatatgatctttgtcttcttcacagatcggatagcgggtcatgcgttcactgagagcgacttcgatgttttctgtaaaggaatccttaagatacaggcagatcatatccgtacgcgggaccatgatctcactggcatgacgttcagaaaaatcaaagacattatcaagataggtcagttcggttttatcgatataaccatatttatagctttcttccattaaaatacgaatctcttcttcgttgtgtgcttcttctgcttcactggcagcatggatacccatgcgcctaagggtccagttggcgacatggtttaaaaaccagactgccggatacatcagcttattgaatacgatcaggggccaggctataaacagcactactttttctgttttctggatagataaagattttggtacaagctcgccaagaacgatgtgcagtgcggtaatgacagagaagcctacaacgaaggcgatcgtatgttcaagctgcgccgggatattgaataaatgaaaaagcggtgtcagcattttagctacggcgggttcaccgatccagccaagacctaaagaagcaagcgtaataccaagctgggttacagataaataggcatcaagatgctctgtgacctgtcgggcatagactgcctgccggttaccttcttttattaaagtatcaaggcgcgaaggtcgcactttaactatagaaaattctgatgcaacgaaaaagccgttgagagcaactaaaaacaggatgataataacatttaaaagtatactaaaatattccaaagaatctgtttccgtcaggaaacatgttcacctccattactgcttaaagcagtatattatataaaaataattttatcatatatcaatgttataaacaaagtttcatttttgtataaattagttgttaacaagccattttcgcaggtaagaggctaattacttcctgcgaagaatgtatggtagtctaaacgctgtatatcgcagtttttcaaaaatactggctggtttaaaaggttttttacaactagagagctgttaattgtaaaaaataactatatttcatctgatatatttaacttgaaaaatttataatgttgcttgggcacaggaaatctttaaattattaagtctataatattacgtcagcagaatataatgctgaatatacagcgcagtggtacttaaagtggaattatggtctggataggctgaaaattaaatgtaaaaaacatttaccattgatcgttaagtatcttggttggaagctggagactgaaagaactgacaaactcagaaaggcagggcatatgtatctgctgcggggcagtattttggttttgaaaggaggcagatggagtaaatggaagaaaaacaggagcaaaaagaatgccataaatggctgatgcagatttgccctatctgtggcaaagaatttgcctgtaacaaaactcatcatgtgtatatggaacgagttgggcgcaaacgtttgtattattgcagctacagctgttttaagttgagactgtatttaaaaaagtaagtaacggatcagatagagaatgagaattttgtcggtatttgtaattttgttagttctatggcagagggggtatgagtaattgtaaggaaaaagtattttactgctcattatcatgaaaaatgagttattgaaacagcagtttcgtctaaaaaagagatggaactgctttaatattttattgcaagtatttttaaaatttatgactcgaaaataaatatgaaaatatatctataatggttaaaatttgctgcagcaacagtaggtgtaaatgctgttggctagccatgtttgattgcatgttgctctagcaacaaaaaattaaactattgtttaatttaattaaactattagcggcaataatgttcgccattttaatatattgttaaactagacgctgtaattataaattcctacaataaaagtgtaatcacaaaggtgatcaagtaaccaagaaggaggattatgtgtaaactattttgggaaatgaggtgagtttatggctcctgcaatcaaatgtttaatcgtattagcaatagtggctctgttatttattactgaacttattcctttggctattacagctatgagtggcgctatcgcctgcggccttttgggatttatcccggccaaacaggttttttcaggtctttccgattcaacagtagtacttttcgcaggtatgttcgttgttggtgcggccatgttccatactggtctggcacagaaaatcggtatttctatcgttagattctccggcaccagcgaaaacagtttgatgtttggaatcatgatcgtcggcgcaggtttatcttccgttctgtctaacacaggtacggcagcctgtctgatgccagttgttcttggcatctgcgccgcagctaagatcccggcttcccgtcagttgatgcctttggcttacgccgcaggcgttggcggtatcattaccttagtaggtacaccgcctaacattatcgtttccggtgctttgaaatcctttggttatgagccgttctcctttttcgaatttgcctggataggtattcctattactgtcgtagcgatcgcttacatgatgtttatcggcaagtatttgcttccgaaagctgagctggatgcaaatcaggaaatcgagcaggaaatcgaagctactgtacatgacagtaaaaaacagatcatttccggtttgattctggcagtagtaatcgttgttatggcacttgatataaaatttatctctttggaaatggctgctgtaatcggtgcactggtttgtgtactgaccggctgtctgactgaaaaacaggcttatgcttctatcgactgggtaaccatcttcctgtttgcaggtatgatgcctgtatctaatgcgatggataagaccggtgccggtaaattgatcgccgagtgggcagtaagccttatgggcggtgctcctaccccgatcattatgacttcagtactgtttattatctcctgtactttgacgcagttcatgtctaatacggcagcagcagcattgctggc

SEQ ID NO: 10016 - DNA, 6208 bp, Unknown
  gut microbiota DNA sequence
taaaaatgtttttatatactttaaaataaagtggaatatatgaggctggagaatggcttcagtagctaatctacgaacatatgttgcctcagcaacaaaaagttgaacatttgtttaatttaattcaaatattatcagcaatattgtaacagatttgttaacaattaacttcggcataagttaaaaaaatctttacaataaaggttaagaaagcaatagctttcaaaagcgaaggagaaattttatgtagtctattttgagaattgaggtgagtcttatgacaccggcagtaaaatgtctaatcgttctggcaatagtggctttattatttattactgaacttattcctttggccatcactgctatgagtggcgctatcgcctgcggccttttgggttttatcccggccaaacaggttttttcgggcctttctaattcaacagtagtacttttcgcaggtatgttcgttgttggtgctgccatgttccatactggtctggcacagaaaatcggtatttctatcgttagattctccggtaccagcgaaaacagtttgatgtttggtatcatgatcgtcggcgcaggtttatcttccgttctgtctaacacaggtacggcagcctgtctgatgccagttgttcttggcatctgcgccgcagctaagatcccggcttcccgtcagttgatgcctttggcttacgccgcaggcgttggtggtatcattaccttagtaggtacaccgcctaacattatcgtttccggtgctctgacttcttttggttatgagccattctcctttttcgaatttgcctggataggtattcctctgacagttgtagcgatcgcttacatgatgtttatcggcaagtatttgcttccgaaagctgagctggatgcggatcaggaaatcgagcaggaaatcgaagctactgtacatgacagtaaaaaacagatcatttccggtttgattctggcagtcgtagtcatcgttatggcgcttgaccttaagagcatcagtttggaaatggcagctatcatcggtgcgctggtttgcgtactgaccggctgtctgactgaaaaacaggcttatgcttctatcgactgggtaactatcttcctgtttgcaggtatgatgcctgtgtccactgcaatggataagaccggtgccggtaaattgatcgccgagtgggcagtaagcctaatgggtggttctcctaccccgatcattatgacttcagtactgtttattatctcctgtactttgacgcagttcatgtctaatacggcagcagcagcattgctggcgccggtaggcgtagcgatttcccagcagctcggcgcgtctccgaaagcagtactgatggcgatcggcgtagcagcatcctgtgcattcgcaactccggtaggaactcctccctgtacgttggtgttgggacctggcggttacaagtttatggactatgtaaaagtcggcgtgcctttagttatcctctgcttcatcgtttccatcatcgttattccgatggtatggcctttctttcccggttaattgggactagctgcggaagaatgtacatagagttctccttttaaaagtagaaatgctttttgggtggtatttctgctagttggcctgggatttaagatggaaagaaggtgtgactggtatgggagcagaagttattgctggtggtcttattgcaattattttctctacttgctggtggctcgttagaagttgattctaaaaaacaaaattcgtgtatgtcagtctttccggtcaagtaagatgatccgagagagatagcacataaagttctccttcgctgaagtggaagtactaattggtacttccgcttttttattgttctaaatgagtgatgagcaggtattttttgtgcttgtaatgtattttattgcggtttatataataataattaattttgaagtgaaaataaattataaaaaatatttatgaaatatgatttttgcatcagcaacaaatattacagagccaggtgcagagcgaagaataatatgctgttgcaatagcaacaaataattggatgtttatttaaataaattaaaagatttaagataataaagttcgttattttaactgttttctaactggagtgcataaaaataaaatttctatacttaacctgtgattgcttaaagcaatcaacataaaagtggaggtgaatttcatatatttgctgttttacaaaattatttgaaactgaggtgaaggtatgtcgtcggcagtaaaatgtttaattgttttggcaatagtggctttattatttattactgaacttattcctctggctattactgcaatgggaggagctatagcctgcgggcttttgggatttattccggctcaacaggttttttcaggcctttcggattcaacggtagtgctttttgcaggtatgttcgttgtgggtgcggcgttgtttcataccggcctggcacaaaaaattggtataggtattgttaaaatttccggaactaaagaaagcagtttaatgtttggtattatggtggtcagtgcagcattgtcctcctgtttatctaacactggcacagcagcatgtctgatgcccgttgttttgggtatttgtgctgcagctaagattcctgcttcccgccagctgatgcctttagcttatgcggccggcatcggcggtgttattacgatggttggcacaccgcctaatattattgtatccggtgttcttacttcctttggatatgaatccttttctttcttcgagtttgcctggataggtattcctttgacctttgtggttatcgcttacatgatgtttatcggtaagtatttgcttccgaaagcagaattggacgctgaccaggaaattgaacaggaaattgaggctactgtgactgacagtaaaaaacaaattgtttctggtttgattttagcagtgtgcattattgttatggcacttgaccttaaagctatttctttggaaatgaccgctattgttggtgcactggtttgtgtattaactggctgtttgactgaaaagcaggcttattcagctattgactgggtaactattttcctgttcgcaggtatgatgcctgtttcggctgctatggataaaacaggtgccggcaaattgatcgctgaatgggcagtaagcctgatgggtggatctcctaccccgatcattatgacctcggtactatttattatctcctgcactttgacgcagtttatgtctaatacagcagcctgcgccttgctggctccggtaggcgtagcgatttctcagcagctgggtgcttctccgaaagcggtactaatggcgatcggcgtagctgcttcctgtgcattcgcaactccggtcggaactccgccatgtactttagtgcttggacctggcggttataagtttatggactatgtaaaagtcggtgtgcctctggtagtactctgttttatcgtttcaattatagttatcccaatggtatggcctttcttccccggttaattgggacagctgcggaagaatagtacataaatctctcctttttagaacggaagcacatgtcggtgcttccgtttttttgtgggcaattaatgagtctgtcaggaaaatgataaaagagcctgttctttttagaacaggctcttttatttcttaaatatttaaagctttattcaaaacaaattagtcagcaatggcagtagaagtggcgctaaaatagaagtagcaataccggtaagaccaattgctacaccgccgatggcgagttgcaatgcgcttttattgacgcaggcactggttccgagaccgtgacttgaggcaccaatagccagaccgatagcgatatcatttttaaagcccagccaggataaaattttatgattgaaggtagaaccaaacatacctgtaaaaataacacaggcagcggttaaggatgggataccgccaatgacactggaaatatccatggcaataggcgttgttactgatttgggaatcagagaaagcagaacctgttcgctggcgccaaacagcttgccgcagacgaagatggaaacaatgccgatgactgtagcgacaacaactccgctgacgatgacggcaagattgtttttaagggtctgacggttacggtataaagggagtgccaaagctactgtagccggtcctaaaaggaagtttatgaagtttgctccggcagcgtattgttcataagttatatgaggtgactgaaaataaatgatgcccataataatagggcaggccagtacgaaaggtggaataatgttaagctcaaaacgattgacgatcagttcgcagaagacgtaaacgataatggtcagtccaatgccgaacatgggtgaatttaataaggcttcgggaaagaacatcaatgttttcctcctttgctgtgtttggaaaccagctcgacaaaagctgtagtagtaataagaataatcagactgctgacgatgattgtgataaaaattgcgatgctttcagctttaataatatcgagataaagcagcatactgataccggctggtaaaaacagcatgcccatcttttcgatcaggatagtacaggcgtcttcgacgctttcctcacggatgacacctgccaaaagcaaaacagccaacaggatcataccaagcagtgccggtggaaaagcaatgtgcagggcctgcaaaaacaaaacactgacccattgcagagccagcagaatagcgataccacgtaaaatagaaccagctgtcataaattttcccctcaatttgtatagaataactattattgtactcttgcatatatgtttgtcaagattttgatgaattaaaataataataaaaatatttgactttttgacttttggcgtttataataaaaattaaggaagccggcgatgccagcttccttgcgaattatcctacttaaaagctatataaagattagttaaaagaatcaaacctaaaaggcccatggcaaacagtcccagcagttcgaagcggtacatggatacttcttcattgagcagtgtataactgcgctggataacgtggattttattttcaatattgtctttccagacagaagcgcgcagcaatgacagatatcgagtgtagatacgtgcatagaaaatatcttctgttacctgcagggcattgttgatattgctggtgagactgctgacatcggccatcagttccatcaggttaccgcggatctggcgatagctttcgagccgcgttgctttactggtcatattggcttcttcaagttcatcataggttttatcaatggcattgttgagagcgttatcataatagcgcagctctaaaaactgtgcattggcaaattcaagcagatcaggaacgtcaaggcttccactttggtcgtaaactacggctgaatcccaggccagataagtaatgtcgtcggcataggagaagcgattttccagtgtttccctgcgagtttgttcactgacaggggttctatctttaagtagcagcgggaccagatcccagtcagggatattctctttgaagtaataaacaacaaagtcttcgtcgaaatccgaaacacgctcgtttgagcaggcgggacgaatcgtttccagaacggcatccagataatgatggatctcgtcttccggcatattttcgctgacgatagccatatcgagatattcgtcgtaagttacatcgtcttcaaatgggattctgataatcaggctgataactcccaaatcaaaaatacgggccttgatttcagccagataggttttgccgccaagttccatttcgtgtgaaccaagttctaccaaaacaggcgggtctttaaaggtaatggattttgtcgagatcctgtccagacgcagacgtgaagctattttattgcggctggtccacagggcctgtacaaggtccaggttgatttcgtcggcgacgtcaaacaatctgtaaacgatcatggatgtattcatacttgcctccatattatattactttgatgatttgctggttgatattgaatgatacaggtcagcaacaagtgcagaagcccattggcgtagagagatattatctcgtttactatgcaaaagcagcttacttaattggtttattcgccgcagagtttagtttccctgcgtgacgataaaaattttctgtaaaaataagtta

SEQ ID NO: 10017 - DNA, 2504 bp, Unknown
  gut microbiota DNA sequence
tgtgcgcatattttagtggccttaagcagcagtgaaggttttttcagatttttactcgctaatgtcaaggcagatgaaagaaactttgcacaggaggctaaagcgttgatgcagcgcattccttctgtaaagggacaggatcgtcagctggtgatgagcacagctttagccagagtattagggctggcagcgcaggccgccggtcaaggtgaagtgaatgttggcaatttggttgcagctttagccggtgacggtgacagcgagacagtttctctgcttaaaaagtatggtattgataagaaaaaggttgagggcttgtatatggcttatactaatgggcaagctgatgaagaaagtaaacagacacttgaaaaatatggacaggaccttactgctaaagcgatggaaggcaagttggatccagttattggccgtgatgaggaaattcgccgtgtaattgaaattttatcgcgtcgtaagaaaaataatccggtgctgataggtgagcctggcgttggtaaaacggcaatcgctgaaggtttggcaagacgtatcgtagcaggtgatgtacctgaaaatctgaaaaacaagactttatacgctttagacctggcagctttggttgccggtgctaaatatcgcggagagtttgaagaacgtttgaaaaaggttttgaaggttatttccgattctgcaggacagatcatcatgtttattgatgagctgcataccgtggttggtgctggtgcagccgaaggagccatggatgcgggtaacatactgaaaccgatgctggcccgcggtgaattgcgttgtatcggcgcgactacattaaatgagtaccgcaagtatattgaaaaagacagcgctttagagcgtcgtttccagccggtaatggtcaaacagccaggcgttgaggatacgatttcgattctgcgtggattgaaagaacgttatgaggtgcatcacggtgtaaggattaaggatgcggctttagttgcggctgctgtaatgagtaaccgttatatcaacgatcgttttttgcctgataaggcgattgatctggtcgatgaggcggcagcacgattgaggaccgagatcgattcgcttccggcagcgcttgacgaaagtaagcggcggatactgcagctggagatcgaggctcaggcccttggcaaagaacaggatgagcagtctaaagaacggctggtgaaaattgaagaagagctgtctgagctgagaaaggaaaatgaagagctcgttaaacgctgggacggcgaaaaagcttctattgcccgtgtgcgcgaagtgaaaaaagagatcgatgccgttaaacaggaaatggaaggcgctgagcgcagctatgatctgaataaactggcagaacttaagtatggacggctgccggcgttggagaaggaacttgcagaagttgaagcaaacaataaaaatgataaagagaatgtgctgctgaaagaagaagtagatgaagaagatatcgctaaggtggtcagtacttggacagggatccctgtttcgcgtcttagcggcggcgaacgcgaaaagctcgtacatcttgaagatatcctgcatcagcgcgttgtcggtcaggacgatgcggttaaggctgtcagcgaagctgtcgttcgtgcccgtgccggcataaaagatcctgatcgtccgatcggctcatttattttccttggtcctaccggcgttggcaaaacagagctggctaaggctttagccgagatattgtttgacgacgaacgcaatatgattcgtatcgatatgagtgaatatatggaaaaacatactgtttcccgtcttatcggtgcacctccaggctatgtaggctatgatgaaggcggacagctgactgaagcagtgcgtcgccatccttattctgtaattttactggatgaaatcgagaaagcacatgctgatgtgtttaatgtactgttgcaggtactggatgatggccggttgaccgacggacagggacgcaatgttgatttcaaaaatacgttgattattatgacgagtaatcttggttcggccgagatcatgaaaaagcagggacaaatttccagagaagatatccagagtatgctgatgcagttcttcagaccggaatttttgaatcgtgtggatgatatcgtggtctttaaggccttggaaaaagagcagattaatgatatcgtgaaaatgattctgaaagagcttggtgaaagactggaaaaacagcttgatctgacgctggtatgcagtgatgaagctgtggcatatctggcagatacagggtttgaccccgcttttggtgcccgtcctttaaaacgcttgatcgtacatactgttgaaaatctgctgggaagaaaaattgtcagcggagagatcaagagcggtgaaactgtaagagtagtcctgaagaatggtgtaattgatattgagcaggtttcctaagtattaaaaaagtaaagatttctgtaaaacaaggctgtgtt

SEQ ID NO: 10018 - DNA, 19788 bp, Unknown
  gut microbiota DNA sequence
cagtagtggaacgtggacagcaggtaagttatggagcctgcggttttccttattacattggcggagatgtaaaggatttttccagttttactcatacaccgcaggggtttgcacgtgatgcggaattttttaaaaatgttaaaggctttgatgttgttaccgggcatgaagctcaaaaaatagaccgcgcgaataaaacggtaaccgtaatggataaagaaactggggcaatacaggaaatgtcatacgacgtattagtgttagggactggggctacgcctgtaaagctgtctttacctggagctgaactgggagggatacataatttctggttcccctgggagacactaaaggttaaggaagagatggaagcctataaagtcaccgatgtcgttatcgttggggcgggcttgataggcatggaactggcggaggcttttcataagcaggggctgactgtaaatattgtagagatgcaggatcgtattctgccgcagatgctggatctggaaatggctgatttagttaagaaaccattagaaaaagccggtatcaggttatatctggaagaaaagacgctgggttttgaaggcgaaaatggacgagttacagcagtaaagactgataaacgtacgattccggctcagttggttattgtggcggtaggtgtacgcccgaatacagagttggcaagtgctgccggactggagctaggtacaagcggggcgattgctgttaatgaatatttgcagaccagtgatcctgatatttatgccggcggtgactgtgcagaaaatatgaatcttatcagcaagaaaagaatatttgcaccaatgggttccactgcgaataaacatggacgtgttattgcggacaatatttgtggtgacatgataaaatatcccggtgttttaggaacagggatctgtcagatattgaactggcaagccggaagtacgggtttgaacgaaaaaacggccaaagccgcagggattgagtttgagtctgtggtcgtacctggatttgacagattaggttatatgcccggcgcgcagcgtttggtcctgaagctgctggcggaaattaagactcagaaggttataggtgctcaggttgtaggaaccggcggcgttgataaacgtgtagatgctttggctgctgccatgagcttcggagcgacattagaagatttgagcaatattgatttcgcatatgcgccgccttttaacgggccaatagataatattgcgacagccgccaatgttttgatgaataaaatagaaggacgcctgcgcagtattaatccgaaagattttaaagaattgcgtaaaagcggtgaatatactttggtagatgtgcgcactccgggagaatataaaagtaaccgtatcgctggctgtgctaatatcatcaatttacctttgggcaaggtgcgcagtgaagccgagaatgtgctggctgataaagacgctaaacttgtttgttcctgtcagatcaatctgcgtggttatgaagctgaaactatgctgcgggccttaggttataaaaatgtccaaagcctggaaggaagcatgagcagctggccttatgaaactgaaagcggcgaaaagaactagaaaataaatgttacatatatgcaagatttcttagcttttttgcagaaaccttgcatatatttttttgttttataaaaagacttgcttattactttaaaagggcgtatagtttaatactgtttgggaaggggtattacaatgattattagaccagctacaattatgaggaatgattataatttgatttctgaatatgcgcatcaaagcggcgaaattgtatatttaacgaagtatggtaaaggtgatttggttgtgatgagcatcaaaacttttgaacagcgtgaagaaaagtttaagttctatcatactgttatgcaggcagatttagacagacaaaaaagtgccgaagagctttttgacggagacgacgctatcgccagattgaaggcgaaatttattgactgattatgcaatacgtacaggattgaagatattaccgcaggcatggcacgatcttttggaaattgggtttgtctacagcagacagggtaagagacttgaagcaagtgctgtgacatgtagtattgttagtaaactaaaggaactacaggattttgcaatgctggggaacaaaacacccttgagcagtttgaatgagaaaaaatatttgatgctgatgatagataagtatgcctgtatttaccgcaaggttgaaaatactgtatatatttatcatgttacagaattacagcgtgattatcctaaattaatgaaatgacggcaggcagcttttgcttacagcgaaagctgttttattattttccggcaagggtattttacagtagtttcacatattttcgagtctagtgagaacactacccttgtgatataatatttaaatatgaacaggataatttgagcgttaaggaaagtggtgaagaaatggctgataaatttttagttattgatggcagcagtttgatacacagggcattttttgctttgccaccgttgatgaccaagcagggagttcatactggcgcagtatatggcttttgtaatatgctggtgaagcttttgggtgatgtaaaacctaaatggctggcagttgcatttgataaatcacgtaaaactttccgaacggaaatgtttgcagattataaggggcagcgtaaacctacgcccagtgaactgagcgaacaatttccactggcccggcgtttgctggaagctatgaacatcactgttcttgaaactgatggctacgaggctgatgatattatcggtacttttgccgtacatgcgccgcagaacgcagaaattattatcgtaaccggcgacaaagatgaattgcagcttttggatgacagggtaaaggtttattttaccaagcgagggatttctgatatcaaggcgtatgatgttgcagcatttgccgctgattatgaagggttgtcgccaaaacagctgattgatttaaaaggactgatgggtgacagttcagataatattcctggcgttcccggtgtaggccctaaaactgctttgaagttgatttgtgaatatggaacagtagagaaggttttagaaaatattgcgcaaatcagcggaaaaagtttaaaagagaaattagaaaataataaggatgctgcgctgctttcaaaaaagctggcaaccatttttacagaagttccagtcgatcttgatcttgataaatatgaactgaaagctatgtcggatgaggcaaggcctttaatgcaggaattggagttccgaaatttgcatgagagattccagactattttgggcggcagtgacggtacctttgatctttttggagaaagtatcggtcaggaaaacgccaatatagaaatcgcgcttttagaaacagcagaacagggcaaagaattttttgcgttattgcagcaaaagcaggaaaaggttgcatttactgctgcttgcggcggcgaattacccaaaatccattttactgcagtggaaatttttaatgatggaaaaatttataaattgcaggaaggcagcggggcctggaactttttttatgaatggctgtctgattacaaacaattgaaagttacatgcgacagcaaagagatttataaggcttgtatgtgcctgaataaaaaagccgacggtatagttgatgatataggtatagctgcttatttgattgaaccaggtcgcagctcctatagtttgaaggcagttgcagaacgttatctggctgcaaataacggtgggaatgccgctgatttgcaggcgttacttccgcttattgaacaaaaactgcgggattatgaattgtataaactatatacggaaatggaactgccgctggcctatttgctggcaaaaatggaattagctggaattaagccggatgtgaagctgctagagagtattacaaaagaaatggcagtacagataactgctttagagattttggcagaagaacaggccggtgaaaaatttaacctgaaatctcctaaacaattaggtgtactgctgttcgaaaagttggggcttcctattataaaaaagacaaagaccggttattcgacagatgtttctgttttggaacaactggaaggttcgcatcctctgattacgacgatcctggaacatcgcaagctgacaaaactgcattcaacatatctggaagggctgcgcccactgatcaatcctgcgacggggagaattcatacgcattttcaacagacggtaacggcaacaggaaggttatcaagtactgacccgaatttgcagaatattcctgtacgaactgagatcggtaaaagaatccgtgaaatatttataccggggactggttatgactggttgatgtcttgcgattattctcaggtagaactgcgtgtacttgcacatatggcacaggataagttacttttggaatctttcctgaatggtcaggatgtacacgcacgtacagcggcagaggtgtttggggtgccgttggaacaggtcgattcaatgatgcgtacccgtgcgaaagcagttaattttggcattgtttatggtataagtgattttggactggctaaacagctggatatcagccgcggtgaagcagccgagtatataaaaaattattttgcccgctatacaggggtaaagaaatatatggatgatacggtcaatcatgctcgggaacagggttatgtagctacaatgtttggacgtcgccgttatctgcctgatatcaggcacagtaattttaacttacgcagttttgctgagcgcactgccatcaatacgccaattcaggggactgcggcggatataatcaaaatagcgatgcttaaagttgaacaggcgctttctgatgctaaagtcaagagccgcattttgctgcaggtacatgatgaattagtattagaagttatggaaacggaaaaagagctggtggcacagcttgtaaaaaaagcaatggaaagcgctgcttctcttagtgtgccgctaactgccgatgttgcctgggggaaaaactgggcacagaccaaataggagggatatccatgccggagttgccagaagtggagcaggtcagaaagactttgctgccgcatattaaaggaaaaaccattactaaagttgaagtatatttggataggctggtcaaacatccatcgtctgagcaatttatcaaaaatctgaccggtcgtacgattgaagacgtttgccgtcgcggaaagtatctggtgctgaaaacaggtgtcaatcaaaaacttatcgtgcatttacgtatgaccgggtctttggtggcacaggctagtgatttagaagcaccgccttatgccaagataaaatttgaattgactgacggtgttactatgtggttctgtgatataagaacttttggaacactgtatttagttacggatgatgattgttacattgcaggttatgaaaccttggggcctgaaccgctgacggtagggtttaatcctgaatatctggccccgatagctgctaaaagccgcaagcccatcaaaacgttgattcttgatcaaacggttattgctggactgggaaatatttatgctgatgagtgcttggctttagctggaattttgcctacacgtatagctaatactttgacgcgtgcggaaatagaagctgtgcatgaagcggcgaacaaagtgattgcacagggaattgccaatcgaggaaccacttttcgtgattataaggatggcgaaggtaataaaggtgacaatcaaaatcatttgcttgtttatggacgtggtggcgaaccgtgtaaaacctgcggtgagcctttagccacgacaaaggttggcggcagaggcactacttactgtgccaaatgccagcactgagtgaagttatgaaaattattgggttaacaggtggtattgcttctggaaaaagtactgtcgcttcgattttacagaaactgggagctcatatttttgatgcggatattgcaagccggcaggcagttgcgcgtggatcacaggggctgcaacaggttatagatgtttttggcagagattacctgacaattgacggtgagttggaccggcagaagattgcacagctggtttttgaaaataaagcagcgttggggcagttggaaagcatagttcatacttatgtgcgcagtgaagcaaaaaaatttttagaacagtgcaggcggcagaatttctcagcagcggtgcttgacgtgccgctgttgatcgaatgcggctggtataaagaagttgatttagtgtggctggttgcagttgacgaacagactcagattgagcgtgctatggcacgcagcggaatgtcgcagcaggaagtagcggttcgtattgcggcacaaatgactttggctgcaaagtgtcagtatgcggatttgatcattgataacagtggcagcctgaaacaaactgagctgacagtaaaaaaagaatgggaaaaagtattacagatggaggattgagtttggccagacgtcgaaaaaagaaaaacaacagccgcaaaatttggtttgtactgattttgctgtgtgcagtttcgttgttgggctggaaaatttggacgtctgacgaagtacaaatgcggtttgtttatatgtggccttatcaaggcgagattttggaatacagcggaaaaaacaagattgatccttttttagtggcggcagtcataaaaaatgaaagtaattttgatcgtaaggctgtatctaaggttggagcaatcggactaatgcagattatgccggataccggggcatggatcgccgaacagatgggaatcaaaaattttgacccacaggatttatatcgtacagacgctaatatccgtttaggatgttggtatcttggagaactggaatatgaatttcagcggaactgggtcttgatgatgattgcttataatgccggtcgtggcaatacaaaagcgtggatgcaggaaaataattggggttacgattttaatagaatcgaggatattccatacagtgatacacgtgaatatgtgaggaaagttttgtatgatcgggatgagtattacaaattatataaaaacaggttaaaaaagtattgacggagttgtaatagtgtgctattatatcactgttgctgatttaggcaattgtaatgcggtagtggcggaacggcagacgcgctagcctcaggagctagtgggggcaaccccgtggaggttcaaatcctctctaccgcaccatttttgtctataacggtaatttttaaccacaatgcggttgtggcggaacggcagacgcaccatcttgagggggtggcggggagacccgtgtgggttcaaatcccaccaaccgcaccaaatgagaagataaacgcttcacgaattttcgtgaagcgttttttatttgtcagagctgcagaatttttttgttttatttattgcttataatcatattcgtagtatgatatgaatatgattaagaatggagtgagataaaatgatttttggtgtattgccacagaaaaagaatcagtatgcattgcgtattttaggaaattgcggtgaatttacttctgaggagcttttgcggctgtcagaattaacagcaaagtttggcaatggtaagattacagccaccagcagaggaacttttgaattgaatggtgtcagtgagagtgagttggagcctgcgattgaggcagtacaggaagcaaaacttcggttaggtggaacaggtgcgacagttcgggctgttgtggcatgcaaaggtactgactgccgtaaaggtatgtttgatgtgcatgcttttgcctgcagactagataaagaattttatggtattgatgtacctaaaaaatttaaaatcggtgtctttggctgtcttaatagccttggtaaggctatggcacaggatattggggttatgccctcttttacagaaccaggaaagtttgaaatatatattggtggattgttagggaacagacctgtccagggaaagcatatcccagtacctctaaaggaagagatggtggcagatgcgataagatatgttttggatatatataagacaaacggtatttatccgcagcgtctgcgtacggtattagatgacaaaaaagagctgtggcaggaaatcaattattattttaaaagcctggaaaaataacagttgaataaaaagtatggaaactgctatttttaaaatctttaaaaattatctttgacgattaagtaagattatataacgtcatgttttttcataaagtcctataattagattcgtaagcagtaatgcaaaaaatatttaaggaagtggactttatgaaattcaaaaatcttgtattaacattaggtgtattgatgatgctggcctttacttctatggctgctgccgcgcctagtcaggtaaaccgcagtatgacagcgattaatgcagcaaaagcagaaatacctgctgtatgcgaactggttggttataatgtggacggtgataccagtatcataacttttaaagaccctaatactttggaacgttatgttgtagatgttaatacagcgactgccaaggtgcaggaaatcgaagtaaaaggtgctacatttgttatgggcagtactatggttactaaaactccggatgatatagaaaaaattgttttgaaaaattatcctaatgcctatgaaatcgttattactcaagggcaggacggaaataatatttactatattgccgactttttgactgataaatttgatggagaattaaagttagatcctgttaccggtgctatctgtgaacgtgaactggaatacttctaagcgaaaaataaaaggagtacatcaatcgatgtactcctttttattttttagaaaagttttaaaatatcattgttgttaaaagcgctgatcggttttaaaggacgcggagaaccgtcaggctgctgcagttgtttgtccatccagatgatatccagccactggtcaaatttatagccggcttttggatgcggcccaagatttctgaagccaaaggcagcatgaaaatcgatactgcgttggttattagcagtaatgcatgcataaacattataaaaaccctgtttttgaagcaggtccaaaaggcagctgtaaagttttttgccaacaccgttgttttgggcttcaggggccagatatattgaaagatcagcgtcgtaaagataagcgatgcgttcctgataaggagagccgtaggcaaaacctaagattttgccgtttcgttcataaactaaatacgggtatttactgctgatgtttgaaatacgttcagtaaatcctgcgagggtaggcggttcatattcaaaagaaatagttgtatccagaacataaggtgtgtaaatatttaaaattccggtgctgtcttttaattcaacaaaacgaatctgctcctgcattttcaagcctcctgggtctattgacgttcgttcaaaatgcgtttaaagattgcaaacatgacttctgctacgtcatcattaaatttgattgctatggattcaccgtctttttttgtaaaataaatgatatttactgaaagattggcattatccaaatcgttgagttctacaacctttgccattttgttgcttaaataaatgatgcgctggttcgtaaagaaaagatagccgatatcgacaacagcggttacttcttcagtaaaatggggatgttcgattttttcgcctttaaaagaaattgtttcgtctatttccaagcggcgggtcaattcaaaatagttatcttctttctctattgttttatgttcgcagaaacctgcctgctgagctgcggcatgacatatttctccttcgttcagcggaaagtcgactttgatatctcctaaaggagcattttcggctgaccataaataacggtatttatctaaagcattttgaatattgggtttgaattcataaggtatatcgagttttgtacaaatttccctcaaagcggtttcttcatcaggactgaacctctgctgctcagctatttcgtcaaattttttattcaagtagtcgtgaaatacctgaacgcgtatatcatagccatcttcgtaatcataaccaaaaacattattgatttcgctgattgttagaggttcttctccactgattatttttcgacagcgagagaagtaagctacttttttagctccattatcagctaaacgctgtaatttttcgggaagttctaaaacttgagcgagatgttttgtttcttcgaaaacggggtcatctttgcttactgcgctaatatatacatggtcggctaccttacggtacatactgctgcggtattcgatattgctgctgtcaaattttgctccccagtttttgataaaattgctgacgatctcttcggttaattcagtagcagcagtactttctgccaaaaaattatttatttcaactaaggcgttatgaccgggcttactgccaaagagcctgctcatcattccctgggtctctaattcctgcttttcaaatccgttcactggtgtgctccttttcttagctaaattaaatgatattgtaaataatattatagatattatacaagaaaaactgtaaaaagtcatttgcccaatttgttaagaaaaaattataggcagtagttattttgttgctgcggcggttgaaaaacagttttatgagttttttttatataaatgctatgatataatcaaattaataatagttggtttggagatgagtctatgtccttgttggatgagagaggcacaggggctatcagctggcagcgtaatttagccgtattatggtgtggcgtgttttttgcatgcgccagttatacgatggtagttccgtttttacctgtttatttactacaagagctgcatgttgaaagtagtgaagtaaatttttggagcggtcttgtctattcggtaacttttttaggcgcttcgattatggccccgtattggggggcaagagctgacagggttggtcagcggcgtatggcgatacgtgcaggatttggtctcgcatttacctactggctggcaggaatttcgcaatcgccggaacagcttttaggtgtgcgtattttgactggtttaatcagcggatttgtacctgcatctatgtcgctggtgtcttcgacactgcctgaaagccgcatgggctggggaatgggcctgatgcagactgcggttgccagcggcagtattttaggaccgatgatgggcggttattttagttcctggtttggtatgagactatctttttttgttgccagctgttgtttaggattggcgacagtaatggttgtgctttttgttcgagatgtgccgcacagccaggaagaacagaaaacaaaaatcaatttgtggcaggatctgcaggagtctttgcataataaagggctgctgtatgtaatgacgatgttctttctgatccaggtctgtacgatgatcattcagcctttggtaactatgtatgtttcgcatttgatgggtagaatggatgaatcggtcgttaaagctgccggtattattttttcgctggcaggtatagccggtatcattgcagctccgttttggggcaaacgtggtcaacagctaggttacactaaggtgctctgttttgttttattttgtgccggcgctatcaatctgtgtcagatttttgtgcaggatatctggcagtttgcagggatccagttcgtatacggtttattcctggcaggagctgtacctaatgttaacgcccgcctggtagaggtcacagatccgtcaatgcgcggtaaggcttttggtctggttacttcagcacagcagttcggcggtgttataggtcctctgctgggaggttttttgggcggctatatgcttacacgtcatattctggtcattacgggaattattttactgctggcaggcagttatacgtattttacgaaagtgaaaaagactgcggaagtttaaggaacggtttaaaaacttacattatgaaactttagtgaattacaaggcctgtgctcttgactaaaatttaatttgagtgaataattaagatagtaacggatactgattatcacatgaaagtgagtgatttatatgttaaaagaatttgaagggcaaatgcctaaaatcgacaaaaaagcacatgcttttgaaagtgccgatctgattggtaaagtagaaatgaaagaatacagcagtgcatggttcaatgttactattcgcggcgatgttaatcgtatagaagtaggacgctacagcaatatccaggataactgctgcctgcatgttgccgatgattatgcctgcattgttggtgattttgttactgtcggtcatggtgctatcctgcacgcctgtactgtggaagatcattgcctgatagggatgcatgctaccgtacttgatggcagcgttataggacatggctccattgtagcagctggcgcagtggtgacaaagggaactaaagtaccgccgttttcactggttgccggcattcccgccaaagtgatcaaaactcttgacgaaagtaatctggataatattcatgcacaggctgttaaatataaagatttgtggagcaaacgccacaatatcatgccggatattgacggcgaaacttatcatggtgaaaaaatagtataaaatataagtaaaaggagctgctgctgcagctcctttttaatttgctgtacggcaggaataaacatttcaggcggcgaatatatacgctagctgaattcgtgaaaggagttttaaaaatgaaagatacgataaaagaatatttggcaggtcagtatgacgcttatgtaaaagatttggagacgctgactaatatcgattcagggaatggagatttgcagggaacggaagctgctaataagtttgtcgcggaaaaaatgcaggagctcggagctgttactgaattccgttataatgacagggcgtgccatctgatttctcgcctgaagggaagcggaaaattgagtattctgcttgttgcacatgttgacacggtattcaaccgcggtgaagcggctaaacgtccttttaaggttgatgagaatggatttgcctgggggcctggcgtcggtgatgacaaggctactgtagtggaagttatttacgggttaaaagctttgctgaaagcaggattttctgattttaaagaaattatttattataccaacggcgaagaagaaggcggctccccgactgccgaagcgattgtggcagagctttctcagcaggcagattttgccgttattatggacgtagcccgtcctaactggggcatcgttacacagcgtaagggtaatgcaaagtataaggttcaggtaacagggattggcggacatcatggcaatgcttcacagcattgcgccaatgctattcatcagcttgcttatacaattacagagctgcataaattagcaagccctatgcctggagatccggcagattttacagcaaaagcgttagctgatcgcggcattgttgattctggacagtttattcctcagaatactgtcaatgtcggcgttattggatcgaccaatgacaagatcagtgtcattcccggcgatgcttattgtgaagtcaatgttcgttgtttttctgtagcggagcaggaacggttggacagagagatcaaggctttagcagataaagcagttgttgccggaactaaagttgaaattacgggcggtattgttacaggaccgatggagaaaacgccgcaggtccagaagatggttgatgtttacagcaggatcgtcagggatgaatttggtggtaatgttactgaatgggtcgccggtggattgactgacggtaacagaactgcaaaatatattcctactctagatgcattgggagtagaaaactacgatgagcatactgatcatgaatccgttgatttaaaaacagctgttcccagaactacagctttcgctctgactttagcagagctaacaaaaatattttaatttttttgttgcaggcagtcgcagactgcctgcagttatgttaaactaataaagatatgataaatctgtaaggtaagggatgaaagcatgggaaaaaaagacaataaatattctaacgcagcgacatcattgagtgaaggtggtatttttgggttaggacgtcctattgattttactgatgggataacaagaatagcacttatctgtactattttaacgtcggtagcggcaactttttggaaaactatgggcggtgccgatacagaaactgccatgtattttgggctcaatacggctgctgcgtttttcttttcctggctgattgcccaggagcttgatccggatcgcaagctgggtggtattattggcggagggctgagtattgtcgctgctttgactctgggagaaggtaatgttcttgttctgctgtggctgctgtttatcctgcggatgctaaaccgtacttccggttcgcggcacaagatcggggataatgttttcttgatttttattgcctattggcttgggaaagatggatattggctttatccagtacttacgggcacggcgtatattattgaaagccagatcaggggcggatattacaggagcctgtatttaggcggtttggcgtttgctgttacagcaatggccgacacttctatgaaagcgcacagtctttcgatgatttatgtctatctgatggcgctttgttttattttgtttttacctgaaataagaatggcggcagtaacagaagccaaaggtgatattgacggaaaacgtatcagtccgcagagactacaggtggcacaaggcgcttttctgatgatagggttttcagtgccgtgggtacatggcgacgcacaggctgctgcgctgacaccagcctggatggccggaataggtgtaggcgtttttctgcttgttgatgctattcaaaaagctatgtttgaaaaaaataaacaataaattcaggaggttttttaaatgagtgaaaacagaaaaatcagatttacaactaataaaggagaatttatcgtcgaaatgttcgaagataaagcgcccaaaacgactaaaaattttattgaattgacagaaaaaggcttttataatggcgtagtatttcatcgtgttatcgacggctttatgattcagggcggtgaccctaccggtactggtatgggtggaccagggtataaaattgatgacgaatttggtgaggggctgcagcatgatgacgaaggtgttctttcaatggctaatgccgggcccaacactggcggcagtcagttttttatcactttagcacctacaccatggcttaacgggcatcatgctattttcggcaaagttgttgaagggatggatattgtacggttgattggtgtagtacctacggattttcgcgatcgccctaaagatcctgtaattatggaaactgtagaggttataaaataatttgcctgcgtatgtttacatattacgctgtcgtgatgaatcactttataccggctggacaaatgatttggaaaagcggcttgaagcgcataacagcggtaaaggagcaaaatatacccgtgggcgctgtcctgtaactttggtctatagtgaaacgctgtcaactaaggaagaagcgctgcatcgcgaatgtgaaatcaaaaaaatgactaaaactgctaaattagccttaattaagcaaaatatgaaggaatagaagcaaaaatattaaaaaaattacaaaaaatagcaaaagagagttgctttattgtaaataataggctataatgggctggtgagtgagatgttctagctcctcattaaagtaatttttaggaggcccagaaaatgactggcaaagtaaaatggtttaacgcagaaaaaggttatggtttcatcgaacgcgaagatggtggcgacgtattcgtacatttctccgctattcaatccgaaggtttcaaaactcttgaagaaggtcaagcagttgaatttgacgttgttcaaggcaaccgcggtgaacaagctgccaacgttgttcgtttataataaaaacatctaaacccacataggaatgcgggtttagtacgacatcaatatattattgagtttaaaatgagttttattaaatgaaataacgaaaattaaggagcgatcgtgtctatcgtttgaactggttttacagaaaattggttcagcgcagatgcgatcgtttcttgtttatcaggaaataaatgtgcataaactttgagggtgatttgcggattttggtgcccgagccgttgagctatcaaaagaacattcgcacccatatcaattaatagcgaagcgtggctgtgtcggaaatcgtgaatgcgaattctgggtagatccattgcttcgcttattttttttatctgatttcgtaaagcgaatggtcggcagtaaaaaaacggctcattatctttaaccttatatagtttttttaggtgaacctgaatattgttatagagaaattcgggtattgtaacaatacgccgggatgaataggtttttgttggtccaatctcatatcgcagcggattatgcagcgtcataatagttttagttatttggatagctttattaggcaagatatcggatggacataatgcaagacattcgccgactcggcagccggtataaaacagaatgtcaaaggctagacggtattcttcgttctttacttgacctatgaagagattatactggtcaggtgtccagatcttcatagtttcatgttttgatactttaggtggtttgatatgttttaatggattatctttgtagccatagatgatacgagcaaaattaaatgtagctccgaaagttgtcataatagtttttaggtatgaagcacttaggccttctttattcatggtctgagtccactcaattattttatcaggggttatttctgataatttcattttgccaaagtaaggggttattttatcaagacgtccttctattgtttgagttgacgaagctctattattaagcttgtagttttcaagatatttgactactaacgtgctaaaagttacgtcgttagttgcgatatagtttgatttgtagtccacttcgtattttaacgcttcactttttttatcaaagccacgttttactatatgtcgatttttaccagtccaatcttttatatagaattggcaataccatttttttgttttttcgtctttgtaagctggcatgatagtcctcctgagtttattgtcgaacgcataatggcgaacaacgaatatatgtttatgaattagtgcctaaattatgcagccctaataaaagggctgctttctatttgtctgtttcttttaattgttttctaacgtctttttcttgaagttctttataattggtttttgatataactgtacgtccggtttttttctccagagctttacgtgcatcaccggcaattttaccgccagctttagctgcagaggaattttccttcataccgtaagcatcatgtgttttcgctatctcggtggtagaggcttcaccaagagcggagaaaagtagttccaggtcagtcatatgatctcttaaattctctgtaggacggtcaagagattttatctttttatattctgccggtgtgattccgaaggttgctttacttatttctgcggtaaggatagcgtattcttttccttctttgattccacgctttttccattcatcggttaacgtatcccgtattgctatgccacgaatacgttgttctatccattcatcactgtaacctttagctctataggtatcacgaattcgtttttgagccagctccgggttttcaatttcggcgattcgttcactacctacctgggcaagccattgtttaaatggttctgctttgggggatggaattgattgaataatgcgcaggataccttttgttgttgccgctagtgtacgccgatttttgccagtatctgtaagcatatttacctggggacaatttgtccctatgtagacacccaattctgaatcccttttacgcatttttttcagataatcagttggattagcactgtctgtaagagccccaactacgtcaactacagaaaaataccattgctgttcttcttcgttccatacagaacgtatttgcttagattgaaataactttatattactcataaattgctactccttgttgttcgagcatataaactttgctgtttcaaacataatttttactaaagtaccgtagagaatatatggttacagagtgggggttaaaatatgcagccctaataaaagggctgcttttttattgtttgtttaatttttcccaaagagaattaaatttatgtgaaatgaaatttaaactttgttttgatagaatgtttaatttccgtttatggtacaggtttttttcaataccttcagctgacggatatttttccagtatgtcgtatgtgactaacaaaataaaaatttcttttgggtgtggtactattctacttaaattttttataaattcatcttccgtcattttataactgacatttagatcaaaaatatactcttttaatttatttgctaagttgttagccttattagccaatgctataagttcatatttttcaggttctatcccataataaagttctttaatgtatggtggaacggaggttaatatttctacgtcatttgtagctatagcagtaagaagtaaatttaacaaccaagtttcctcaagttgttcactcaaaaattgctcattctttttcgttaatgtaagctggtgaaaaatggagaataatttttttgcgtattcataactacttactttacctttatgggaatggaataattcaagtgtttcgtaaaagatgtcgaaatcattatctaaatgaggatcaagtggaggcgggggcattactggctccggtaaactttcttggacaatcatttcttcaggctcgtttgatgttgtaatgtcaggctcaaattcttctgttattacaggctgctgttgttgtgtaggtaagtctggttgtggaagttcacggccgcattgtgggcattcttcccagcgttttctcattctacgaccgcagaaagggcattcttttaagaagcttgacgctgccgactgcggacgtaaagattttgaaatttgtttgccggtagcagtaaaagacattcccgtacctggtattccgagtgtggctctactgccacgactgccgatcgttaccttagcaccacgaggcccgatactggcactgataccttttttaccgaggtttaaactgatacctggagctattttgattgattttctaaacctaaatcccattctgatcatcacctttgatggagttattggctaattaattcatttatgattttatgtactatcattggatccggcctacgttctttaattattgcattaagatgttcagcatcaagatcgtggctgtatgatagaagatgtatcgcaaattcgttggcttcattctcccggcggcaggggacatagtaaggtttatttgtacttagatagtaaccatatccagagtgcagccgtgcatgaccgagttcgtggcataaaactatacgcttttgaagctcggataaattcgaatttaaaacgatacattttcttcttagtgggcggattagaaaacctctaatttctgaaggtaaatccaactcataaatatcgaagttt
